United States Patent Application Publication US 2018/0126003 A1 - sequence listing, part 11

SEQ ID NO: 14149 - DNA, 7470 bp, Artificial Sequence
  derived and/or modified sequence
atgggcgccagcagccccagaagccccgagcccgtgggcccccccgcccccggcctgcccttctgctgcggcggcagcctgctggccgtggtggtgctgctggccctgcccgtggcctggggccagtgcaacgcccccgagtggctgcccttcgccagacccaccaacctgaccgacgagttcgagttccccatcggcacctacctgaactacgagtgcagacccggctacagcggcagacccttcagcatcatctgcctgaagaacagcgtgtggaccggcgccaaggacagatgcagaagaaagagctgcagaaacccccccgaccccgtgaacggcatggtgcacgtgatcaagggcatccagttcggcagccagatcaagtacagctgcaccaagggctacagactgatcggcagcagcagcgccacctgcatcatcagcggcgacaccgtgatctgggacaacgagacccccatctgcgacagaatcccctgcggcctgccccccaccatcaccaacggcgacttcatcagcaccaacagagagaacttccactacggcagcgtggtgacctacagatgcaaccccggcagcggcggcagaaaggtgttcgagctggtgggcgagcccagcatctactgcaccagcaacgacgaccaggtgggcatctggagcggccccgccccccagtgcatcatccccaacaagtgcaccccccccaacgtggagaacggcatcctggtgagcgacaacagaagcctgttcagcctgaacgaggtggtggagttcagatgccagcccggcttcgtgatgaagggccccagaagagtgaagtgccaggccctgaacaagtgggagcccgagctgcccagctgcagcagagtgtgccagcccccccccgacgtgctgcacgccgagagaacccagagagacaaggacaacttcagccccggccaggaggtgttctacagctgcgagcccggctacgacctgagaggcgccgccagcatgagatgcaccccccagggcgactggagccccgccgcccccacctgcgaggtgaagagctgcgacgacttcatgggccagctgctgaacggcagagtgctgttccccgtgaacctgcagctgggcgccaaggtggacttcgtgtgcgacgagggcttccagctgaagggcagcagcgccagctactgcgtgctggccggcatggagagcctgtggaacagcagcgtgcccgtgtgcgagcagatcttctgccccagcccccccgtgatccccaacggcagacacaccggcaagcccctggaggtgttccccttcggcaagaccgtgaactacacctgcgacccccaccccgacagaggcaccagcttcgacctgatcggcgagagcaccatcagatgcaccagcgacccccagggcaacggcgtgtggagcagccccgcccccagatgcggcatcctgggccactgccaggcccccgaccacttcctgttcgccaagctgaagacccagaccaacgccagcgacttccccatcggcaccagcctgaagtacgagtgcagacccgagtactacggcagacccttcagcatcacctgcctggacaacctggtgtggagcagccccaaggacgtgtgcaagagaaagagctgcaagaccccccccgaccccgtgaacggcatggtgcacgtgatcaccgacatccaggtgggcagcagaatcaactacagctgcaccaccggccacagactgatcggccacagcagcgccgagtgcatcctgagcggcaacgccgcccactggagcaccaagccccccatctgccagagaatcccctgcggcctgccccccaccatcgccaacggcgacttcatcagcaccaacagagagaacttccactacggcagcgtggtgacctacagatgcaaccccggcagcggcggcagaaaggtgttcgagctggtgggcgagcccagcatctactgcaccagcaacgacgaccaggtgggcatctggagcggccccgccccccagtgcatcatccccaacaagtgcaccccccccaacgtggagaacggcatcctggtgagcgacaacagaagcctgttcagcctgaacgaggtggtggagttcagatgccagcccggcttcgtgatgaagggccccagaagagtgaagtgccaggccctgaacaagtgggagcccgagctgcccagctgcagcagagtgtgccagcccccccccgacgtgctgcacgccgagagaacccagagagacaaggacaacttcagccccggccaggaggtgttctacagctgcgagcccggctacgacctgagaggcgccgccagcatgagatgcaccccccagggcgactggagccccgccgcccccacctgcgaggtgaagagctgcgacgacttcatgggccagctgctgaacggcagagtgctgttccccgtgaacctgcagctgggcgccaaggtggacttcgtgtgcgacgagggcttccagctgaagggcagcagcgccagctactgcgtgctggccggcatggagagcctgtggaacagcagcgtgcccgtgtgcgagcagatcttctgccccagcccccccgtgatccccaacggcagacacaccggcaagcccctggaggtgttccccttcggcaagaccgtgaactacacctgcgacccccaccccgacagaggcaccagcttcgacctgatcggcgagagcaccatcagatgcaccagcgacccccagggcaacggcgtgtggagcagccccgcccccagatgcggcatcctgggccactgccaggcccccgaccacttcctgttcgccaagctgaagacccagaccaacgccagcgacttccccatcggcaccagcctgaagtacgagtgcagacccgagtactacggcagacccttcagcatcacctgcctggacaacctggtgtggagcagccccaaggacgtgtgcaagagaaagagctgcaagaccccccccgaccccgtgaacggcatggtgcacgtgatcaccgacatccaggtgggcagcagaatcaactacagctgcaccaccggccacagactgatcggccacagcagcgccgagtgcatcctgagcggcaacgccgcccactggagcaccaagccccccatctgccagagaatcccctgcggcctgccccccaccatcgccaacggcgacttcatcagcaccaacagagagaacttccactacggcagcgtggtgacctacagatgcaaccccggcagcggcggcagaaaggtgttcgagctggtgggcgagcccagcatctactgcaccagcaacgacgaccaggtgggcatctggagcggccccgccccccagtgcatcatccccaacaagtgcaccccccccaacgtggagaacggcatcctggtgagcgacaacagaagcctgttcagcctgaacgaggtggtggagttcagatgccagcccggcttcgtgatgaagggccccagaagagtgaagtgccaggccctgaacaagtgggagcccgagctgcccagctgcagcagagtgtgccagcccccccccgacgtgctgcacgccgagagaacccagagagacaaggacaacttcagccccggccaggaggtgttctacagctgcgagcccggctacgacctgagaggcgccgccagcatgagatgcaccccccagggcgactggagccccgccgcccccacctgcgaggtgaagagctgcgacgacttcatgggccagctgctgaacggcagagtgctgttccccgtgaacctgcagctgggcgccaaggtggacttcgtgtgcgacgagggcttccagctgaagggcagcagcgccagctactgcgtgctggccggcatggagagcctgtggaacagcagcgtgcccgtgtgcgagcagatcttctgccccagcccccccgtgatccccaacggcagacacaccggcaagcccctggaggtgttccccttcggcaaggccgtgaactacacctgcgacccccaccccgacagaggcaccagcttcgacctgatcggcgagagcaccatcagatgcaccagcgacccccagggcaacggcgtgtggagcagccccgcccccagatgcggcatcctgggccactgccaggcccccgaccacttcctgttcgccaagctgaagacccagaccaacgccagcgacttccccatcggcaccagcctgaagtacgagtgcagacccgagtactacggcagacccttcagcatcacctgcctggacaacctggtgtggagcagccccaaggacgtgtgcaagagaaagagctgcaagaccccccccgaccccgtgaacggcatggtgcacgtgatcaccgacatccaggtgggcagcagaatcaactacagctgcaccaccggccacagactgatcggccacagcagcgccgagtgcatcctgagcggcaacaccgcccactggagcaccaagccccccatctgccagagaatcccctgcggcctgccccccaccatcgccaacggcgacttcatcagcaccaacagagagaacttccactacggcagcgtggtgacctacagatgcaacctgggcagcagaggcagaaaggtgttcgagctggtgggcgagcccagcatctactgcaccagcaacgacgaccaggtgggcatctggagcggccccgccccccagtgcatcatccccaacaagtgcaccccccccaacgtggagaacggcatcctggtgagcgacaacagaagcctgttcagcctgaacgaggtggtggagttcagatgccagcccggcttcgtgatgaagggccccagaagagtgaagtgccaggccctgaacaagtgggagcccgagctgcccagctgcagcagagtgtgccagcccccccccgagatcctgcacggcgagcacacccccagccaccaggacaacttcagccccggccaggaggtgttctacagctgcgagcccggctacgacctgagaggcgccgccagcctgcactgcaccccccagggcgactggagccccgaggcccccagatgcgccgtgaagagctgcgacgacttcctgggccagctgccccacggcagagtgctgttccccctgaacctgcagctgggcgccaaggtgagcttcgtgtgcgacgagggcttcagactgaagggcagcagcgtgagccactgcgtgctggtgggcatgagaagcctgtggaacaacagcgtgcccgtgtgcgagcacatcttctgccccaacccccccgccatcctgaacggcagacacaccggcacccccagcggcgacatcccctacggcaaggagatcagctacacctgcgacccccaccccgacagaggcatgaccttcaacctgatcggcgagagcaccatcagatgcaccagcgacccccacggcaacggcgtgtggagcagccccgcccccagatgcgagctgagcgtgagagccggccactgcaagacccccgagcagttccccttcgccagccccaccatccccatcaacgacttcgagttccccgtgggcaccagcctgaactacgagtgcagacccggctacttcggcaagatgttcagcatcagctgcctggagaacctggtgtggagcagcgtggaggacaactgcagaagaaagagctgcggccccccccccgagcccttcaacggcatggtgcacatcaacaccgacacccagttcggcagcaccgtgaactacagctgcaacgagggcttcagactgatcggcagccccagcaccacctgcctggtgagcggcaacaacgtgacctgggacaagaaggcccccatctgcgagatcatcagctgcgagcccccccccaccatcagcaacggcgacttctacagcaacaacagaaccagcttccacaacggcaccgtggtgacctaccagtgccacaccggccccgacggcgagcagctgttcgagctggtgggcgagagaagcatctactgcaccagcaaggacgaccaggtgggcgtgtggagcagccccccccccagatgcatcagcaccaacaagtgcaccgcccccgaggtggagaacgccatcagagtgcccggcaacagaagcttcttcaccctgaccgagatcatcagattcagatgccagcccggcttcgtgatggtgggcagccacaccgtgcagtgccagaccaacggcagatggggccccaagctgccccactgcagcagagtgtgccagcccccccccgagatcctgcacggcgagcacaccctgagccaccaggacaacttcagccccggccaggaggtgttctacagctgcgagcccagctacgacctgagaggcgccgccagcctgcactgcaccccccagggcgactggagccccgaggcccccagatgcaccgtgaagagctgcgacgacttcctgggccagctgccccacggcagagtgctgctgcccctgaacctgcagctgggcgccaaggtgagcttcgtgtgcgacgagggcttcagactgaagggcagaagcgccagccactgcgtgctggccggcatgaaggccctgtggaacagcagcgtgcccgtgtgcgagcagatcttctgccccaacccccccgccatcctgaacggcagacacaccggcacccccttcggcgacatcccctacggcaaggagatcagctacgcctgcgacacccaccccgacagaggcatgaccttcaacctgatcggcgagagcagcatcagatgcaccagcgacccccagggcaacggcgtgtggagcagccccgcccccagatgcgagctgagcgtgcccgccgcctgcccccacccccccaagatccagaacggccactacatcggcggccacgtgagcctgtacctgcccggcatgaccatcagctacatctgcgaccccggctacctgctggtgggcaagggcttcatcttctgcaccgaccagggcatctggagccagctggaccactactgcaaggaggtgaactgcagcttccccctgttcatgaacggcatcagcaaggagctggagatgaagaaggtgtaccactacggcgactacgtgaccctgaagtgcgaggacggctacaccctggagggcagcccctggagccagtgccaggccgacgacagatgggacccccccctggccaagtgcaccagcagaacccacgacgccctgatcgtgggcaccctgagcggcaccatcttcttcatcctgctgatcatcttcctgagctggatcatcctgaagcacagaaagggcaacaacgcccacgagaaccccaaggaggtggccatccacctgcacagccagggcggcagcagcgtgcaccccagaaccctgcagaccaacgaggagaacagcagagtgctgccctag

SEQ ID NO: 14150 - protein, 385 aa, Artificial Sequence
  derived and/or modified sequence
MGCRRTREGPSKAMIFPWKCQSTQRDLWNIFKLWGWTMLCCDFLAHHGTDCWTYHYSEKPMNWQRARRFCRDNYTDLVAIQNKAEIEYLEKTLPFSRSYYWIGIRKIGGIWTWVGTNKSLTEEAENWGDGEPNNKKNKEDCVEIYIKRNKDAGKWNDDACHKLKAALCYTASCQPWSCSGHGECVEIINNYTCNCDVGYYGPQCQFVIQCEPLEAPELGTMDCTHPLGNFSFSSQCAFSCSEGTNLTGIEETTCGPFGNWSSPEPTCQVIQCEPLSAPDLGIMNCSHPLASFSFTSACTFICSEGTELIGKKKTICESSGIWSNPSPICQKLDKSFSMIKEGDYNPLFIPVAVMVTAFSGLAFIIWLARRLKKGKKSKRSMNDPY

SEQ ID NO: 14151 - DNA, 1158 bp, Artificial Sequence
  derived and/or modified sequence
atgggttgtaggcgcacgcgggagggcccttcaaaggctatgatctttccatggaaatgtcagtcaacacagagagatctgtggaacatttttaagctatgggggtggacaatgctctgttgcgactttcttgctcaccacggcaccgactgctggacttatcattattccgagaagcccatgaactggcaacgggcgaggaggttctgccgtgataactacaccgacttggtagctatccaaaacaaggctgagattgaatatttggagaaaaccctcccattttccagatcttactactggattggcatcaggaaaatcggtggcatttggacttgggtcgggaccaataaatccctcaccgaagaagcagagaattggggtgatggcgagcctaacaacaaaaagaacaaggaggattgcgtcgagatctacattaaacgtaacaaggacgcaggcaagtggaatgacgacgcttgtcataagttaaaagcagctctgtgctacactgcaagttgccagccttggtcttgtagcggacacggcgagtgcgtggagataatcaacaactatacttgcaattgtgacgttggctattatggaccccaatgtcaattcgtcattcagtgtgaacctctggaggcccctgagctggggactatggactgtactcatcctctgggaaatttttctttcagctcacagtgtgcattctcatgctcggagggaaccaatctaacaggtatcgaggagaccacctgtggcccgttcggtaattggtcttccccagagcctacctgccaggtcatccagtgtgagcctctgtctgcaccagaccttggaataatgaactgcagccaccccttggcgtcattttcctttacttctgcatgtacattcatctgctctgagggcactgagctgattgggaaaaagaagacaatttgtgagtcaagcggtatctggagcaatccaagccctatatgtcagaagctggacaagagcttctctatgattaaggaaggagattacaaccctttgtttattcctgtggcagtgatggttactgctttctccggactggcgtttatcatctggctggccaggaggctcaagaaaggtaaaaagtctaaacggtccatgaatgatccttattag

SEQ ID NO: 14152 - DNA, 1158 bp, Artificial Sequence
  derived and/or modified sequence
atgggctgcaggaggacccgggagggccccagcaaggccatgatcttcccctggaagtgccagagcacccagagggacctgtggaacatcttcaagctgtggggctggaccatgctgtgctgtgacttcctggcccaccacggcacagactgctggacctaccactacagcgagaagcccatgaactggcagagggcccggcgcttctgccgggacaactacacagacctggtggccatccagaacaaggccgagattgagtacctggagaagaccctgcccttcagccgcagctactactggattggcatcaggaagattggaggcatctggacctgggtgggcaccaacaagagcctgacagaggaggccgagaactggggagatggagagcccaacaacaagaagaacaaggaggactgtgtggagatctacatcaagaggaacaaggatgctgggaagtggaatgatgatgcctgccacaagctgaaggccgccctgtgctacacagccagctgccagccctggagctgcagcggccatggagaatgtgtggagatcatcaacaactacacctgcaactgtgatgtgggctactacggcccccagtgccagtttgtgatccagtgtgagcccctggaggcccctgagctgggcaccatggactgcacccaccccctgggcaacttctccttcagcagccagtgtgccttcagctgcagcgagggcaccaacctgactggaattgaggagaccacctgtggcccctttggaaactggagcagccctgagcccacctgccaggtgatccagtgtgagcccctgagcgccccagacctgggcatcatgaactgcagccaccccctggccagcttctccttcaccagcgcctgcaccttcatctgcagcgagggcacagagctgattggcaagaagaagaccatctgtgagagcagcggcatctggagcaaccccagccccatctgccagaagctggacaagagcttctccatgatcaaggagggggactacaaccccctcttcatccctgtggccgtgatggtgacagccttcagcggcctggccttcatcatctggctggcccggcggctgaagaagggcaagaagagcaagaggtccatgaatgacccctactag

SEQ ID NO: 14153 - DNA, 1158 bp, Artificial Sequence
  derived and/or modified sequence
atgggctgccggcggacccgggagggccccagcaaggccatgatctttccttggaagtgccagtccacacagcgggacctgtggaatattttcaaattgtgggggtggaccatgctctgctgtgactttctggcccaccacggcacagactgctggacgtatcactacagtgagaagcccatgaactggcagagggcgcgaaggttctgtagagataactatacagacctggtggcaatccaaaataaggccgaaatagagtacctcgaaaagactctgccattctcacgctcctattactggatcgggatacgcaaaatcgggggtatatggacctgggtaggcacgaataagtccttaacagaggaggctgaaaactggggagatggcgagccaaacaataaaaagaacaaggaagattgcgtcgagatctacatcaaaaggaataaggacgccggcaagtggaatgatgacgcctgtcataaactcaaggcagcactgtgttacaccgcgtcgtgtcagccatggtcttgttccggacacggggagtgcgtggaaatcattaacaactatacgtgtaattgtgatgtgggttactacgggccccagtgtcagtttgtgatacagtgcgagccactagaggcaccggagttggggacaatggattgcactcacccgctggggaacttttcgttttccagccagtgtgcctttagttgttccgaaggtacgaacttgaccggaattgaagaaactacctgtggcccctttgggaattggtccagtcccgagccaacatgtcaggtgattcagtgcgagcccctgtctgctccggatctaggaataatgaactgcagtcaccctctggcttccttcagtttcacctccgcctgtaccttcatctgcagtgaaggaactgaactgataggaaagaaaaaaacaatttgcgaatcttccggaatctggtccaatccaagcccaatctgccagaaacttgacaaatctttctcaatgattaaagagggagattataatcccctctttattccagtcgccgttatggtgactgcattctctggtctggcgttcatcatttggctggcccgacgactgaagaaaggaaagaagagtaaaaggagcatgaacgatccatattag

SEQ ID NO: 14154 - DNA, 1158 bp, Artificial Sequence
  derived and/or modified sequence
atgggatgcaggagaaccagggagggacccagcaaggctatgatctttccttggaagtgccagtccacacaaagagacctgtggaatatttttaaactctggggatggacaatgctgtgctgtgacttcctggcacatcacggtacagattgttggacttatcattactcggagaaacctatgaactggcagagggccaggcgtttttgcagagataattataccgatcttgtggcaatacagaacaaagccgaaatcgaataccttgagaaaacgttgcctttttccaggagctactattggataggaatacggaaaatcggaggcatctggacatgggtgggaacaaacaaatcattgacagaggaagctgagaactggggagacggcgaacctaacaataaaaaaaacaaggaggattgtgtggaaatctacatcaagcggaacaaagatgccggaaaatggaatgatgacgcttgccacaaacttaaagcagcactctgttataccgcatcctgccagccatggtcctgctctgggcacggagaatgtgtcgagattatcaacaattacacctgtaactgcgacgtggggtattacggccctcagtgtcaatttgtgatccaatgcgaacctttagaggccccagagttgggtaccatggactgtacgcaccccctaggaaatttctctttcagcagccaatgcgcatttagctgcagcgagggcacgaatctaacgggtatcgaagaaacaacatgcgggccatttggcaactggtccagcccagaaccaacttgccaagttattcagtgcgaacccctctcagcaccggacctggggatcatgaactgctcgcaccctctggcctcgttttcatttacgtctgcttgcacatttatatgtagcgaggggaccgaactgatcggaaagaagaagaccatatgcgaatcgagtggaatctggtccaatcccagtcccatctgccagaagctcgacaagagttttagtatgatcaaagagggggactacaatccacttttcataccggtagcggttatggtgacagccttctctggactcgcttttattatttggctggccagacggcttaaaaaggggaagaagtccaagaggagcatgaatgatccttactag

SEQ ID NO: 14155 - DNA, 2436 bp, Artificial Sequence
  derived and/or modified sequence
ggaaggggagggaaaaggggaggaggaggaggatgtgagactgggttagagaaatgaaagaaagcaaggctttctgttgacattcagtgcagtctacctgcagcacagcacactccctttgggcaaggacctgagacccttgtgctaagtcaagaggctcaatgggctgcagaagaactagagaaggaccaagcaaagccatgatatttccatggaaatgtcagagcacccagagggacttatggaacatcttcaagttgtgggggtggacaatgctctgttgtgatttcctggcacatcatggaaccgactgctggacttaccattattctgaaaaacccatgaactggcaaagggctagaagattctgccgagacaattacacagatttagttgccatacaaaacaaggcggaaattgagtatctggagaagactctgcctttcagtcgttcttactactggataggaatccggaagataggaggaatatggacgtgggtgggaaccaacaaatctcttactgaagaagcagagaactggggagatggtgagcccaacaacaagaagaacaaggaggactgcgtggagatctatatcaagagaaacaaagatgcaggcaaatggaacgatgacgcctgccacaaactaaaggcagccctctgttacacagcttcttgccagccctggtcatgcagtggccatggagaatgtgtagaaatcatcaataattacacctgcaactgtgatgtggggtactatgggccccagtgtcagtttgtgattcagtgtgagcctttggaggccccagagctgggtaccatggactgtactcaccctttgggaaacttcagcttcagctcacagtgtgccttcagctgctctgaaggaacaaacttaactgggattgaagaaaccacctgtggaccatttggaaactggtcatctccagaaccaacctgtcaagtgattcagtgtgagcctctatcagcaccagatttggggatcatgaactgtagccatcccctggccagcttcagctttacctctgcatgtaccttcatctgctcagaaggaactgagttaattgggaagaagaaaaccatttgtgaatcatctggaatctggtcaaatcctagtccaatatgtcaaaaattggacaaaagtttctcaatgattaaggagggtgattataaccccctcttcattccagtggcagtcatggttactgcattctctgggttggcatttatcatttggctggcaaggagattaaaaaaaggcaagaaatccaagagaagtatgaatgacccatattaaatcgcccttggtgaaagaaaattcttggaatactaaaaatcatgagatcctttaaatccttccatgaaacgttttgtgtggtggcacctcctacgtcaaacatgaagtgtgtttccttcagtgcatctgggaagatttctacctgaccaacagttccttcagcttccatttcgcccctcatttatccctcaacccccagcccacaggtgtttatacagctcagctttttgtcttttctgaggagaaacaaataagaccataaagggaaaggattcatgtggaatataaagatggctgactttgctctttcttgactcttgttttcagtttcaattcagtgctgtacttgatgacagacacttctaaatgaagtgcaaatttgatacatatgtgaatatggactcagttttcttgcagatcaaatttcacgtcgtcttctgtatactgtggaggtacactcttatagaaagttcaaaaagtctacgctctcctttctttctaactccagtgaagtaatggggtcctgctcaagttgaaagagtcctatttgcactgtagcctcgccgtctgtgaattggaccatcctatttaactggcttcagcctccccaccttcttcagccacctctctttttcagttggctgacttccacacctagcatctcatgagtgccaagcaaaaggagagaagagagaaatagcctgcgctgttttttagtttgggggttttgctgtttccttttatgagacccattcctatttcttatagtcaatgtttcttttatcacgatattattagtaagaaaacatcactgaaatgctagctgcaagtgacatctctttgatgtcatatggaagagttaaaacaggtggagaaattccttgattcacaatgaaatgctctcctttcccctgcccccagaccttttatccacttacctagattctacatattctttaaatttcatctcaggcctccctcaaccccaccacttcttttataactagtcctttactaatccaacccatgatgagctcctcttcctggcttcttactgaaaggttaccctgtaacatgcaattttgcatttgaataaagcctgctttttaagtgttaa

SEQ ID NO: 14156 - DNA, 1158 bp, Artificial Sequence
  derived and/or modified sequence
atgggctgcagaagaaccagagagggccccagcaaggccatgatcttcccctggaagtgccagagcacccagagagacctgtggaacatcttcaagctgtggggctggaccatgctgtgctgcgacttcctggcccaccacggcaccgactgctggacctaccactacagcgagaagcccatgaactggcagagagccagaagattctgcagagacaactacaccgacctggtggccatccagaacaaggccgagatcgagtacctggagaagaccctgcccttcagcagaagctactactggatcggcatcagaaagatcggcggcatctggacctgggtgggcaccaacaagagcctgaccgaggaggccgagaactggggcgacggcgagcccaacaacaagaagaacaaggaggactgcgtggagatctacatcaagagaaacaaggacgccggcaagtggaacgacgacgcctgccacaagctgaaggccgccctgtgctacaccgccagctgccagccctggagctgcagcggccacggcgagtgcgtggagatcatcaacaactacacctgcaactgcgacgtgggctactacggcccccagtgccagttcgtgatccagtgcgagcccctggaggcccccgagctgggcaccatggactgcacccaccccctgggcaacttcagcttcagcagccagtgcgccttcagctgcagcgagggcaccaacctgaccggcatcgaggagaccacctgcggccccttcggcaactggagcagccccgagcccacctgccaggtgatccagtgcgagcccctgagcgcccccgacctgggcatcatgaactgcagccaccccctggccagcttcagcttcaccagcgcctgcaccttcatctgcagcgagggcaccgagctgatcggcaagaagaagaccatctgcgagagcagcggcatctggagcaaccccagccccatctgccagaagctggacaagagcttcagcatgatcaaggagggcgactacaaccccctgttcatccccgtggccgtgatggtgaccgccttcagcggcctggccttcatcatctggctggccagaagactgaagaagggcaagaagagcaagagaagcatgaacgacccctactag

SEQ ID NO: 14157 - protein, 205 aa, Artificial Sequence
  derived and/or modified sequence
MAHAGRTGYDNREIVMKYIHYKLSQRGYEWDAGDVGAAPPGAAPAPGIFSSQPGHTPHPAASRDPVARTSPLQTPAAPGAAAGPALSPVPPVVHLTLRQAGDDFSRRYRRDFAEMSSQLHLTPFTARGRFATVVEELFRDGVNWGRIVAFFEFGGVMCVESVNREMSPLVDNIALWMTEYLNRHLHTWIQDNGGWVGALGDVSLG

SEQ ID NO: 14158 - DNA, 618 bp, Artificial Sequence
  derived and/or modified sequence
atggcacacgctggccggactggttacgataacagggagattgttatgaaatacattcactataaattgagccagcgaggttatgagtgggacgcgggagacgtaggcgccgcacccccaggggccgcaccggctcccggtattttcagtagtcagcctggccacacaccccacccagccgctagcagggaccccgttgccagaacaagtcccttgcagacccctgccgcaccaggcgccgctgcaggcccagccttgtcaccagtaccccccgtggtacatctgacgctgaggcaggctggcgacgatttttccagaaggtaccgcagagacttcgcagagatgagcagccagttgcacttaacgccttttactgcccgggggaggttcgccacagttgtggaagagctttttagggacggagttaactggggccgcatagtggcattctttgagttcggaggagttatgtgtgttgagtccgtgaacagagaaatgagccccttggtcgacaacattgcactgtggatgacagaatatttgaacagacacctgcatacctggattcaggataacggaggatgggtgggtgccttgggggatgtcagcctaggttag

SEQ ID NO: 14159 - DNA, 618 bp, Artificial Sequence
  derived and/or modified sequence
atggcccacgccggccgcacaggctatgacaaccgggagatcgtgatgaagtacatccactacaagctgagccagaggggctatgagtgggatgctggagatgtgggcgccgcccctcctggggccgccccagcccctggcatcttcagcagccagcccggccacaccccccaccctgctgccagccgggaccctgtggcccggaccagccccctgcagaccccagctgcccctggagctgctgctggccctgccctgagccctgtgccccctgtggtgcacctgaccctgcggcaggccggagatgacttcagccgccgctacagaagagactttgctgagatgagcagccagctgcacctgacccccttcaccgcccggggccgctttgccaccgtggtggaggagctgttcagagatggagtgaactggggcagaattgtggccttctttgaatttggaggagtgatgtgtgtggagagcgtgaaccgggagatgagccccctggtggacaacatcgccctgtggatgacagagtacctgaacagacacctgcacacctggatccaggacaatggaggctgggtgggcgccctgggagatgtgtccctgggctag

SEQ ID NO: 14160 - DNA, 618 bp, Artificial Sequence
  derived and/or modified sequence
atggcccacgccggccggaccggctacgacaaccgggagatcgtgatgaaatatatacactacaagcttagccagagggggtatgaatgggatgcaggggatgtaggagccgctccaccgggagcagctcctgctcccggaatcttcagctcccagcctggccacacaccccatccagccgcctccagggaccccgtagcacgcactagtccgctgcagactccagcagcacctggagcagcagcgggccccgcactgtcccccgtgccaccagtcgtccatctgactctgagacaggcaggcgacgattttagtaggcgttaccggcgcgactttgctgagatgagctcccagctgcatctgacccccttcactgcacgaggcagattcgccacagtcgtcgaggaactatttagggatggcgtgaattgggggagaattgtggcttttttcgaatttggcggtgtcatgtgtgtggagtccgtgaatcgagagatgtctcccctagtggataacatcgcactgtggatgacagagtacctcaaccggcacctgcacacctggatccaggataacggaggttgggtaggggccttaggggatgtatcgctgggctag

SEQ ID NO: 14161 - DNA, 618 bp, Artificial Sequence
  derived and/or modified sequence
atggcacacgccggacggactggctatgataatcgagagattgtcatgaagtatatccactacaagctgagtcagaggggatacgaatgggatgctggtgacgtcggggctgctccccctggcgctgccccagccccaggtatcttctctagccaacctgggcatacgcctcacccagcagcttctcgcgaccctgtggccaggaccagccctctgcaaacccctgccgcaccaggagctgccgcaggccctgctttatctcctgtgccacccgtcgtgcatcttacactgcgccaggccggagatgacttctctcggaggtatcggcgagactttgcagaaatgtctagtcaattgcacctgacaccattcacggctagaggcagatttgcaacagtcgtagaagagctgtttcgggatggcgtgaactggggcaggattgtcgccttcttcgaatttgggggagtgatgtgtgtggagagcgtgaacagagaaatgagcccgctcgtcgacaatattgctctttggatgacagaatatctgaaccgacacctgcacacatggatccaggacaacggcggatgggtgggagccctgggcgatgtctccctgggctag

SEQ ID NO: 14162 - DNA, 618 bp, Artificial Sequence
  derived and/or modified sequence
atggcacacgcagggcggacagggtacgacaacagagagatagtgatgaagtatatccattataagctgtcacaacgtggatatgaatgggatgctggcgacgtcggagctgcacctcccggcgcagcacccgcacccggaatattttcgagccaaccagggcatacccctcatcctgcagcgagccgggacccagtagctcgcacctccccactgcaaacacccgcggcaccaggagccgcggctggaccggcactgagccccgttcctcccgtggtacacttgaccctcaggcaggccggggatgatttcagccgccgctataggagggatttcgccgagatgtcttcacagttacacctgacaccttttaccgcccggggccgtttcgcaacggttgtcgaagaactgtttcgcgatggggtgaactggggacgcatagtggccttcttcgagtttggaggagttatgtgtgtggaatctgtaaatcgcgaaatgtcaccgctggtagataacatcgccttatggatgacggagtatctgaataggcatcttcacacctggatccaagataacggaggctgggttggcgcactaggtgatgtgtcccttggctag

SEQ ID NO: 14163 - DNA, 618 bp, Artificial Sequence
  derived and/or modified sequence
atggcacacgcaggtagaaccgggtatgacaaccgagaaatagttatgaaatacatacattataagttgtcccaaagaggttacgaatgggacgcgggagatgtaggagccgcacctccaggcgctgcaccagctccgggtattttttctagtcagccaggtcatacaccacatcctgccgcatctagagatcccgtcgcacgtacctcccccctccagacccccgctgccccaggcgccgctgccggccctgctctctcccccgttcctccagtcgttcatctcacactgagacaggcaggcgatgactttagccgcaggtacagaagagatttcgcagaaatgagcagccagcttcatctcaccccgtttactgctcgggggagatttgcaactgtcgttgaggaactgtttagagatggtgtgaattggggcagaatcgtggcctttttcgagtttggaggcgtaatgtgtgtggagagcgtgaaccgcgagatgagcccactggtggacaatatagccttgtggatgaccgaatacctgaataggcatctccatacttggattcaggataatggtgggtgggtgggagcgttaggggacgtttctcttgggtag

SEQ ID NO: 14164 - DNA, 1206 bp, Artificial Sequence
  derived and/or modified sequence
tttctgtgaagcagaagtctgggaatcgatctggaaatcctcctaatttttactccctctccccgcgactcctgattcattgggaagtttcaaatcagctataactggagagtgctgaagattgatgggatcgttgccttatgcatttgttttggttttacaaaaaggaaacttgacagaggatcatgctgtacttaaaaaatacaacatcacagaggaagtagactgatattaacaatacttactaataataacgtgcctcatgaaataaagatccgaaaggaattggaataaaaatttcctgcatctcatgccaagggggaaacaccagaatcaagtgttccgcgtgattgaagacaccccctcgtccaagaatgcaaagcacatccaataaaatagctggattataactcctcttctttctctgggggccgtggggtgggagctggggcgagaggtgccgttggcccccgttgcttttcctctgggaaggatggcgcacgctgggagaacagggtacgataaccgggagatagtgatgaagtacatccattataagctgtcgcagaggggctacgagtgggatgcgggagatgtgggcgccgcgcccccgggggccgcccccgcaccgggcatcttctcctcccagcccgggcacacgccccatccagccgcatcccgggacccggtcgccaggacctcgccgctgcagaccccggctgcccccggcgccgccgcggggcctgcgctcagcccggtgccacctgtggtccacctgaccctccgccaggccggcgacgacttctcccgccgctaccgccgcgacttcgccgagatgtccagccagctgcacctgacgcccttcaccgcgcggggacgctttgccacggtggtggaggagctcttcagggacggggtgaactgggggaggattgtggccttctttgagttcggtggggtcatgtgtgtggagagcgtcaaccgggagatgtcgcccctggtggacaacatcgccctgtggatgactgagtacctgaaccggcacctgcacacctggatccaggataacggaggctgggtaggtgcacttggtgatgtgagtctgggctgaggccacaggtccgagatgcgggggttggagtgcgggtgggctcctggggcaatgggaggctgtggagccggcgaaataaaatcagagttgttgct

SEQ ID NO: 14165 - DNA, 618 bp, Artificial Sequence
  derived and/or modified sequence
atggcccacgccggcagaaccggctacgacaacagagagatcgtgatgaagtacatccactacaagctgagccagagaggctacgagtgggacgccggcgacgtgggcgccgccccccccggcgccgcccccgcccccggcatcttcagcagccagcccggccacaccccccaccccgccgccagcagagaccccgtggccagaaccagccccctgcagacccccgccgcccccggcgccgccgccggccccgccctgagccccgtgccccccgtggtgcacctgaccctgagacaggccggcgacgacttcagcagaagatacagaagagacttcgccgagatgagcagccagctgcacctgacccccttcaccgccagaggcagattcgccaccgtggtggaggagctgttcagagacggcgtgaactggggcagaatcgtggccttcttcgagttcggcggcgtgatgtgcgtggagagcgtgaacagagagatgagccccctggtggacaacatcgccctgtggatgaccgagtacctgaacagacacctgcacacctggatccaggacaacggcggctgggtgggcgccctgggcgacgtgagcctgggctag

SEQ ID NO: 14166 - DNA, 423 bp, Artificial Sequence
  derived and/or modified sequence
atggactgcaagagccccaagagggccaacatctgcccccacctgcccggcggcggcctcttcagcaccccacccagccaggccgcctggaggaccctgctgacagccctgtgcttccctggccccacctgcaccggccccatgagggagggccccagggctgtgtacaaccccccccgggcccacaggaacagcagtgacaactgtgtgatgaagcacctgctgtgtgccggggacaagaatggcaccaggagacatgccctgcccagccccctggagggcagcttccagcccggccggcagatccccccaccccagacccccagcacagacccccagaccctgcccctgtccttccgcagcctgctgcgctgccaccagctgtgtgccgccagcctgccccccagcctgaagctgccctag

SEQ ID NO: 14167 - DNA, 1207 bp, Artificial Sequence
  derived and/or modified sequence
tttctgtgaagcagaagtctgggaatcgatctggaaatcctcctaatttttactccctctccccgcgactcctgattcattgggaagtttcaaatcagctataactggagagtgctgaagattgatgggatcgttgccttatgcatttgttttggttttacaaaaaggaaacttgacagaggatcatgctgtacttaaaaaatacaacatcacagaggaagtagactgatattaacaatacttactaataataacgtgcctcatgaaataaagatccgaaaggaattggaataaaaatttcctgcatctcatgccaagggggaaacaccagaatcaagtgttccgcgtgattgaagacaccccctcgtccaagaatgcaaagcacatccaataaaatagctggattataactcctcttctttctctgggggccgtggggtgggagctggggcgagaggtgccgttggcccccgttgcttttcctctgggaaggatggcgcacgctgggagaacagggtacgataaccgggagatagtgatgaagtacatccattataagctgtcgcagaggggctacgagtgggatgcgggagatgtgggcgccgcgcccccgggggccgcccccgcaccgggcatcttctcctcccagcccgggcacacgccccatccagccgcatcccgggacccggtcgccaggacctcgccgctgcagaccccggctgcccccggcgccgccgcggggcctgcgctcagcccggtgccacctgtggtccacctgaccctccgccaggccggcgacgacttctcccgccgctaccgccgcgacttcgccgagatgtccagccagctgcacctgacgcccttcaccgcgcggggacgctttgccacggtggtggaggagctcttcagggacggggtgaactgggggaggattgtggccttctttgagttcggtggggtcatgtgtgtggagagcgtcaaccgggagatgtcgcccctggtggacaacatcgccctgtggatgactgagtacctgaaccggcacctgcacacctggatccaggataacggaggctgggtaggtgcacttggtgatgtgagtctgggctgaggccacaggtccgagatgcgggggttggagtgcgggtgggctcctggggcaatgggaggctgtggagccggcgaaataaaatcagagttgttgcta

SEQ ID NO: 14168 - RNA, 618 nt, Artificial Sequence
  derived and/or modified sequence
auggcacacgcagggcggacaggguacgacaacagagagauagugaugaaguauauccauuauaagcugucacaacguggauaugaaugggaugcuggcgacgucggagcugcaccucccggcgcagcacccgcacccggaauauuuucgagccaaccagggcauaccccucauccugcagcgagccgggacccaguagcucgcaccuccccacugcaaacacccgcggcaccaggagccgcggcuggaccggcacugagccccguuccucccgugguacacuugacccucaggcaggccggggaugauuucagccgccgcuauaggagggauuucgccgagaugucuucacaguuacaccugacaccuuuuaccgcccggggccguuucgcaacgguugucgaagaacuguuucgcgauggggugaacuggggacgcauaguggccuucuucgaguuuggaggaguuauguguguggaaucuguaaaucgcgaaaugucaccgcugguagauaacaucgccuuauggaugacggaguaucugaauaggcaucuucacaccuggauccaagauaacggaggcuggguuggcgcacuaggugaugugucccuuggcuag

SEQ ID NO: 14169 - RNA, 618 nt, Artificial Sequence
  derived and/or modified sequence
auggcacacgcagguagaaccggguaugacaaccgagaaauaguuaugaaauacauacauuauaaguugucccaaagagguuacgaaugggacgcgggagauguaggagccgcaccuccaggcgcugcaccagcuccggguauuuuuucuagucagccaggucauacaccacauccugccgcaucuagagaucccgucgcacguaccuccccccuccagacccccgcugccccaggcgccgcugccggcccugcucucucccccguuccuccagucguucaucucacacugagacaggcaggcgaugacuuuagccgcagguacagaagagauuucgcagaaaugagcagccagcuucaucucaccccguuuacugcucgggggagauuugcaacugucguugaggaacuguuuagagauggugugaauuggggcagaaucguggccuuuuucgaguuuggaggcguaauguguguggagagcgugaaccgcgagaugagcccacugguggacaauauagccuuguggaugaccgaauaccugaauaggcaucuccauacuuggauucaggauaauggugggugggugggagcguuaggggacguuucucuuggguag

SEQ ID NO: 14170 - protein, 390 aa, Artificial Sequence
  derived and/or modified sequence
MPPSGLRLLPLLLPLLWLLVLTPGRPAAGLSTCKTIDMELVKRKRIEAIRGQILSKLRLASPPSQGEVPPGPLPEAVLALYNSTRDRVAGESAEPEPEPEADYYAKEVTRVLMVETHNEIYDKFKQSTHSIYMFFNTSELREAVPEPVLLSRAELRLLRLKLKVEQHVELYQKYSNNSWRYLSNRLLAPSDSPEWLSFDVTGVVRQWLSRGGEIEGFRLSAHCSCDSRDNTLQVDINGFTTGRRGDLATIHGMNRPFLLLMATPLERAQHLQSSRHRRALDTNYCFSSTEKNCCVRQLYIDFRKDLGWKWIHEPKGYHANFCLGPCPYIWSLDTQYSKVLALYNQHNPGASAAPCCVPQALEPLPIVYYVGRKPKVEQLSNMIVRSCKCS

SEQ ID NO: 14171 - protein, 130 aa, Artificial Sequence
  derived and/or modified sequence
MKWVTFISLLFLFSSAYSALDTNYCFSSTEKNCCVRQLYIDFRKDLGWKWIHEPKGYHANFCLGPCPYIWSLDTQYSKVLALYNQHNPGASAAPCCVPQALEPLPIVYYVGRKPKVEQLSNMIVRSCKCS

SEQ ID NO: 14172 - protein, 390 aa, Artificial Sequence
  derived and/or modified sequence
MPPSGLRLLLLLLPLLWLLVLTPGRPAAGLSTSKTIDMELVKRKRIEAIRGQILSSLRLASPPSQGEVPPGPLPEAVLALYNSTRDRVAGESAEPEPEPEADRRAKEVTRVLMVETHNEIYDKFKQSTHSIYMFFNTSELREAVPEPVLLSRAELRLLRLKLKVEQHVELYQKYSNNSWRYLSNRLLAPSDSPEWLSFDVTGVVRQWLSRGGEIEGFRLSAHCSCDSRDNTLQVDINGFTTGRRGDLATIHGMNRPFLLLMATPLERAQHLQSSRHRRALDTNYCFSSTEKNCCVRQLYIDFRKDLGWKWIHEPKGYHANFCLGPCPYIWSLDTQYSKVLALYNQHNPGASAAPCCVPQALEPLPIVYYVGRKPKVEQLSNMIVRSCKCS

SEQ ID NO: 14173 - DNA, 1316 bp, Artificial Sequence
  derived and/or modified sequence
gggaaataagagagaaaagaagagtaagaagaaatataagagccaccatgcccccatcgggattgagattgttgccccttctgcttccgctgctttggttgctcgtcctgacccctggcaggcccgcagcggggttgtcgacgtgtaagacgattgacatggagctcgtgaaacgcaagagaattgaagcaatcaggggtcaaattctgagcaaactcagactcgcatccccaccgtcccagggtgaggtcccaccgggacctctgcccgaggcggtcctggccttgtacaactcgacacgcgaccgagtcgcaggggagtcagcggaacccgagcccgaacccgaggccgactactacgccaaagaggtcactcgggtcttgatggtggaaactcacaacgaaatctacgacaagtttaagcagtcgacccattcgatctacatgttcttcaataccagcgagcttagagaagcggtccccgagccggtacttttgtccagagcggagctgcggttgctcaggctcaagctgaaagtggaacagcacgtagagctttatcagaagtacagcaacaattcatggcggtatctctcgaaccggctgttggcgccgtcggattcacccgaatggctcagctttgatgtcacgggggtggtgcgccagtggttgtccaggggcggagagatcgaaggatttcggctctcagcccactgttcgtgtgatagcagggacaacacgctccaagtagatatcaacggattcactactggtcgcagaggggatcttgcgacaatccacggtatgaatcgcccttttctcctgctgatggccacaccccttgaacgggcgcaacatcttcagtcatcccgccataggagagcactggacacgaactactgtttttcgtcgacagagaagaattgctgcgtgcggcagctttacatcgacttccgaaaagatctcgggtggaaatggattcatgaaccgaaggggtatcacgccaacttctgcctgggtccgtgtccttatatctggtcgttggatacacagtattcaaaggtgttggctctttacaatcagcacaacccgggagcctcggctgcgccttgttgcgtaccccaggcattggagccattgccgattgtgtattatgtgggaagaaagccgaaagtggagcagttgtcgaatatgatcgtacggagctgcaaatgctcctgataagctgccttctgcggggcttgccttctggccatgcccttcttctctcccttgcacctgtacctcttggtctttgaataaagcctgagtaggaag

SEQ ID NO: 14174 - DNA, 1170 bp, Artificial Sequence
  derived and/or modified sequence
atgcccccttccggactgcggctactccctctgcttctcccactgttgtggctacttgtgctcaccccaggtcgcccagctgcggggctgtcaacgtgcaagacaattgatatggagcttgtcaaaagaaaacgcatcgaggcaatcagggggcagatccttagtaaacttaggcttgcctctcccccgtctcagggagaggtccctccaggacccctccccgaagccgttctggctctgtacaattcaaccagggacagggtcgcaggagagtccgctgaacctgaaccagaacccgaagccgactattatgctaaagaagtgacccgggtgttgatggtggagacacacaatgagatctatgacaagtttaagcagtctacccactcaatttatatgttctttaacaccagcgaactacgcgaggcagtacccgagcccgtgctcctgtcgagggccgaactgaggctcctcagacttaagttgaaggtagaacagcatgtggaactgtaccaaaagtatagcaacaatagctggagatatctgagtaacagactgctcgctccttcagactcaccagagtggttgtccttcgacgttaccggagtagtccggcagtggctgtcccgggggggagagattgagggttttaggctgtcagcacattgttcttgcgactccagagacaataccctgcaggtggatattaatggctttacaactggccggagaggtgacctcgctactatccatggcatgaatcgcccctttctgctccttatggccacccccttggagagagcccagcacctacagtctagccgtcacaggcgcgccctcgacaccaactattgtttctccagcactgaaaaaaattgctgtgttaggcagctctacatcgattttcgcaaagatttgggctggaaatggatccatgagccaaagggatatcatgccaatttctgcctgggcccatgtccttacatctggtccttggatactcagtactctaaggttcttgcactttataaccagcacaatccaggcgcctctgccgcaccgtgttgtgtcccccaggccttagagcccctccccattgtatattacgtgggtcgaaaaccaaaggtagagcagctctcaaacatgattgtgaggtcctgtaaatgtagc

SEQ ID NO: 14175 - DNA, 1170 bp, Artificial Sequence
  derived and/or modified sequence
atgccaccttccggcctgcggctgcttcctctgctgctcccattattgtggcttctcgtgctgactccggggcggcctgccgcaggcctgtccacatgcaaaaccatagacatggaactagtgaagcgaaagcgtattgaagctatacggggccagatcctttccaaactccgtcttgcgtccccgccctctcaaggtgaggttcctcctggcccactgcccgaggccgttttagctctatataactccaccagggaccgcgtagcgggggaatcagccgaaccagaaccggagcccgaggctgattactatgccaaagaagtgaccagagtgctgatggtggagacgcacaatgaaatctacgacaaattcaaacagtcgacccactctatatacatgttctttaatactagcgagctgcgagaagccgtgcctgagcccgtgctgctttcaagggcggagctgcgtctcctgaggctgaagctgaaagtggagcaacacgttgaactttaccagaaatacagcaacaactcctggaggtacttgtctaatcgtctcctggcaccaagcgattccccagaatggttgtcattcgacgtgaccggggtagtgcgacagtggctgtcaaggggcggcgagattgaggggtttcgtctctccgcacattgttcttgtgacagtagggataatacgctgcaggtcgacataaacggcttcacaacaggcaggcgaggtgatctggctacaattcacggcatgaataggccattcctgctccttatggctacaccactagaacgtgcccagcacctccaaagctcacgccatcggagagcactcgataccaactactgcttttcgtctacggaaaaaaactgttgcgttcgccagctctacattgattttcggaaagacttgggttggaagtggattcatgaacctaaagggtaccatgcaaacttctgcctgggcccttgcccctacatttggagcctggatacacaatacagtaaggtgctggccctctacaatcaacataatcccggagctagcgcagcaccttgttgtgtcccgcaggctttagagccattgcccatcgtgtactatgtgggcagaaagcccaaggttgaacagctctccaatatgatagtccggtcttgcaagtgttca

SEQ ID NO: 14176 - DNA, 1170 bp, Artificial Sequence
  derived and/or modified sequence
atgccaccgtccggactccgcttgctcccgctgctcctgccactgctgtggctgctcgtgttgaccccgggcaggccagcggcgggactgtcaacctgcaaaactatcgatatggaattggtgaagagaaaacgcatcgaggccatcaggggacaaattctgtccaagctgcggttggcctccccgccaagccaaggagaagtgcccccaggtccactgcccgaggccgtgctcgccctgtacaacagcactcgcgaccgcgtggcaggagagtccgcagaaccggagccagaaccggaagcagattactacgcgaaagaagtgactagagtcctgatggtggaaactcacaacgagatctacgataagttcaagcagtcaacgcacagcatctacatgttcttcaatacctccgaactccgagaagccgtcccggaacccgtcctgctctccagagccgaacttcgcctcctgcgcctgaagctgaaggtggagcagcacgtggagctctatcagaagtactcaaacaattcgtggaggtacctgtccaacaggctgctggccccgtcggactcccctgaatggctcagtttcgacgtgaccggagtcgtgaggcagtggttgagccgcggaggagaaatcgaaggattcagactgtcggcacactgttcctgtgactctcgcgacaacaccctgcaagtggatatcaacggatttaccaccggccgccgcggggatctggcaactatccatgggatgaaccgcccattcctgctgctgatggcaacccctcttgaacgcgcccagcatctccagtcgtcccggcaccggcgcgcgctggacaccaactactgtttcagctcgactgaaaagaattgttgcgtcagacagctgtacatcgatttcagaaaggatctcggctggaaatggatccacgagccgaagggataccacgctaacttttgtcttggcccgtgtccgtacatctggtccctggacactcagtattccaaggtgctggccctctataaccaacataatccaggagccagcgctgcgccatgctgcgtcccacaggcactggaaccgctgccgattgtgtactacgtgggaaggaaaccaaaggtcgagcagctctctaacatgatcgtgcggtcatgcaaatgctcg

SEQ ID NO: 14177 - DNA, 1170 bp, Artificial Sequence
  derived and/or modified sequence
atgccgccctcaggcctcaggctgttgccactgctgctgcccttgctctggcttcttgtgctcacccctggaagaccagccgccggactgtcgacatgcaagacaattgatatggagctggtgaaacggaagagaatcgaagctataaggggacaaatcctttcaaaactcaggttggcctctccaccctcccagggggaggttccaccgggacctctgcctgaggctgtgctggccctatacaacagcacaagggacagagttgctggcgaatctgctgaacccgagcccgaaccagaagctgattattatgctaaagaagttacccgagtgctgatggtggaaacacataacgaaatttatgacaaattcaagcagagtacccacagcatttacatgttctttaacactagcgagcttagggaagccgtacctgagcctgtgctcttgtcgagagctgaactccgtctgctgcgacttaaacttaaagtggagcagcacgtcgagctgtatcaaaagtactctaataacagttggagatacctctctaacagactgctagcacccagcgactcacctgaatggctcagttttgacgtgacaggcgtggtccgccagtggctcagtaggggaggagaaatcgaaggatttaggctgagcgcccactgctcgtgcgacagtagagataacaccttgcaggtcgacataaacggtttcactaccggaagaaggggggacctcgccacaatccatggaatgaaccggcccttccttctcctgatggccacaccgctcgagagagcccaacatctgcagtcaagccggcataggagggcgctggacactaactactgttttagcagtacagaaaaaaattgttgtgtccgtcaactctatatagattttcgcaaggatctcggatggaaatggatccacgagcccaagggatatcacgctaacttctgcctggggccgtgcccctatatttggagcttggatactcaatatagcaaagtactggctctgtacaatcaacacaatcccggagcttccgctgctccgtgctgcgtaccccaggccctcgagccactacccattgtatactatgttggtagaaaacctaaagtggaacaactgagcaatatgatcgtacgcagttgcaagtgctca

SEQ ID NO: 14178 - DNA, 1170 bp, Artificial Sequence
  derived and/or modified sequence
atgccgccatccggacttaggctgctgcctctgcttcttccgctgctgtggctgttggtactgactccgggccggcctgcggcgggtctgtcgacgtgcaaaaccatcgacatggagctggtcaaacggaaacgcatagaagcaattcggggtcagatcctgagcaagctcagactggcttcgcccccctcccagggtgaagtgcctccgggaccgcttcctgaagctgtgctcgctttgtacaatagcacccgggacagggtcgctggagagtcggccgagcccgagccagagccagaggccgactactacgcgaaagaagtcacccgagtgcttatggtggaaactcacaatgagatctacgataagtttaagcaaagcactcattcgatatacatgttcttcaatacttccgagctcagggaagctgtcccagaaccagtgttgttgtcacgggctgaactgcggctgctgcgcctgaagctcaaagtggaacagcatgtcgaactgtaccagaagtattcaaacaacagctggcgctacctgtctaaccgactgctggcccccagcgactccccggagtggctgagctttgacgtgactggagtggtccgtcaatggcttagccgcggcggagaaatcgaagggtttagattgtccgcccactgttcatgcgactcaagagataacaccctgcaggtcgacattaatggcttcaccaccgggcggcgcggagatctggcaactattcacggcatgaaccgcccgtttctgcttctgatggccacgcctctggagcgggcgcaacatctgcaatcaagtagacaccgccgggccctggacaccaactattgcttctcgtccaccgagaagaactgttgtgtcagacagctgtacatcgattttcgcaaggatctcggttggaagtggatccacgaaccaaagggctaccatgctaatttctgcctcggaccgtgcccgtacatctggtccctggacacgcagtacagcaaggtgctcgccctgtacaaccaacataatcctggtgcaagcgccgccccgtgctgcgtgccgcaggctctggagccgctgccgatcgtttactacgttggacgcaaaccgaaggtggaacagctctcaaatatgatcgtccggtcctgcaagtgctcg

SEQ ID NO: 14179 - DNA, 1170 bp, Artificial Sequence
  derived and/or modified sequence
atgccaccgtccggcctccgccttctgcctttgctcctgcccttgctgtggctgcttgtgttgacgcccggcagacctgcggcgggcctttcaacctgtaagactattgacatggaactggtgaagcgcaaaagaatcgaagcaatcagaggacagattctttccaagctgcgacttgcctcacctccatcacagggggaggtcccaccaggacctctgccagaagcagtgctggccctgtacaattcaacgcgtgaccgtgtggcgggggagagcgccgagcctgaacctgaacccgaggcggactactacgcaaaagaggtgactagagtgctcatggtcgaaactcataacgagatttacgacaagtttaagcagtccacccatagcatctacatgtttttcaatacttcagagctccgggaagctgtgccagaaccagtgttgctttcgcgtgcagagcttcggcttctgcgcctgaagttgaaggtcgagcaacacgtggaactgtaccaaaagtactcaaacaattcgtggcgatacctttcgaaccggttgcttgcaccttcggatagtccagagtggctctcatttgatgtgaccggagtcgtcagacagtggctctcgcggggtggagaaattgaaggttttcggctctcggcacattgttcctgtgactccagggataatactctgcaagtggacattaacggatttacgactggacgcaggggcgatctggcaacgattcacggaatgaatcggccatttcttcttttgatggcaaccccacttgagcgagcacaacatctgcagtcgtcgcgtcatcgccgggctcttgataccaattactgcttttcgtcgaccgaaaagaactgttgtgtcaggcaattgtacattgactttcggaaagatcttggttggaaatggatccatgaacctaaagggtaccacgcaaatttctgtctgggtccttgtccatacatttggtccctggatacccagtattcaaaggtgcttgccctttacaaccagcacaatccgggggcctccgctgcgccatgttgcgtgccccaagcacttgagccccttccgattgtctactacgtgggaagaaagccaaaggttgagcaacttagcaacatgattgtgaggtcctgcaaatgttcg

SEQ ID NO: 14180 - DNA, 1170 bp, Artificial Sequence
  derived and/or modified sequence
atgcctccatccgggctcagactcctaccactgttgcttccattgttatggctcctcgttttgactcctggaagacctgccgctggactttctacatgcaaaacaattgatatggaattagtgaaacgtaaacgcatcgaagcaatccgggggcagatactctccaagctgcgcctcgccagtcctccctctcagggggaggtgccaccaggaccactccctgaagccgtgctcgctctatacaactcaactcgggatagggttgctggggaatcagctgaacctgaaccagaacccgaagcggattattatgcaaaagaagttactcgggtgctcatggtagaaacacataatgaaatctatgataaattcaaacagtctacacattctatatatatgttcttcaatacatccgaacttagagaagctgtgcccgagcccgtactcctctcacgagctgaactccggctcttacgcctcaaactgaaggtagaacagcatgtagaactttatcagaaatattcaaacaactcttggaggtatctttcaaataggttgctcgcacctagtgattcaccagagtggctgtcgtttgatgtgacaggagttgtgcgacagtggctctcaagagggggagaaatagagggatttcggctgagtgcacattgttcgtgtgatagtagggataatacactccaggtagatatcaatgggttcacaactgggcggcgcggggatcttgcaacaatacacggaatgaatcggccttttcttttattaatggccactccattagaacgcgcccagcacctgcagagttcccggcacagacgtgccctggatacaaactactgcttttctagtactgaaaaaaactgttgtgttcggcagctttatatagattttaggaaggatcttggatggaagtggatccacgagcctaaaggatatcacgcaaatttttgcctagggccctgcccttatatatggagtcttgacactcagtacagtaaagtgctcgctctctacaatcagcacaacccaggagcttcagcagccccctgctgtgtccctcaggcattagaaccgctacctatagtgtattatgtggggcggaaacctaaggtagagcagctctccaatatgatcgtgcgaagttgcaaatgttcc

SEQ ID NO: 14181 - DNA, 1170 bp, Artificial Sequence
  derived and/or modified sequence
atgccgccatccggactgcggctgctcccactgcttctcccccttctgtggcttcttgtgttgactcctggacgcccggccgccgggctctcgacctgcaagacgatcgatatggagctggtgaaacggaagcgtatcgaggcgatcagaggacaaatcctctcgaaactgagattggcttcccctccatcccagggagaagtgccgcctggaccactgcctgaagccgtgcttgctctctacaattcgactagagatcgggtcgctggagaatcagcagaacctgaaccggaaccggaagccgactactacgctaaggaggtaaccagagtgttgatggtggagactcataacgaaatctacgataagttcaagcaaagcacccacagcatttacatgttcttcaacacctccgagctccgcgaggcagtccccgagcctgtgctcttgagcagagctgagctgcgtctgttgaggctgaagctgaaggtggagcaacatgtcgaactctaccaaaagtactcgaataattcatggcggtacctctcaaacagattgctggctccgtctgactcgccggaatggctctcgttcgatgttactggagtggttagacagtggttgtcacggggcggagaaatcgaaggatttcgcctgtcggcccactgtagctgcgatagtcgggacaatacccttcaggtggacatcaacggattcaccaccggccggagaggggacctggccacgatccacggaatgaacaggccattcctgcttctcatggcgacccccttggagcgcgcccaacaccttcagtcctcacgacacaggagagcactcgataccaactactgcttttcaagcactgagaagaactgctgcgtgcgccagttgtatatagacttccgcaaggacctcggctggaagtggatccatgaaccaaaaggataccatgctaatttctgcttgggcccctgtccatatatctggtccctggatactcaatacagcaaagtgctggccctgtacaaccagcacaacccgggagcctcagccgccccatgttgtgtcccacaagcgctcgaaccactgccgatcgtgtattacgtggggcgcaaaccgaaggtggaacagctctcgaatatgatcgtgcgatcctgcaagtgctca

SEQ ID NO: 14182 - DNA, 1170 bp, Artificial Sequence
  derived and/or modified sequence
atgccgcccagcggactaaggttactgccattgctcttgcctcttctttggcttttggttctgaccccaggacgacccgccgccggcctcagcacttgtaaaaccattgacatggaactggtcaaacgtaagcggatcgaggccataagggggcagattttgtccaagctcaggctagcatcacccccatcacagggcgaggtgccacctggtccactgccagaagctgtgctggcactctataattcaactagagatagggtggctggcgagtccgccgagccagaacccgagcccgaggctgactattacgccaaagaagtcactcgggtcctgatggtagagacccataatgaaatctatgataagttcaaacagagcacacactccatatacatgtttttcaacacttccgaactgcgcgaagccgtaccagagcccgtccttttatcaagggccgagctgcgtctgttaaggctgaaactcaaggtcgaacaacacgtcgagctgtatcagaagtattctaacaattcctggaggtacctgagtaatagattgctcgctccctccgattcccccgaatggctgtcgttcgacgtgaccggagtggtccggcagtggctttcgagggggggcgaaattgaaggctttcgcttgagcgcacattgctcctgcgatagccgggataatacactgcaggtggatataaatgggttcaccacaggcaggaggggagacttggctaccattcatgggatgaatagaccattcttactgcttatggcgacccccttggagagggcacaacacctgcaaagttcaaggcacaggcgtgcactagatactaattactgtttcagctcaacagagaagaattgctgcgtgcggcagttatatatcgattttaggaaggacctgggatggaaatggattcacgaaccaaagggttaccacgccaacttttgtctcgggccgtgtccctacatttggtcccttgatacccaatattcaaaagtgttggctctctacaaccagcataaccccggcgcctccgcagccccctgctgcgtacctcaggctcttgaacctttgcctatcgtgtattacgtaggccgaaaacccaaagtagagcagctctccaacatgatcgtgaggagttgtaagtgtagc

SEQ ID NO: 14183 - DNA, 1170 bp, Artificial Sequence
  derived and/or modified sequence
atgcctccaagtggccttagactccttccgctacttctgccactgctgtggctgctggttctgacacctggcagacctgccgctggcttgagcacatgcaagacaatcgatatggaactagtcaagcgcaaacggattgaggctatccgggggcaaattctttccaaactgagacttgcaagcccaccatctcagggcgaggttcctccagggcctctgcccgaggccgttttagccctgtacaactcaaccagggaccgcgtcgccggagagagcgccgaacctgaacctgagcccgaagccgattactatgctaaagaagtcaccagagtactgatggtcgagacccacaacgagatatacgataagttcaaacagtctacacatagcatctacatgttcttcaacacttctgagctgagagaggctgtgcccgaaccagttctgctcagccgcgcagagttacggctgttacggctgaagctgaaagtcgaacagcacgtcgagctataccagaaatacagtaataattcatggcggtatttgtctaaccgcttacttgcccccagcgactcccccgaatggctatccttcgacgttaccggcgtcgtgaggcagtggctaagtcgcggaggggagattgaggggttccggctgtccgcccactgctcttgtgattcccgcgacaatactctgcaggtggacatcaacggatttacaaccggccgccgaggcgacctggctaccatccacggcatgaacagacctttcctgctgcttatggccacacccctggaacgggcacaacacttgcagtcctccaggcaccgccgggccctcgataccaattactgcttctcttctacagagaaaaattgttgcgtgcgccagctatatattgacttcagaaaggacctgggatggaagtggattcacgaacctaaaggctaccacgcaaatttttgcctgggtccttgcccctacatttggtctctggatacacagtacagcaaagttcttgccctgtacaaccagcataatcccggcgcaagcgccgccccttgttgcgttcctcaggctctcgaaccacttcccatcgtgtattatgtcggccgcaaacctaaagttgagcaactcagcaacatgattgtcaggagttgcaagtgttct

SEQ ID NO: 14184 - DNA, 1170 bp, Artificial Sequence
  derived and/or modified sequence
atgccgccgagcggtctgcgccttctgcctttgctgttaccactgttatggctcctggtgctgacgccgggtcgccccgctgctggtctaagcacctgcaagacaatagacatggaactggtgaagcgcaaacgcattgaggcgattcgcggccaaatactgtctaagctgagattggcttctcctccgagccaaggtgaagtccctccgggcccactgcctgaagcagtattggcgctgtacaacagcacacgtgatcgtgtcgctggtgaatccgcagagccggaaccggaacctgaggcagattattatgcaaaagaagttacgcgcgtgctgatggtggagacgcacaatgagatatatgataaattcaaacagtccactcatagcatctacatgttctttaatacgagcgagttgcgcgaggcagtgccggagccggtccttctttcccgcgcagagctgcgtctgttacgcctgaaactcaaggtggaacaacacgtggaactgtatcaaaaatatagcaacaatagttggcgctatctgagcaacagactgttagcgccttctgattctccggaatggctgagcttcgacgttactggtgttgttcgccagtggctgagccgcggtggggagatagaagggtttcgcctgtctgcacattgtagttgtgacagcagagacaataccctgcaggtagacatcaacggtttcactaccgggcgcagaggtgatctggccaccattcatggcatgaatcgcccttttctgttgctgatggcaactccgctggagcgcgcccagcacttgcaaagcagccgccaccgtcgcgcgcttgatacgaattattgctttagctctacggagaaaaattgttgtgtgaggcagttatacattgacttccgtaaagatctgggctggaagtggatccatgaaccaaagggctaccatgctaatttctgtctggggccatgtccgtacatttggagcctcgacacacagtactctaaagttcttgcgctgtataaccaacacaatcctggtgcgtctgcagcgccatgttgtgtcccgcaagcgctggagccactgccaatagtgtactacgttggtaggaagcctaaagttgagcagctgtcgaacatgattgtgcgcagctgtaaatgcagc

SEQ ID NO: 14185 - DNA, 1170 bp, Artificial Sequence
  derived and/or modified sequence
atgcccccctccggtttaagattgctgccactcttactgccactgctgtggttgttggtcttgacaccaggaaggccagcagcaggcttgagtacttgcaagaccatcgacatggagctcgtgaagagaaagcgcattgaagccatccggggacaaatcctgtcgaaacttcgcttggcttcgcccccaagtcaaggtgaggtgcccccagggccactgcctgaggccgtgctggctttgtacaactctacgagagacagggtggctggcgaatcagctgaaccagaaccagagccggaggccgattactacgccaaagaggtaacgcgggtcttgatggttgagacacacaacgagatatacgacaagtttaagcaatccactcatagtatatatatgttctttaatacatccgagctgcgagaagccgtcccagagcccgtgctcttgtcacgggccgaactgaggctcctgagattgaaactaaaagtcgagcagcatgttgagctctaccaaaagtactctaacaactcatggcgatatctctcgaacaggctcctggcccctagtgattcccccgaatggctgtcatttgacgtgaccggagtagttagacagtggctgagcagaggcggggagatcgaggggtttaggttatccgctcactgcagctgcgattctagagataacacattgcaagttgacatcaacggcttcactaccgggcgccggggtgatctcgcgaccatccatggaatgaacagaccatttctactactgatggctacaccattggaacgtgctcagcacctacagagttcacgtcataggagggcacttgacacgaattactgctttagctcaaccgaaaagaattgctgcgtgcgccagctatatatcgacttccggaaggatctgggatggaagtggatccacgagcccaaagggtaccacgctaacttttgccttggcccatgcccctatatttggtctttggatacccagtatagtaaggtcctggccctctataaccaacataacccaggggcatcggctgcgccatgttgcgtcccacaggccctcgagccgctgccaatagtttactacgtgggcaggaagcctaaggtggagcagctgtctaacatgattgtgcgttcctgtaaatgctca

SEQ ID NO: 14186 - DNA, 1170 bp, Artificial Sequence
  derived and/or modified sequence
atgcccccgtccggactgcgcttgctcccgctgcttctgccactgttgtggttgctggtgctgacgccagggcggccagccgcaggcctttccacctgtaagactatcgatatggagctggtgaaacgcaaacggatcgaagcaatccggggacaaatcctgagcaaactgaggctcgctagccctccatcccagggtgaagtcccaccggggccgcttcccgaagcagtgcttgcactctacaattctactcgggacagagtggctggagaatcggcggaacccgagccagagccagaagcagactactacgcaaaagaggtcaccagggtgctgatggtggaaactcataacgagatctacgataagttcaagcagtccactcactccatttacatgttcttcaatacttccgaattgcgcgaagcggtcccagaacctgtgttgctgtcccgcgcagagctgagacttttgaggcttaagctgaaagtggaacaacatgtggagctttaccaaaagtactcaaacaattcctggcggtatctctccaatcgcctcttggcccccagcgattcgcctgaatggctttcgttcgatgtgaccggagtcgtccggcaatggctgtcacgtggaggggaaatagaggggtttaggcttagcgcacattgttcgtgtgattcacgggacaataccctgcaggtggatatcaacggattcaccacgggaaggagaggggatctcgcgaccatccatggcatgaatcgtccttttctgctccttatggcaactcctcttgaacgcgcgcagcaccttcagtcatcacgacatagaagagcccttgacacgaactactgcttttcgtcgaccgagaaaaactgctgtgtccgccaactgtacatcgactttcggaaggatcttgggtggaaatggattcatgaacctaagggttaccatgcaaatttctgtctgggaccgtgtccatacatctggtcgctcgatacccaatactccaaagttcttgccctgtacaaccaacacaacccaggagcctcagcagccccttgctgcgtgccacaagcacttgaacccctcccaattgtgtattacgtgggacgcaagcctaaggttgagcaactctcgaatatgattgtccggtcgtgtaagtgttcc

SEQ ID NO: 14187 - DNA, 1170 bp, Artificial Sequence
  derived and/or modified sequence
atgcctccatcggggctcagactgcttccactgcttctccctctgctttggctcctcgtgctgaccccagggcgtcccgcagcaggactgtcgacgtgtaagaccattgatatggaactcgttaaaaggaaaaggattgaggcaatccgcggtcaaattctctcgaagctgcggctggcgtcgcctccctcgcaaggagaagtgcctcctggacctctccctgaagccgttctcgcactttacaactccactcgggaccgcgtggccggggaatctgccgagcccgaacccgaacctgaagcagattactatgcaaaggaagtcactagagttcttatggtcgagacgcacaacgagatttacgacaagtttaagcagtccactcattccatatacatgtttttcaatacctccgagcttcgggaagccgtgccagagcccgtgcttctgagccgcgcagagttgcgccttctcagactgaagctgaaagtggagcagcacgtggaactgtaccaaaagtattccaataactcatggaggtatctctcaaatcgactcctggctcccagcgattcacccgaatggctttcctttgacgtaaccggcgtcgtcaggcagtggctgtcacgtgggggtgagatagaaggattccgcctgtccgctcactgttcctgtgacagccgtgataacactcttcaggtcgatatcaatggattcaccaccgggcggcggggtgatcttgcaaccattcacggaatgaatagacctttcctgcttctgatggcgacccctcttgaacgggcccaacatctgcagagctccaggcatagacgcgcccttgataccaactactgcttttcatccactgaaaagaattgttgtgtgcgccaactgtacatcgatttccgaaaggatctcggttggaagtggattcatgaaccaaaggggtaccatgcaaacttctgtcttggtccatgtccatacatatggtctttggacacccaatactcaaaggtgcttgccctctataaccaacataaccccggagcatcagcggccccatgttgtgtgccacaggccctggaaccccttcctatcgtgtactacgtgggtcgaaaaccaaaggtcgagcagctgtcgaatatgattgtgcgttcatgtaagtgttcc

SEQ ID NO: 14188 - DNA, 1170 bp, Artificial Sequence
  derived and/or modified sequence
atgccgccgtcagggctgcgcctgctgcccctgctgctgccgttgctctggctgctcgttctgacgccgggacgacctgccgccggactctcaacttgcaagactatcgacatggaattggtcaagagaaagagaatcgaagccattagaggacagatcctctctaagctgcggctcgcctctcccccgagccaaggagaagttccaccggggccgctgcccgaagccgtcctggctctgtacaacagtacccgcgatcgcgtggctggggaatccgcagagccagaacccgagccggaagctgactactacgcgaaggaagtgactcgggttctgatggtggaaactcacaacgagatctacgataagttcaaacagagcacccactccatctacatgttcttcaatacttcggagctgagggaggctgtgccagagcctgtgctgctgtccagggcggagttgcggctccttagactgaagctgaaagtcgaacaacacgtggagttgtaccagaagtacagcaataactcctggcggtacctgagcaatagactgctcgcgccgtccgactccccagaatggctcagctttgatgtgactggagtggtgagacagtggctgagccgcgggggcgagatcgagggattcaggctttctgcgcactgttcatgcgactcgcgcgacaatactctgcaagtcgacataaacggatttaccactggcagacggggagatctcgccaccatccacggaatgaatcgcccgttcctcctcctgatggcgaccccgctggagcgcgcacagcacttgcagagctcacgccacagaagggcgctggacaccaattactgcttctcgtcaaccgagaaaaactgctgcgtcaggcaactgtacatcgatttcagaaaagatctcggatggaagtggatccacgaacccaaaggctaccacgctaacttctgcctcggaccatgcccgtacatctggtccctcgacactcaatactcgaaggtcttggccctctacaaccagcataatccgggagcgtcagcggcaccatgttgcgtcccacaggctctcgaaccgctgcccatcgtgtactatgtggggcgcaagcctaaagtggaacaactctcaaacatgatcgtgcggtcctgcaaatgtagc

SEQ ID NO: 14189 - DNA, 1170 bp, Artificial Sequence
  derived and/or modified sequence
atgccgccatcaggactgagactgctgcctctcctgctgcctctgctgtggttgctcgtgctcactccaggacgcccagccgcgggactgtcaacttgcaagactatcgacatggagcttgtgaagagaaagcgcatcgaagctatccgcggacaaatcctcagcaagctgcggctggctagccccccatcgcagggtgaagtgccaccgggaccactgcccgaagccgtgctggcgctgtacaactccacgcgggatcgcgtggccggagagtccgccgaaccagaacccgagcccgaagcagactactacgctaaggaagtgacgcgggtcctcatggtcgagactcacaacgagatctacgacaaattcaaacaatccacccactcgatctacatgttctttaacacgagcgaactgagggaagccgtgcctgagccagtgctgctgagccgcgcggagctcagactccttcgcctcaaattgaaggtcgagcagcatgtggaactgtaccagaagtactcaaataactcgtggcggtacctgagcaaccggctgttggccccttctgattccccggagtggctgtcctttgacgtgactggagtggtccggcagtggctgtcccggggaggcgagattgaaggcttccggcttagcgcgcactgctcgtgcgactcaagggataacactctgcaggtcgatatcaacgggttcactaccggccgccggggcgatctggcaacgattcacggcatgaatagaccgttcctccttcttatggccactcctctggagagagcccagcatctgcagtcaagccggcatcgcagggctctggacactaattactgctttagttccactgaaaagaattgctgcgtgcgccaactgtacatagatttcaggaaggacctcggttggaaatggatccatgagccaaagggataccacgcaaacttctgcctggggccttgcccgtacatctggtcgctcgacacccagtactcaaaagtcctggcgctctacaaccagcacaatcctggagcctcggcagcgccgtgttgcgtcccacaggccctggagcctctcccgatcgtgtactacgtaggacgcaaaccgaaggtggagcaactgagcaatatgattgtgcgctcctgcaagtgctcg

SEQ ID NO: 14190 - DNA, 1170 bp, Artificial Sequence
  derived and/or modified sequence
atgccgccgtcgggacttcgcctccttcctctcctgctgccactgctgtggcttctggtcctcactccaggaaggccggccgctggcctgtcgacttgcaagactatcgatatggaactggtcaagcgcaagcggatcgaagcaatccgaggacagatcttgagcaagctgcgcctggcctcgcccccgtcgcagggtgaagtgcctcctggtccgctgccggaggcggtcctggcactctacaactccacgcgcgaccgggtcgctggagagtcagccgaaccggaacccgaaccagaggccgattactacgcgaaggaagtaacccgcgtcctcatggtggagactcacaacgagatctacgataagttcaaacagagcactcattcaatctacatgttcttcaacacctccgaattgcgggaggctgtgccagaacccgtgctgctgtcaagggcagaacttaggctgctccgccttaaactcaaggtggaacaacacgtggagctgtaccagaagtacagcaataactcgtggcggtacctgtccaacagactcctcgcaccgtccgattcgcctgaatggctgtcctttgacgtgaccggagtggtgcggcaatggctctctcggggaggggagatcgagggattccggctgtcggctcactgcagctgtgacagccgcgacaataccctccaagtggacatcaacggcttcaccactgggcgcagaggggacctggccaccattcatggaatgaacagaccgttcctgctcctgatggccacccctttggaaagagcgcagcacctgcagagctcacggcaccgccgcgccctggataccaattactgcttttcctcgactgagaaaaactgttgcgtgagacagctgtatatcgacttcagaaaagatttgggctggaagtggattcacgaacccaagggttaccatgcgaacttttgtctcggaccgtgcccgtacatctggtcactcgacacgcagtactcgaaagtcctcgcactgtataatcaacataatccaggcgcgtccgcggccccatgctgcgtccctcaagccctggagccgttgccgatcgtgtactacgtgggccgtaagccaaaggttgagcagctttcaaatatgattgtgaggagctgcaaatgctcc

SEQ ID NO: 14191 - DNA, 1170 bp, Artificial Sequence
  derived and/or modified sequence
atgcctcccagtggactccggctgcttcctctcctgctgcctttgctctggttgctggtgcttacgcccgggagacccgctgccggactttctacctgcaagactatcgatatggagctggtgaaaagaaagcgcatcgaggccatccgaggacagatcctgagcaagctcaggttggcctcacctccaagccagggtgaagtgcccccaggcccactccccgaagcagtgctggctttgtataacagcacacgggatcgcgttgcaggcgagtctgcagagccagaacccgaaccggaggcagattactacgcaaaagaggtgacaagagtcctgatggtcgagactcataacgagatctacgataaattcaaacaaagcacccacagtatctatatgtttttcaacacaagcgagctccgcgaagccgtgcccgaacctgtcctgctcagcagagctgagctgcgacttctgcgactcaagctgaaggtcgagcagcacgttgaactctaccagaaatacagtaataacagctggcgctacctcagcaacaggctgttggctcctagcgactcccccgagtggcttagctttgatgtcaccggagtggtccggcagtggctttctcgaggtggagagattgagggcttccgcctgagcgcacactgcagctgcgatagccgcgacaacacacttcaggtggatatcaacggttttaccaccggaaggcggggggatctggcaacaattcatggcatgaatcgccccttcctcttgctcatggcaacccccctggagcgggcccagcatctgcaaagctcccggcaccggcgggccctggatactaattattgcttctcttcaactgagaaaaattgctgtgtgcgccaactctacattgatttccggaaggaccttgggtggaagtggattcacgagcctaaagggtaccacgccaatttttgcctgggcccctgcccttacatttggagtctggatacacagtattccaaagtgttggctctgtataatcagcacaatcccggtgcctcagctgcgccctgttgtgttccacaggccctcgaaccactgcctatcgtatactacgtggggcggaaacccaaggtggaacagctgtctaacatgatagtcaggagctgtaagtgctcc

SEQ ID NO: 14192 - DNA, 1170 bp, Artificial Sequence
  derived and/or modified sequence
atgccgccgtcgggcctgcggctcttgccactgctcctcccgctgctctggctcctcgtgctcaccccggggcgtccagctgcaggactctcaacctgtaagactatcgatatggagctggttaagcgcaaacgcatcgaagccattcgcggccaaatcctctccaagctgcggctggcgagcccgccatcgcaaggagaagtgcctccgggaccgctgccagaagcagtcctggccctgtacaactcaactcgcgaccgcgtggcgggcgagtccgccgagccagagcccgaaccggaagctgactactacgcgaaggaggtgaccagagtcctgatggtggaaacccacaacgagatctatgacaagttcaagcaatcgacgcactcgatctacatgtttttcaacacctccgaattgcgagaagccgtcccagagcccgttctcctgagccgggcagagctgcggcttctgagactgaaactgaaggtcgagcagcatgtggaactctatcagaaatactccaataactcctggagatacctgtcgaaccggctcctcgcacctagcgattcccctgaatggctgtctttcgacgtcacgggcgtggtccgccagtggttgtcccgcggaggagaaatcgaaggattccgcctgtcagcccattgtagctgtgactcgcgcgacaacaccctccaggtagacattaatggattcactactggacgccgcggcgacctggccactatccatggcatgaacagaccgttcctgctgttgatggcaactccactggaaagagcccagcacctgcagtcgagccggcaccggcgcgccctggatactaattactgcttctcgtcgaccgagaaaaactgttgcgtccgccaactgtacatcgatttccggaaggatctgggttggaaatggatccacgagccaaaaggctatcatgccaacttttgtctgggaccatgtccttacatctggtccttggacacccaatactcgaaggtgctggcgctctacaaccagcataatccaggcgccagcgccgccccctgctgcgtcccccaggccctcgaaccacttcctatcgtctattacgtcgggcggaagcctaaggtggagcaactgagtaatatgatcgtcagaagctgcaagtgttcg

SEQ ID NO: 14193 - DNA, 1170 bp, Artificial Sequence
  derived and/or modified sequence
atgccaccatccggtctcaggctcctcccccttctgcttccactgctgtggctactggtccttacaccaggtcgacccgcggcaggcctgtcgacatgcaagactatcgatatggagttggttaagaggaagagaattgaggctattagaggacagattctttctaagttgaggctcgcctcacctccctcccagggggaagtgccgcccgggcctcttcccgaggccgtgctcgccttgtacaacagtaccagagatcgggtggctggcgaatccgccgagcccgagcctgagccggaggccgactattacgctaaagaagtcacccgagttctcatggtcgaaactcataatgaaatatatgacaagttcaagcaatcaactcattcaatctacatgttcttcaatacgtctgagctgcgggaggccgtgcctgaaccagtgctgttgtcccgtgccgaactgcgcctgctcaggcttaaacttaaggtcgagcagcatgtggaactgtaccagaagtattcgaacaattcctggcggtatctgtcaaatcgtttgctggccccgtcagactctcccgagtggctgtcatttgatgtgactggtgtggtgcgacaatggttgtctaggggcggggagattgaaggcttcagactcagcgcccactgttcctgtgacagtagggacaacaccctccaagttgacataaatggattcactacaggacgccgtggggacttagcaactatccacggcatgaaccgaccttttctgttgctgatggctactcccctggaacgagctcagcatttacaatcctctagacaccgccgcgccctggacactaattactgtttcagcagtactgaaaagaattgttgcgtgcggcaactctacatcgactttcgcaaggacctagggtggaagtggatccacgagccgaaagggtaccacgctaatttctgcctcggcccatgtccttacatttggtccctggatacgcagtattcaaaggtactcgccctgtataatcagcataaccctggggcctcagccgccccttgctgtgtgccccaggccctggagccacttccgatcgtttattacgttggccggaagccaaaggtggaacagctctcaaacatgatcgtgcgatcttgtaaatgttcc

SEQ ID NO: 14194 - DNA, 1170 bp, Artificial Sequence
  derived and/or modified sequence
atgccacccagtggcctgcgtttgctgccgctccttctccctctgctctggctcctggttctgaccccaggcagacccgccgctggcctgtctacttgcaagacaattgacatggaactcgttaagaggaaacgtattgaggccattcgtggacagattctatcaaaactccgtctggcctcccccccgagtcagggggaggtaccaccgggaccactgccagaagctgttctcgccctctataatagtaccagggatcgtgtagccggagagtccgcagagcctgagcccgaacccgaggccgattactacgcgaaagaagtgacacgggtgctaatggtcgaaactcacaacgagatatacgataagtttaagcaatctacacacagcatttatatgttcttcaatacctcagagctgagagaggccgtacctgaaccagtgcttctgagcagggcggagctgaggttgctgcgcctgaaactcaaagtcgagcagcatgttgagctctaccagaagtactccaataactcttggcggtatttgtctaatagacttttggcacctagcgactctccggagtggctatcatttgacgtgacaggcgtggtgagacagtggctaagccgcggcggggaaatcgagggatttaggctatcagcccactgcagttgcgactcacgcgacaatactctgcaggtggacataaacgggtttaccaccggaaggcgcggcgatttagcaactattcacggcatgaaccggcctttcctcctgctgatggctacccctctcgaacgcgctcagcatcttcaatcgagcaggcaccgccgagcactcgatacaaattattgtttctcctctacagaaaaaaattgttgtgtccggcagctatacatagatttccggaaggatctggggtggaagtggattcacgagccaaaaggctaccatgccaatttttgtctagggccttgcccttatatatggtccctcgacacccagtattccaaagtgttggccctctataatcagcataacccaggtgccagcgccgcgccctgttgtgtcccgcaggctctcgaacctcttcccattgtgtactacgtgggcaggaagccgaaagtagagcagctttcaaacatgatagtgcgatcctgtaaatgctcc

SEQ ID NO: 14195 - DNA, 1170 bp, Artificial Sequence
  derived and/or modified sequence
atgccgccatctggcctgagactccttcctctgctcttgccgttgctgtggctgttggtgctgacccctgggcgacccgccgctggcctctccacatgcaagaccattgacatggagctcgttaagagaaagaggatcgaggccattcgtggccaaatactctcaaaattgagactggcgtcaccccctagtcagggtgaagtgccccctggccccctacctgaggccgtgctggctctgtacaatagcaccagagaccgcgtggccggcgagagtgctgagcccgaacccgaaccggaagctgactactacgccaaagaggtaacgcgtgttctgatggtggaaacccataacgaaatctatgacaaatttaaacagtccacccacagcatttacatgtttttcaacacgtcagaacttcgggaggccgtgccagagcctgttctgctgagtcgcgcggagcttcgattgctcagactcaagctcaaagtcgagcagcatgtggagctgtaccagaagtacagcaacaatagttggcggtacctctccaatcgattgctggccccaagcgactctcctgaatggctcagttttgacgtgactggtgtggtgcgccagtggctgagtcgcggcggcgagattgagggattccgattaagcgctcattgttcgtgcgatagccgagacaatactctgcaagtggacatcaacggttttactactgggcgcagaggagatttggctaccattcacggtatgaatcgcccgttcctactgctcatggccaccccgttggagcgtgcgcagcatctgcagagttcacgccatcgaagagccctggacacaaactactgcttctccagtaccgagaaaaactgctgcgttcgtcaactgtatatagattttagaaaggatctgggctggaagtggatccatgaacctaagggatatcacgccaacttctgtctgggcccatgcccttacatctggagtctggacacccagtacagcaaagtgctcgcgctttacaatcagcacaatcccggcgcctctgctgccccatgctgtgtgccccaggcgctggagcctctccccattgtctattatgtcgggaggaagccaaaggtggagcagttgagtaatatgatcgtcagaagttgcaagtgctcc

SEQ ID NO: 14196 - DNA, 1170 bp, Artificial Sequence
  derived and/or modified sequence
atgcccccttccgggctcagactgctgcctctgcttttgcctcttctgtggcttctggtccttaccccaggcagacctgcagcgggactttcgacttgtaagaccatagatatggagctggtgaaacgcaagagaatcgaagcaatcaggggtcaaattctgagcaaacttcgtcttgcatcgccccctagccagggcgaagttcctcctggacctctccccgaagccgtgctggccctgtacaattcgaccagagatcgcgtcgccggcgagtcggcagaaccagagcctgaacctgaagcggactattacgcaaaagaggtgactagagtcctcatggtggaaacccacaatgagatctacgacaagtttaagcaaagcactcactcaatttacatgttctttaacaccagcgaacttcgggaagcagtgccagaaccagtgctgctgtcccgcgcagaacttcggttgcttcggctcaagctcaaggtggaacagcatgtggaattgtaccagaagtactccaacaatagctggcgatatctgtccaatcggctgctggcaccgtcggactcgccagaatggctgtccttcgatgtgactggtgtcgtccggcaatggttgtccagaggtggcgaaatcgagggttttcgactctcagcacattgctcctgtgattcccgcgacaacactcttcaagtggatatcaacggctttaccaccggacgacgaggtgatctggccactattcatgggatgaacaggccttttctgcttctgatggcaactccgctggagcgtgcacagcatcttcagagctccagacatagacgcgctctggatactaactactgtttttcaagcaccgaaaagaactgttgtgtgagacaattgtacattgattttcgcaaagatctcggctggaagtggattcacgaacccaagggataccatgcaaacttttgccttggtccttgtccctacatctggagcctcgatacccagtactccaaggtcctcgccctgtacaaccagcacaatcctggcgcttccgcagcaccttgctgcgtcccacaagcacttgaaccgcttccaattgtgtactatgtggggagaaagcctaaagtggaacagctgagcaatatgatagtgcgcagctgtaagtgttcg

SEQ ID NO: 14197 - DNA, 1170 bp, Artificial Sequence
  derived and/or modified sequence
atgcctccatccggactgcgcttgctgccactcctgctgcctctcctttggctgcttgtgcttacccctggtcggccagcggccggcctttcgacttgcaagaccatagatatggaactcgtgaagcgtaagcgtattgaagcgatcagaggtcaaattctttccaaactgcgcctcgcaagccccccatcccagggcgaggtgccccctgggccacttccagaagcggtcctggccctgtataactcgacccgggatagggtcgcaggagaaagcgccgagcctgaaccggaacctgaagccgattactacgcaaaagaagtcacccgtgttctcatggtggaaacccataacgagatatatgacaaattcaagcagtcaactcattccatttacatgttctttaacacctcggaactcagagaggcagtgcccgagcctgtgcttctgtcgcgcgctgagctgcgcctcctgcggctgaaactcaaggtggaacagcatgttgaactctaccaaaagtactcgaacaatagctggagatacctttcgaaccgacttctggcaccctcggatagccccgagtggctttcctttgatgtgactggcgtggtgagacaatggctgtcccgaggcggtgaaatagaaggatttcggctgagcgcccactgcagctgcgactcaagagataatacccttcaagttgacattaacggctttactactggtcgaagaggagatctggcaactattcatgggatgaatagaccttttctgcttcttatggcaactcccctggagcgcgcacagcatctgcaaagctcacggcatagacgggctcttgacaccaattactgttttagctcaactgagaagaactgctgtgtgcgtcagctttacattgatttccgtaaggatcttggttggaagtggattcatgagcctaaaggataccacgcaaatttctgtctcgggccatgtccgtacatctggtcgctggatacgcaatattcaaaagtgctcgctctttacaatcaacataaccccggagcatccgccgcaccatgttgtgtgccccaggctttggaaccactgccaatagtttactacgtgggtcgaaagcccaaggttgaacagctgtctaacatgatcgtcagatcgtgtaagtgttca

SEQ ID NO: 14198 - DNA, 1170 bp, Artificial Sequence
  derived and/or modified sequence
atgccaccttcgggcctgcggctccttcctctgctgctccctctgctgtggctgctcgtgctgacgcccggacgtcctgcagcaggtctgtctacctgtaaaaccattgacatggaacttgtgaaaagaaagcgcatcgaggctatccgtgggcagattctgtccaagctgagattggcatcgccacccagccagggtgaggtgcctccaggcccactgccagaagcagtccttgcactttacaactcgacgcgcgatagagtggccggagaatcagcagaacctgagccagagccagaggctgactattatgcgaaggaggttaccagagtgctgatggtggaaactcacaacgaaatctacgacaagtttaagcaatcgactcactcgatctacatgttcttcaataccagcgaactgagggaggcagtgccggaacccgtgctcctgtctcgcgcagaactgcgcctgctgcgacttaagctgaaggtggagcaacacgtggaactgtaccaaaagtactcgaacaacagctggcgctacctgtctaacagacttttggccccatccgacagcccggaatggctttccttcgatgtcactggagtcgtgaggcagtggttgtcacggggaggcgagatcgaaggttttaggttgagcgcccattgctcctgcgattcgcgggacaacactcttcaagtcgacataaacggtttcactactggtcgcaggggcgaccttgcgactatacacgggatgaaccgtccgttccttctgcttatggcgacccctctggaaagagcgcaacatcttcagtcatcccggcacagacgcgcactcgacaccaactactgtttttccagcactgaaaagaactgttgcgtcaggcaactttacattgatttcaggaaggatcttggatggaaatggatccatgagcctaagggctaccacgcaaacttttgtttggggccatgcccgtatatctggtcgctggacacccagtactcgaaggtccttgccctgtataatcagcataatcctggggcgtccgccgccccgtgttgtgtgccacaagcccttgagcccctgcccatcgtgtactacgtgggtcgcaagcctaaagtggaacaactgtcaaacatgattgtcagatcctgtaagtgtagc

SEQ ID NO: 14199 - DNA, 1170 bp, Artificial Sequence
  derived and/or modified sequence
atgccgccgtcgggcctgcggctgcttcctctgctgctgccgctgttgtggctgctggtcctgacccccgggaggcccgcggccggactgtcgacgtgtaagacgatcgatatggagctggtgaaacgcaagcggatcgaggctatcaggggccagatcctttcgaaattgagacttgcctcgccgccgtcacagggcgaagtgccccctgggccgctgccggaggcagtgctggccctctacaactcgaccagggaccgggtcgccggcgagtcagcagagccggagccggaaccggaagccgactactacgccaaggaggtgaccagagtgctgatggtggagactcacaatgagatctacgataagtttaagcagtccactcattcaatctacatgtttttcaacacttccgagttgcgggaggctgtcccagaaccggtgctgctgagcagagctgaattgagactgttgcgcttgaaactgaaggtagaacaacacgtggaactgtaccagaagtattcaaacaattcatggcgatatctgtccaatcggctgctcgctccatcggattcgccagagtggctcagcttcgacgtgactggagtcgttcgccagtggctgtcgcggggcggtgaaatcgaaggtttcaggttgtccgctcactgttcgtgcgactcgcgggataataccctccaggtcgacatcaacgggttcactaccggacgccgcggggacctggctactattcacggcatgaaccgtcccttcctccttcttatggctactcccctggaaagggcccagcacctgcagagcagcagacatagacgcgccctcgataccaactactgtttttccagcaccgagaaaaactgctgtgtgagacagctgtacattgattttagaaaggatctcggctggaagtggatccacgagccaaaggggtatcatgcaaacttctgcctgggaccgtgtccatacatttggagcctcgacacccagtactcgaaggtcctggccttgtacaaccagcataatccgggagcttccgcggccccatgctgcgtgccgcaggcgctggaacctctgcctatcgtctactacgtgggacggaaaccgaaggtggaacagctgtcgaacatgatcgttcgctcctgtaagtgctcc

SEQ ID NO: 14200 - DNA, 1170 bp, Artificial Sequence
  derived and/or modified sequence
atgcctccttcaggactgcggttgttgccactgcttcttccactgctttggcttcttgtgctcacgcctggcaggcctgcagccggcctcagcacttgtaagactattgatatggaactcgtgaaacgcaagcgcattgaagcaatccggggtcaaatcctcagcaaactccgccttgcctccccaccatcccaaggagaggtgcctcctggacctcttcctgaagctgtgttggccctttacaactccacccgggatagagtggcaggtgaaagcgctgagccagaacctgaaccagaggcagattactatgctaaggaggttacgcgggtgcttatggtcgaaacccataatgaaatctatgataagttcaagcaaagtacccatagcatatacatgttctttaacacgtccgagcttagagaagccgtccccgaaccggtgctgctttcccgagcagaactcaggctcctccggctgaaacttaaggtggagcagcacgtcgaattgtaccaaaagtactcgaacaattcctggcggtacctttcgaatcggctcctggcaccatctgattccccagagtggctttccttcgacgtgactggcgtcgtcagacagtggctcagcagaggtggggaaattgaagggtttcgactctcagcacactgttcctgcgattcgagggacaatactctgcaagtcgacattaacgggtttacgactggtcgaagaggtgatttggcaactattcatggcatgaaccggccattcctgttgcttatggcaaccccactcgaaagagcccaacacctgcaatcctcgcgtcatagaagggcccttgataccaactactgcttctcgagtactgagaagaactgctgtgtgagacagctgtacattgattttagaaaggatctcggatggaagtggattcacgagcccaagggctaccatgccaacttttgtctcgggccttgtccttacatttggtcccttgacacccaatattccaaggtcctggccctctataaccagcataacccgggtgcgtcagcagcgccatgctgtgtgcctcaagcactcgaacctctgcctatcgtctactacgtcgggcgaaaacccaaggtggaacagttgtcgaacatgattgtgagatcctgcaaatgttcg

SEQ ID NO: 14201 - DNA, 1170 bp, Artificial Sequence
  derived and/or modified sequence
atgcccccttcgggcctccgcttgctgccactgctgttgccgcttctgtggcttctggtgttgactccggggaggccagccgctggcctcagcacttgcaagaccatcgacatggagctggtcaagcgaaagcggatcgaagccatccgcggacagattctttctaaactgcggttggcttccccacccagccaaggcgaggtgccgccgggcccgctgccggaagccgtcctcgccctttacaactccacccgagatcgagtcgcgggagaatcggccgaacccgaacctgaacctgaggccgactactacgcaaaggaggtgacgcgggtgctcatggtggagactcacaacgaaatctacgataagtttaagcagtcgacccattcaatctacatgtttttcaacacctccgagttgcgtgaagcggtccctgaaccagtgctgctctcccgtgcagagctgagactgctcaggctcaaactcaaagtcgaacagcatgttgaattgtaccagaaatactcgaacaactcctggcgctacctctcaaaccgccttctggcaccgtccgactccccagaatggctgtctttcgatgtcactggtgtggtgagacaatggctttcaaggggaggagaaatcgagggatttcgcctcagcgctcactgttcttgcgattcaagggacaacaccttgcaagtcgacatcaacgggttcaccacgggccggcggggagatctggcgactattcacggtatgaatcggccgttcctgctgctcatggcaactcccctcgaacgggcccaacacctgcagtcgtctcgtcaccgcagagcgctggacactaattactgcttctcatcaaccgagaagaactgctgcgtgcgccaactgtatatagacttccgcaaggacctgggatggaagtggatccatgagccaaagggttaccacgctaatttctgtcttggaccctgtccgtatatctggtcgctggacacccagtacagcaaagtgctcgccctgtacaatcagcataatcctggagcgtccgcggcaccttgctgtgtgccacaggcattggagcctctgccaatcgtttactacgtggggagaaagccgaaagtggaacagttgagcaacatgatcgtccgctcgtgcaagtgcagc

SEQ ID NO: 14202 - DNA, 1170 bp, Artificial Sequence
  derived and/or modified sequence
atgcccccgagcggacttcgcctgctgcctctgctgcttcctctgctctggttgctcgtccttaccccaggtagacctgcagccggtctttccacttgcaagactatcgatatggaactcgtgaagagaaagcgcattgaggccattagaggccaaattctctccaagttgcggcttgctagcccgccatcccaaggtgaggttccgccgggcccactgcccgaggcagtgcttgccctctataactcgacgcgcgatagggtcgctggagagtccgcggagcctgaaccggaacctgaggcggactattacgccaaggaggtgacccgagtgcttatggtggagactcacaatgaaatctatgataagtttaagcaaagcactcattcgatttacatgttctttaacacctcggaactccgggaagccgtgcctgaaccagtcctgctttcgagagccgagttgagactgctgcgcctgaaacttaaagtggaacaacatgtggaactgtaccagaagtacagcaacaactcctggcggtacctttccaatagactgcttgccccatccgacagccccgaatggctctcattcgatgtgaccggagttgtcagacagtggctgtcccggggaggagaaattgagggatttcggctgtccgcgcattgttcttgtgattcaagggataacaccctgcaggtggacattaacggttttacgaccgggagacgtggagatctcgcaactatccacgggatgaaccgcccttttctcctgctcatggccacccctctggaaagggcacagcacctccagagctcccggcacagacgggcactcgataccaattactgtttttcatccacggagaaaaactgctgcgtgaggcagttgtacatcgacttccggaaagatctcggatggaagtggattcatgagcctaagggctaccatgcaaacttttgcctgggaccatgcccatacatctggtcgcttgacactcaatatagcaaggtcctggcactgtataaccagcacaatccaggagcgtccgccgcaccctgttgtgtccctcaggccctggaacctctgcctattgtgtactacgtcggacgaaagccgaaagtggagcaactgtcaaatatgattgtgcgttcttgtaagtgtagc

SEQ ID NO: 14203 - DNA, 1170 bp, Artificial Sequence
  derived and/or modified sequence
atgcctcccagtgggttaaggcttttgcccctcctgctgccactcctgtggctgctggtgctcacacctggacggccggccgccggcctgtccacctgcaagacaatcgacatggaactggtcaagaggaaaaggatcgaagcgattcgaggccaaatcctcagcaaactgagactggcatcaccaccttctcagggagaagttcctcccgggcccctgcctgaagcagtgttagccctatacaactcaacgagggatcgtgtggccggcgaatcagccgagcctgagcccgagccagaagcggattactatgcaaaggaagtgacacgagtactgatggtggaaacacacaacgaaatctacgataagtttaaacaatcaacgcattcaatctacatgtttttcaacacgtccgagctgagagaggccgtgcctgaacccgtactgctctcccgtgcagagttgcggctgctgcggctaaagctgaaagttgaacagcacgttgagctgtatcagaagtacagcaataacagctggcggtatctaagcaataggctcctagcaccttccgacagccctgagtggctatcatttgacgttacgggagtagttcgccagtggctgagtagggggggcgagatcgaggggttccggctctcggctcactgctcatgtgattcgagagacaacaccctgcaggtggacattaatggatttacaaccgggcgtcgcggagatttggccacaatccatggcatgaatcggccttttctgctcctgatggccacccccctggagcgagcacagcatctgcagtctagtagacacagaagggccctcgatactaattactgtttctctagtacagagaagaactgctgcgttcgtcagctgtacattgactttcgcaaggatctggggtggaaatggatccacgaacccaaaggctaccacgccaatttttgcttaggaccatgcccttacatctggagcctggatacgcagtactctaaggtgctcgccctttacaaccaacacaatccaggagccagcgctgcaccttgttgtgtgccacaagcgctggagccactcccgattgtgtattatgttgggagaaaaccgaaggtcgagcaactgagcaatatgatcgtccgatcttgcaaatgctcc

SEQ ID NO: 14204 - DNA, 1170 bp, Artificial Sequence
  derived and/or modified sequence
atgcctccaagcggactccggctgttgcccctgctgttgccgctgctgtggctgctggtccttacccctggtcgcccagccgcaggcctgtcaacttgtaagaccatagacatggaactggtgaaaagaaagcgtattgaggcaataagaggccagattctctccaagctgaggcttgcatcgcctccgagccaaggagaagtgccccctggacccctgcctgaagccgtgctggcactgtacaactctacccgtgatagagtggcaggggagtcagcagaaccagagccagagcccgaagcggattactatgcaaaggaggtgaccagagttcttatggtcgaaactcataacgaaatctacgataagtttaagcagtcaacccatagcatttacatgttctttaacacttcagaactcagagaagcagtgccagagccggtgcttctctcgagggcagagcttaggctcctccgtctcaaactcaaggtggaacagcacgtcgaactctaccagaagtactcgaacaacagctggagatacctctccaatagacttcttgcaccttccgattcgccggaatggctgagctttgatgtaactggggtggtaaggcaatggctgtcacggggaggagaaatagagggatttcgcctctccgcccattgttcgtgcgacagcagagacaatacccttcaggtcgacattaacggattcactactgggagaaggggagatcttgcaaccatccacggtatgaaccggccatttcttcttctcatggccactccactcgaaagagctcagcacctccaatcctccagacatcgccgggcgctcgatacgaactactgctttagttcgaccgaaaagaactgttgcgtgcgccagctgtacatcgacttccggaaagatctgggctggaagtggattcacgagcctaaagggtaccatgcgaatttctgtcttggtccatgcccttacatttggagcctggacacccagtactcgaaggtgctcgccctgtacaaccagcataacccgggtgccagcgcagcgccatgttgtgtccctcaagcacttgaacctctgcctattgtctactacgtcggccggaaacctaaggtggaacaactttccaacatgattgtcagatcctgcaagtgttcc

SEQ ID NO: 14205 - DNA, 1170 bp, Artificial Sequence
  derived and/or modified sequence
atgccacccagtggcctccgactccttccgttgttgctcccactgttatggctcttagtgttaacaccaggtcggccggcggctggactgtccacctgcaagaccatcgatatggagctcgtgaaacgcaaacggatcgaagctattcgcggtcaaatcctgtcaaagttgcggcttgccagtccccctagccagggggaggtcccacctggtccactgccagaggcagttctcgctttgtataattctacacgggatcgggttgcaggggaatctgccgagccagagccggagccggaagccgactattacgcaaaggaggtgacccgagtgttgatggtggaaactcacaacgaaatatacgataagttcaaacaatctacccatagtatctatatgttttttaacacctctgaacttcgggaagccgtccccgagcctgtgctgctgtcgagagccgaactgcgtctgctcagactgaaactgaaggtggaacagcatgttgagttataccaaaaatatagtaacaactcttggcgctatttatcaaatagactcctggccccatcagactcaccagaatggctgagcttcgacgttactggcgtggtgaggcaatggctctcacgcggtggagagattgaagggtttcggctaagcgcccattgcagttgcgatagccgcgacaatacgctccaggtggacatcaacgggttcaccaccggacgcagaggggatctggccacaatccatggtatgaaccgcccatttctactcctgatggccacgccgttggaaagagcccaacacttgcagtccagtcgacatcgtcgagccctggacactaattattgtttttcttcgaccgaaaagaactgctgcgtccggcaactttacatagatttcaggaaagacctcggatggaaatggatccacgagcccaaaggatatcacgcgaatttctgcttagggccctgcccctatatatggtctttagatacccaatattccaaggtgctcgcactctacaatcaacataacccaggggcttcagctgcgccttgttgcgttccccaggccctggaacccctgccgattgtgtactacgtgggcagaaagccaaaggttgaacagctctctaacatgatcgtgcgctcttgcaaatgttcg

SEQ ID NO: 14206 - DNA, 1170 bp, Artificial Sequence
  derived and/or modified sequence
atgcccccgtcgggactgcgactgttgcccttgcttctgccgctgctgtggttgcttgtcctgacccccggtcggcctgcggccggcctgagtacctgcaagacaatcgatatggagctagtgaagcgtaaacggatcgaggccatccgtggccagatccttagtaagctgcgactggcgagtccaccgtctcagggcgaggtcccccccggacctttgccagaggcggtgctggcattgtacaacagcactagagacagagtcgctggagagtcggccgagccggaaccagagccggaggcagattactacgcgaaggaagtgactcgggtgctcatggttgaaacgcacaatgaaatctacgacaaattcaaacagtcgacgcacagcatctacatgttcttcaacacatccgaattgagggaagccgtacccgaaccggtgctgttgagccgagcggagttgcgtctgctgcgtctgaagctgaaggtggagcaacatgtagagctgtaccagaagtattcgaataactcgtggaggtatctaagtaatcggctgctggcaccctcggattcccctgagtggctgtccttcgacgtgacaggagtcgtgcggcaatggctctcgcgaggcggtgagatcgaaggttttagactctccgcccactgcagctgtgattcgcgcgataatactttgcaagtggatattaacggctttacgacaggcagacgaggtgatctggccacgattcatggaatgaatagacccttcctgttgctgatggcaacgccgctggaaagagcgcaacacctccagtccagcagacaccgacgcgcgctcgacaccaactactgtttctcttctaccgagaagaactgctgcgttcgtcagctttacatcgacttcagaaaggacctaggctggaaatggattcatgaacctaagggctaccatgctaatttttgcctaggaccatgcccttacatctggtcactagatactcagtactcgaaggtgttggcattgtacaatcaacacaatcccggagcgagcgccgcaccgtgctgcgtcccccaagcgctggagccattacccatcgtgtactatgtgggccgcaaaccgaaagtggagcaactgagcaatatgatagtacgctcctgcaagtgctcg

SEQ ID NO: 14207 - DNA, 1170 bp, Artificial Sequence
  derived and/or modified sequence
atgcctcctagcggactgcgcttacttccattacttctgcctctactgtggctgttagtgttaaccccaggtcgccctgccgccggccttagcacttgcaaaacgatcgacatggaattggttaagagaaagaggattgaggctatcagaggacaaatcctttcaaaattacgactggcatctcctccgagccaaggagaagtcccgcctggtcctctaccggaagctgttttggcactttataattctactagagatcgagttgcaggcgaatccgcagaacctgaaccggagccggaggctgattattatgctaaagaggttaccagggttttgatggttgaaacgcataacgaaatttacgacaagtttaaacagagcacccactcgatatatatgttcttcaatactagcgagctgagagaagctgtgccggaaccggtattactttctcgcgcagaactgcggctactgagattaaaacttaaggttgagcaacacgtagaattgtaccagaaatactcaaacaacagctggaggtacttgtccaacagacttttagctccgagcgactctccggaatggctttcattcgatgtcacaggagtagtgcgtcagtggttgtcccgcggcggagagattgaagggttcagactttctgctcattgcagctgtgactcacgtgataacaccctacaagtcgatatcaacggatttaccacaggacgccgcggtgatcttgcaacaattcacggaatgaacagaccctttttgctacttatggccacacctctggaacgcgctcaacacctccaatcatctagacatcgcagagcgttagacacaaattattgcttcagctctaccgaaaaaaactgttgcgttcgtcagctctacatcgattttcgtaaagatcttggctggaaatggattcatgaaccgaaaggatatcatgctaacttctgcttaggcccttgcccgtacatatggtcattggatactcagtactctaaagtccttgccctgtacaatcagcataaccctggtgcttctgccgcgccctgctgcgttcctcaggctctcgaaccactgcccatcgtctattatgtaggtcgcaaaccgaaggtcgagcaactcagcaatatgattgtccgctcatgtaagtgttct

SEQ ID NO: 14208 - DNA, 1170 bp, Artificial Sequence
  derived and/or modified sequence
atgcctccatccgggctgcggctgctgcctcttctcctaccattgttatggctcttggtgctgacaccgggacgccctgcagcaggtctgtccacatgtaagaccatagatatggagctggtaaagcggaaaaggattgaggctattaggggtcagatcttgtccaaactgcggttagcctctcccccttcgcagggagaggtcccacctggaccactgcctgaagcagttctggccctctacaattcgaccagagaccgggtcgcaggagagtccgccgaaccagagcctgaaccagaagcagactactatgccaaggaagtcaccagagtgctgatggtggagactcataatgagatctatgacaagttcaaacagtctacccacagcatctacatgttttttaatacaagcgagttgcgggaggccgttcctgagcccgtgctcctctctcgagctgaactacggctgttgaggctcaagctcaaggtcgagcaacacgtcgagctctatcagaagtacagtaataattcctggcgctacctcagtaatcgattactcgcaccaagtgactcccctgagtggcttagcttcgacgtgaccggggtggtgcgtcaatggttgagtagggggggagaaattgaaggattcaggctcagcgcccactgcagctgtgattccagagacaatactctgcaagtggacatcaacggctttaccaccggcaggagaggggatcttgccacaattcacgggatgaacaggcccttcctacttcttatggctactccattggagagggcccagcatttgcagagctcgaggcacaggcgagctcttgacacaaattactgttttagctccacagagaagaactgctgcgtgcgccagctttatattgatttcagaaaggatctcgggtggaagtggattcacgagcctaaagggtatcacgctaatttctgtttaggaccctgtccatacatctggtctctggatacccagtacagcaaagtgttggcgttgtacaatcaacataacccaggagcttcggcagcgccatgctgcgtgccacaggctctggagcctctccctattgtctactatgttgggaggaaaccgaaggtggagcagctgtctaatatgatagtgcggtcctgcaagtgttca

SEQ ID NO: 14209 - DNA, 1170 bp, Artificial Sequence
  derived and/or modified sequence
atgccaccaagcgggctgcggttactgccccttttactacccctactgtggttgcttgtcctgacccccggcaggcccgcagctggcctctccacatgcaaaacaatagatatggagctcgtaaaaagaaagcgtatcgaagcaatccgaggtcaaattttgtcaaaactgcggttggcctcccctccgagccagggcgaagtgccgcctggaccactgccagaagcggtcctggctttgtataattcaacccgcgaccgggtggctggagaaagtgctgagccagagccggaacctgaggcggactattacgccaaagaagttactagagttctgatggtggagacccacaacgaaatctacgacaaatttaagcaaagcactcacagtatatatatgttctttaatacaagtgagctgcgggaagccgtacctgaaccagtgctcctctccagagccgaactcaggcttctccggctcaaacttaaggtagaacagcacgtcgagctatatcaaaaatactccaataatagttggcgatacctgagtaaccgcctgcttgctccctcagattcccccgagtggttgtccttcgacgtcaccggagtggtgcgccagtggcttagccgggggggagaaattgaaggcttcagactgagcgcccactgcagctgcgatagccgcgataatacactgcaggtagatatcaacggctttactactgggcgaagaggggacttggccaccatccacggaatgaaccggccttttttactcttaatggctacaccactagagcgagctcagcaccttcaatcatcaaggcaccggcgggcgctcgatactaactactgtttctcgagcacggagaagaactgctgcgttagacagctgtacatcgactttcgaaaggatttgggttggaagtggatacatgaaccaaaaggctatcatgctaacttttgtctgggcccttgtccttacatttggtctctggacactcagtatagcaaagtgttagcactatacaaccaacacaacccgggggcttctgccgcaccttgttgcgtgccccaagcgctggagcctctccccatcgtgtactatgtcgggcgtaagccaaaagtggagcaattgtccaatatgatcgttcgaagttgcaaatgtagt

SEQ ID NO: 14210 - DNA, 1170 bp, Artificial Sequence
  derived and/or modified sequence
atgccaccaagtgggctacgcctactgccactcctcctcccactgctttggctgctggtactgacgccaggaaggcctgccgcaggtctgtccacttgtaaaaccatcgacatggagctggttaagcgcaaacgaatcgaggctattcgagggcagatactgtcaaaactgcggctggcttccccaccatcccagggtgaggttccccctgggccgctaccagaggccgtactggccctttataattcgactagagatcgcgtggctggagagagcgccgaaccagaaccggagcccgaggctgactactacgctaaggaagtgacccgcgtgttgatggtcgaaacccacaacgagatttacgataagtttaagcagtctacccacagcatatacatgttcttcaatacgagcgagctccgggaagcagtccctgaaccggtgctactctctcgggcggagttgaggctcctgcggctcaagctcaaggtggaacagcacgtcgaactttatcagaagtactcaaacaattcctggaggtacttgagtaaccgactcctcgcccctagtgattcccccgaatggctgtccttcgatgtgaccggcgtggtgcggcagtggctttctcgcggcggcgagatcgaagggttccggttgtctgcacattgctcatgcgactcccgagataacactctccaggtagacatcaacggctttactactggaagaagaggcgacctcgccaccatccatggcatgaacaggccatttctgctcctcatggccacccctcttgagagggctcagcacttgcagtcttcacgtcacagacgcgctttagacactaattactgtttctcatctacagagaaaaactgctgtgtacggcagctttatatcgatttcaggaaagatttggggtggaagtggattcatgagcctaaaggatatcatgccaacttttgtctgggaccgtgtccctacatctggtctctggatacacaatacagcaaggtcctggcactttacaaccaacataatcctggcgcaagcgctgctccatgctgcgtgccccaggcactggagcccctccccatagtctattatgttgggcgaaagccaaaagtcgaacagctgagtaacatgatcgttagatcatgtaagtgcagt

SEQ ID NO: 14211 - DNA, 1170 bp, Artificial Sequence
  derived and/or modified sequence
atgccgccaagtggactcaggttactgcctctcttactgcccctgctctggctgctggtactgacgccagggcgtccagccgctgggttgtctacctgcaaaaccatcgacatggaactcgttaaaaggaaacgcatcgaagccatcagggggcagatcctgtcaaagctgcgcctcgcaagtccacccagccagggcgaagtgcctccgggacctctgcccgaggcggtgctggctctctacaactctactagagatcgtgttgcaggcgagtcagcagagccagagcccgagcccgaagctgactattatgccaaggaggttactagggtgctgatggtggagacccacaacgaaatttacgacaagttcaagcaaagtacgcattccatttacatgttttttaacacctctgaactcagagaggctgtccctgagccagtgctgttgtctcgtgcagagctcaggctattgcggctcaagctgaaagtggagcagcatgtcgaactgtatcagaagtactccaacaattcttggagatacttatccaatcggctgttggctcctagcgactcacccgaatggctcagcttcgacgttaccggtgtggtgcgtcagtggctctccaggggtggagaaattgagggattccgcttgtccgcacactgctcctgcgactccagagacaatactctgcaggtggatatcaacggctttacgactggacgccgtggcgaccttgcgaccatccatggcatgaaccgaccatttctgctgctcatggcaacgccgctggagcgagcccagcaccttcagtctagtagacatcggcgcgcccttgatacaaattattgctttagcagtactgaaaagaattgttgtgtgaggcagctatacatcgacttccgaaaggacctgggctggaagtggatacatgagcctaaaggctaccatgccaatttctgtctgggcccttgtccatatatttggtccttggatacccagtattctaaagtgctggccctgtataatcaacataatcccggcgcttcagccgcgccatgttgcgtgcctcaggccttggaaccactcccaatcgtttattatgtgggccgaaaaccaaaagtagaacagctgtccaacatgatcgttcgctcctgcaagtgctct

SEQ ID NO: 14212 - DNA, 1170 bp, Artificial Sequence
  derived and/or modified sequence
atgcccccttccgggctaaggctcctgcctttgctccttcctcttctctggctcctagtgttgacaccaggaagacccgccgctggactttccacatgtaaaacaatcgacatggaactggttaaacggaaaagaatagaggcgatccgggggcagatactgtccaaactccgcctggcatctccaccatctcagggagaagtgccccccgggcctctacccgaagctgtcctcgcgctttataactccactagagatagagtcgctggagaatccgctgaacctgaacccgaaccagaagctgactattatgcgaaagaagttacaagagtgctcatggtggaaacacataacgagatatatgataaattcaagcagtcaacgcactcgatatacatgttttttaatacatctgaacttcgcgaagcggtacctgaacctgtgctactctctcgggctgaacttagattactgagactgaaactcaaagtggaacagcatgtggaactgtaccagaagtactcaaacaattcttggagatacctgtctaacagactactggctccgtccgattcaccagaatggttgagttttgatgtgactggagtcgtgcggcagtggctaagtcgagggggggaaatcgaagggtttaggcttagtgcccattgctcctgcgatagtcgagataacactctccaggtggatatcaacggattcacaacggggcgccggggggatctcgcaactatccacggaatgaatcggcccttcctgctcctgatggcaactcccctggaaagagcacagcatctacagtccagtaggcatcgacgcgctctcgatacaaactactgcttctcttctacagagaaaaattgctgtgttcgacagctttatattgattttcggaaagatctcgggtggaagtggattcatgaacctaaaggatatcacgctaacttctgccttgggccctgcccctacatatggtccttggatacacagtattctaaagtgctggctctatataaccagcataatcctggggcttcagccgctccatgttgtgttccccaggctctcgaaccccttccaatcgtctactatgttgggagaaaacctaaagtagaacaattaagtaacatgatagtaagatcctgcaaatgtagt

SEQ ID NO: 14213 - DNA, 1170 bp, Artificial Sequence
  derived and/or modified sequence
atgccgccgtcgggtttacgactattaccgttattattaccgttactatggttattagttctaacgccgggtcgaccggcggcgggtttatcgacgtgtaaaacgatagatatggaactagtaaaacgaaaacgaatagaagcgatacgaggtcaaatattatcgaaattacgtctagcgtcgccgccgtcgcaaggtgaagtaccgccgggtccgttaccggaagcggtactagcgctatataattcgacgcgagatcgagtagcgggtgaatcggcggaaccggaaccggaaccggaagcggattattatgcgaaagaagttacgcgtgtattaatggtagaaacgcataatgaaatatatgataaatttaaacaatcgacgcattcgatatatatgttttttaatacgtcggaattacgtgaagcggtaccggaaccggtattactatcgcgagcggaactacgtttactacgtctaaaattaaaagtagaacaacatgttgaactatatcaaaaatattcgaataattcgtggcgttatttatcgaatcgactattagcgccgtcggattcgccggaatggttatcgtttgatgtaacgggtgtagtacgtcaatggctatcgcgaggtggtgaaatagaaggttttcgactatcggcgcattgttcgtgtgattcgcgtgataatacgctacaagttgatataaatggttttacgacgggtcgtcgtggtgatctagcgacgatacatggtatgaatcgtccgtttttactactaatggcgacgccgctagaacgagcgcaacatttacaatcgtcgcgtcatcgacgtgcgctagatacgaattattgtttttcgtcgacggaaaaaaattgttgtgtacgacaattatatatagattttcgtaaagatttaggttggaaatggatacatgaaccgaaaggttatcatgcgaatttttgtctaggtccgtgtccgtatatatggtcgttagatacgcaatattcgaaagtattagcgttatataatcaacataatccgggtgcgtcggcggcgccgtgttgtgttccgcaagcgttagaaccgttaccgatagtttattatgttggtcgtaaaccgaaagtagaacaactatcgaatatgatagttcgttcgtgtaaatgttcg

SEQ ID NO: 14214 - DNA, 1170 bp, Artificial Sequence
  derived and/or modified sequence
atgccccccagcggtttgcgactgttaccattacttctgcccctgttgtggctgttggtcctaactcctggtagaccggcagcaggtctatcgacctgtaagactattgacatggaattggtaaaaaggaaaaggattgaggcgatccggggccaaatactgagtaaacttcgactggcatctccaccatctcagggcgaagtgccacctggtccactgcctgaggcggtgctggcattgtataatagcaccagagatcgagtggccggcgaatccgccgagccggagcccgagccagaagctgattattacgcaaaagaggtgacgcgtgtcctgatggtagaaacccacaacgaaatctacgacaagttcaaacaatccacccactccatctacatgtttttcaacacctcagaacttcgggaggccgtgcctgagcctgtgctgctatcaagagccgaattaaggttgctcaggctgaagcttaaggtcgaacaacacgttgaactgtaccagaagtacagcaataactcctggcgatacctgtcaaaccgactgttagccccctcagactccccagagtggctctcctttgacgtaactggggtggtgaggcagtggctgtccaggggcggtgagatcgaaggattccgattatccgctcattgttcatgcgactcaagggacaatacactgcaagtggatatcaatgggttcactacaggacgtagaggcgatctggccacgatacacggaatgaacagaccgtttctactattaatggccactccattggaaagggcccagcatctccaaagttctcgacaccggcgagcactggacaccaattactgttttagtagtacggagaaaaattgttgtgtacgacagctgtacatcgacttcagaaaggacttgggatggaaatggatccatgaaccaaagggctaccacgcaaatttctgcttagggccatgtccttacatctggtctctggacacccaatattctaaggttctggctctttacaatcaacacaaccccggcgccagcgcagctccgtgctgtgtgcctcaagcactggagccattgcctatagtgtactacgttgggcgtaagcccaaagtagaacagttatctaatatgattgtccgttcctgtaagtgtagc

SEQ ID NO: 14215 - DNA, 1170 bp, Artificial Sequence
  derived and/or modified sequence
atgccaccgtcgggtttgcgtttgctgccacttttgctgcctctcttgtggcttctcgtgctcacgcccggtcgccctgcggccggactttcgacgtgcaaaactatcgatatggaactggtaaaacgaaagagaatcgaggctattagaggccaaatcctttcgaaactgcgcttggcgtcaccaccttcgcagggagaagtgcctccggggccactccccgaggcagttctcgcactctacaactcgacgcgagatcgcgtggcaggcgaatccgctgaaccggaacccgagcctgaagcggattactacgccaaggaggtcactcgagtcctgatggtggaaactcataacgagatttacgacaagtttaagcagagcacccattccatatacatgtttttcaatacctcggaacttcgagaggccgtaccagaaccagtgctgctttcccgcgctgaacttagacttctgcgcctgaagctgaaagtggaacaacacgtcgagctgtatcaaaagtactcaaacaattcgtggcggtatctgagcaaccgtcttttggccccctcagactcccctgaatggctgtccttcgacgtgaccggagtcgtccggcagtggctgtcgcgaggaggagaaatcgaaggatttaggctgtccgcgcattgttcctgcgatagtagagataatactctgcaagtggacattaacggtttcaccaccggacggagaggcgatctggcaaccatacatggtatgaacaggccttttctgcttctgatggcaacgccgctcgaacgggcccaacatttgcaaagctccaggcatcgccgagcactcgatactaattactgtttttccagcactgagaagaattgctgtgttcggcagctctacattgactttagaaaggatctgggttggaaatggattcacgagcccaaagggtaccacgcaaacttctgcctgggaccatgtccttatatctggagtctggatacccagtactcaaaggtcctcgcactgtacaatcagcacaaccctggagcatcggccgcaccatgttgtgtgccccaggcactggaaccccttcctatcgtgtactacgtgggcagaaagccaaaagtggagcaactttcaaacatgattgtccggtcgtgtaagtgctcg

SEQ ID NO: 14216 - DNA, 1170 bp, Artificial Sequence
  derived and/or modified sequence
atgccaccctcaggcctgagattgctgcccttgcttttgccactcttgtggctgctggttcttacccccgggaggcctgcagcaggattgagcacctgcaaaactattgacatggaactggtgaaaagaaaaagaattgaggcaattcgcggccagatcctgagtaaacttcggttggcatcccccccttcacagggggaagttcccccaggacctcttcctgaagccgtgctggctctgtacaatagcactagagacagagtggccggcgagagcgctgaaccagaaccagagccggaggccgattactacgccaaagaggtaacacgcgtactgatggtggagacgcataacgagatttacgacaagttcaaacagagcacccactccatctacatgttcttcaacacaagtgaactccgagaagctgtcccagagcctgtgcttctgtctagagctgagctcaggcttctgcggcttaaactcaaggttgagcagcacgtggagttgtatcaaaagtattcaaataattcctggcgctatctcagcaatcgcctgctcgctcccagtgactcacccgagtggctgtccttcgacgtcactggagtggtccggcagtggctgagccggggtggggaaatcgagggcttcaggctgagcgcacactgctcatgtgactctcgcgataataccttgcaggtggacataaatgggttcacaacagggcgcaggggggatctggcaaccatccacggtatgaacagaccctttcttctccttatggcaactccgcttgaaagggctcagcacctgcagtcaagccgccacagacgcgccctcgataccaattattgcttctccagtactgagaaaaattgttgtgttcggcagttgtatattgattttcggaaagacctggggtggaagtggatccacgagccaaaaggctaccacgccaacttttgcctgggtccctgcccgtacatatggtccctggacactcaatattctaaagtcctggcactctacaaccagcacaaccccggagcttccgcagctccatgttgtgtgccccaggctctggaacccctgcccatcgtgtactacgtgggtcgaaaacctaaagtcgagcaactcagcaatatgatcgtgcggtcctgtaaatgctct

SEQ ID NO: 14217 - DNA, 1170 bp, Artificial Sequence
  derived and/or modified sequence
atgccgccgagcggactcaggctcttgccgctgctgctgcccctcctttggctgctggtgctcaccccaggacgccctgccgccggactgagcacctgcaagactattgacatggaactggtcaaaaggaagaggatcgaggcgatccggggacagatcctgagcaagctgcgcctggcttcgccgccatcacaaggagaagtgccgccaggaccactgccggaagctgtgctggcactgtacaacagcactagagatcgggtggcaggcgaaagcgcagaaccggaacctgagccggaagctgattactacgccaaagaagtgaccagagtgctgatggtggaaactcacaacgaaatctacgacaaattcaagcaatcgactcattcgatctacatgttcttcaatacctccgagctcagagaggcagtgcctgagccggtgctgctgtcaagagcggaactgcgcttgctgcggctgaagctgaaggttgaacaacatgtggagttgtaccaaaagtactccaacaacagctggaggtacctgtccaatcgcctcctcgcgccgtcagactcaccggaatggctctcgttcgacgtgactggagtggtgcgccagtggctgtcgcggggcggcgagatcgaaggcttcaggttgtcggcacactgttcatgtgattcgcgggacaacactctccaggttgacatcaatggattcaccacggggcgccgcggtgatttggcaaccatccacggtatgaacagaccattcttgttgctgatggctaccccgcttgagagggcgcaacacctccagtcgtcccgacatagacgggcacttgacaccaactactgcttctcaagcaccgagaagaattgttgcgtccggcagctctacatcgatttccggaaagatctgggatggaaatggatccatgaaccgaaggggtatcacgcaaatttctgcctgggaccgtgtccatacatctggtccctggacacccagtatagcaaagtgctggctctttacaatcagcataaccctggagcttccgctgccccttgctgcgtgccacaagcccttgaacctcttccgatcgtgtactacgtcggcaggaagccaaaagttgaacaactttcgaacatgatcgtgcggtcgtgcaagtgctcc

SEQ ID NO: 14218 - DNA, 1170 bp, Artificial Sequence
  derived and/or modified sequence
atgccgccgtccggcctgaggctgctgccgttgttgctgccgctgttgtggcttctcgtgcttaccccgggacggcccgcggcggggctgtcgacctgcaagacgatcgatatggagctggtgaagcgcaaaagaattgaagctattcggggacagatcctgtccaaacttcgactggccagcccgccgagccaaggagaggtccccccggggccgctgccggaagcggtactggccctgtacaattcaacccgcgatcgagtggccggagagagcgcagaaccggaacccgaaccggaggccgattactacgctaaagaagtcacccgcgtccttatggtcgaaactcacaatgagatatacgacaagttcaagcagtcaacccactcaatctacatgtttttcaacacttccgagttgcgcgaagccgtgccggaaccagtgctgctgtcgcgggccgaactcagactgctgcgcctgaagctgaaggtcgaacagcatgtggaactttaccagaagtacagcaataactcgtggcggtacctcagcaaccggctgctggccccttcggactccccagagtggcttagctttgatgtgactggagtggtgaggcagtggctgtccagaggaggggagattgaaggattccggctgtcggcccactgctcctgcgacagtagagacaatactctgcaagtggatatcaacggattcaccactggtcggcgcggggatcttgcaaccattcacggcatgaaccggccgtttctgctccttatggcaaccccgttggaaagggctcagcacctgcaatcgtcgcgacatcgcagagccttggatactaactactgcttctcatcgactgagaaaaactgctgtgtgcgccagctgtatatcgatttccggaaggacctcggatggaagtggatccatgaaccgaaaggataccatgcaaatttctgccttgggccgtgtccatacatctggtcactcgacactcagtactcaaaagttctcgcgctgtataatcagcacaacccgggagcgtcagcggccccgtgctgcgtcccacaagccctcgagcctctgccaatcgtttactacgtggggcgaaagcctaaagtggagcaactcagcaacatgatcgtgagatcctgcaagtgctcg

SEQ ID NO: 14219 - DNA, 1170 bp, Artificial Sequence
  derived and/or modified sequence
atgccacccagcggactgcgtctgttgcctcttctcctgccgctgctctggcttctggtccttactccaggccgtcctgcagcaggactgtccacctgtaagaccattgatatggagctggtgaagcgaaaacgtattgaagctattcgcggacagatcctgtcaaagctcaggctggcatccccgccatcccagggtgaagttcctccggggcccctgcccgaagcagtgcttgcactctacaactcaaccagggatcgagtggccggtgaatccgctgagcctgaacccgaacccgaggcggattactacgcaaaggaagtgacccgggtccttatggtcgagactcacaacgagatttacgataagttcaaacagtcaacgcactccatctacatgttctttaacacgagcgagctgagagaagccgtgccagaacctgtgcttctgtcccgcgccgagctgcggcttctgcggctgaagctcaaagtggaacaacacgtggaattgtaccagaagtacagcaacaattcatggcgatacctcagcaaccgccttctggctcctagcgattcgcctgaatggctgtcctttgatgtgaccggagttgtgcgtcaatggctgagccggggaggagaaattgaaggttttcggctgtccgcgcattgttcgtgtgattcacgcgataataccctccaggtggatatcaacggtttcactaccggacggcggggcgatcttgcaactattcacggaatgaacaggccttttcttctcttgatggcaactccacttgaaagggcgcaacacctgcagtcctcgcgccatagacgggcactggataccaattactgtttttcgtccaccgaaaagaactgttgtgtgcgtcagctgtacattgatttcaggaaagaccttggctggaagtggatccacgagcctaagggctaccatgcaaacttctgtcttggtccatgtccctacatctggtcccttgacactcagtactcaaaggtgctggcactgtacaatcagcataatcctggcgcaagcgcagcgccatgctgcgtgcctcaagccctggagccgctccctatcgtgtactacgtcgggcgcaagcctaaagtcgagcagttgtcgaatatgatcgtgcgctcgtgcaagtgtagc

SEQ ID NO: 14220 - DNA, 1170 bp, Artificial Sequence
  derived and/or modified sequence
atgcccccaagtggactgaggctgctcccgttgctcctgcctctgctgtggctgctggtactcacacccggccgcccagcagccgggctttcaacatgtaagacaatagatatggaactggtgaaaagaaagcgcatagaagccattcgcgggcagatactttcaaagcttcggctggccagtcctccatcccagggagaggtcccccctggacctctgccagaggctgtgctggcgctgtacaactctactagggatcgggtcgccggagagtccgcggaacccgagccagagccagaggccgattactacgcaaaagaggtgacccgggtgttaatggttgagacacacaacgagatttacgacaaatttaagcagagcacccattcaatttacatgttttttaatacctctgaactaagggaggcggtgccagagcccgtgctgctgtctagggccgagctacggttgctgcggctcaagctcaaggtggaacagcacgtcgagctgtatcaaaaatatagcaacaattcatggcggtacttgagtaataggctgttagcaccgtccgactcccccgagtggctgagcttcgatgtcaccggagtggtgcgccaatggttgtccagagggggtgaaatcgaaggattcagactgtcagcccactgttcatgcgatagccgtgataataccctccaggtcgacataaatggcttcaccacaggcaggcgcggggatcttgcgactatccatgggatgaaccgaccctttttgctgttaatggcaactccactggagcgagcccagcatcttcagtcctcacggcacaggcgggctcttgacacaaattactgcttcagctctacggaaaagaattgctgcgtgagacaattgtacatcgattttcgtaaggacctcggctggaaatggatccatgagcctaaggggtatcatgccaacttttgcttgggtccatgtccgtacatttggtcactggacactcagtactctaaagtactggcactctacaaccaacacaatcctggcgccagcgccgccccctgctgcgtcccccaagccctggaacccctgccaatagtttactatgtgggacgcaaaccaaaagttgagcagctgtccaacatgattgtcaggtcctgcaagtgcagc

SEQ ID NO: 14221 - DNA, 1170 bp, Artificial Sequence
  derived and/or modified sequence
atgccaccatccggcttgcgcctgctgcctctgcttcttcctctgctctggctattagtgctgacaccaggacgtcccgccgccggtctgagcacctgtaaaacgattgatatggagctcgtgaaaaggaaacgtattgaagccattcgtggacagatcttgtcaaagctgaggctagcgagcccacctagtcagggggaggtgcctccgggtcctttgcccgaggccgtgctcgccctgtacaactcaacccgcgaccgtgttgctggggaaagcgcagagcccgagcccgagcccgaggccgactactatgctaaggaggtgactcgagtactgatggtcgagacacacaacgagatctatgacaaatttaagcagagcacacatagtatttatatgttcttcaacacttccgagctgagggaagccgtgccagagccggtgctgctgagtagagcggagctgcgactactgagattgaagctcaaagtcgaacagcacgtagagttgtatcagaagtacagtaataattcgtggcggtatctgagcaatcgcttgctagctccttcagattcacccgagtggttatcatttgatgtgaccggtgttgtacggcagtggctgagccgaggcggggaaatagagggattccgcttatctgctcattgctcctgtgatagtagggacaatacccttcaggtcgatataaatggatttactacagggcgccgcggcgacctggccactatccacggaatgaaccgtcctttcctgctgctgatggctaccccactagagagggcacagcatttgcagagtagccgccaccgacgagccctcgacactaactactgtttcagttctactgagaagaattgctgtgtgagacagttgtatatcgatttcaggaaggacctggggtggaaatggattcacgaaccaaagggataccacgctaacttctgtctggggccatgcccctacatttggagcctcgatacccagtacagcaaggttctagctctgtataaccagcataatccaggagccagtgccgctccatgctgtgtgccacaagctttagagcccctgcccatagtgtactatgtggggcggaaaccaaaagtggagcagctgagcaacatgatcgtgcgctcttgcaaatgcagt

SEQ ID NO: 14222 - DNA, 1170 bp, Artificial Sequence
  derived and/or modified sequence
atgccaccaagcgggctgcggcttcttccacttctgcttccgctcctgtggctgcttgtgcttactccaggacgtcccgcggccggcctttccacctgcaaaactattgatatggagcttgtgaagcgcaaaagaattgaagcaattagaggtcagatcctgtccaaacttaggctggcatccccaccaagccaaggggaagtgcctcccgggcctctgcctgaagcagtgctggcgctgtacaactccaccagagatcgagtcgcaggagagagcgccgaacctgagcctgaaccggaggctgactactacgctaaggaagtcaccagagtgctgatggtggagactcacaatgagatttacgacaaattcaaacaaagcacgcactccatttacatgttcttcaacacctcggaactgcgggaggccgtgccagagcccgtcctgctgtcaagggcggaactgaggctgctgcgactgaagctgaaggtagaacagcacgtcgagctttaccagaaatactcaaacaactcatggcgatacctctccaatcgcctcctggcaccatcagattcgcctgaatggctttcatttgatgtcactggagttgtgagacagtggctctcaaggggcggagaaattgagggttttagactttcggcgcattgttcgtgtgattccagagataatactcttcaagtggatatcaatggtttcaccactggacggcgcggtgaccttgccaccatccatggaatgaacagaccttttctccttcttatggcaactcctcttgagagagcacaacatctgcaaagcagccgacaccggcgcgcgctggataccaactattgtttctcatcaactgaaaagaactgctgcgtccgacagctttacattgattttcggaaggatctgggatggaagtggatccatgagccaaagggctaccatgcgaacttctgcctcggaccttgtccatacatttggagcctcgatacgcagtactctaaggtcctggccttgtataaccaacataatcctggggcgtccgccgcgccttgctgtgtgcctcaagccctggagccgctgcctatcgtgtactacgtcggaagaaagccaaaggtggaacaattgtcaaacatgatagtgcggtcctgtaagtgttcg

SEQ ID NO: 14223 - DNA, 1170 bp, Artificial Sequence
  derived and/or modified sequence
atgccaccaagtggacttcgcctgctaccacttttactgccgctcctttggttattggttcttacaccaggacgcccagcggctggattgtcaacttgcaaaacgatagacatggaacttgttaaaagaaagcgaattgaagctatacgtggacaaattctatcgaaacttcgcctcgcatctccaccatcccaaggcgaagtgccaccaggaccgctcccagaagcagttcttgcgctctacaactcgacacgggaccgagtggctggggaatctgctgagccggaaccggagcctgaggctgactattatgcaaaggaggtgactcgtgtattgatggttgagacacacaatgagatttacgataaattcaagcaatcaacgcacagcatctacatgttttttaatacatcagagttgcgtgaagctgtgccggagccggttttgctgtcgagagctgaactcagactgttgcgtttaaaacttaaggttgagcaacatgttgagttgtaccaaaaatattcgaataattcttggagatacttgtctaatcgattgctggctccatcagatagcccagagtggctgtctttcgacgtgaccggagttgttcgtcagtggctttcaagaggaggagaaatcgaaggattccgtttgtcggctcactgctcatgtgattctcgagataacactttgcaggttgatatcaatggtttcactaccggcagacgcggagatcttgctacaattcatggaatgaatcgtccattcctccttcttatggcaacgcctttggagcgggctcaacacttgcaatcctcacgtcacagaagagctttggatacaaattactgtttttcgagtacggagaaaaattgctgtgttcgacagttgtacatcgattttcgtaaagatcttggatggaaatggattcatgaaccaaagggttaccatgcgaatttctgccttgggccctgcccttacatttggagtcttgatactcaatacagtaaagtccttgcgctttataaccagcataacccaggagctagtgcggccccatgttgtgtaccacaggccttggaaccactcccgattgtatactatgtgggacgaaagccaaaagttgaacaactgtcaaatatgattgttcgaagttgtaaatgttcc

SEQ ID NO: 14224 - DNA, 1170 bp, Artificial Sequence
  derived and/or modified sequence
atgccaccttcgggtctgagactgctgcccctcctcctcccgctgctttggttgctggtgctcacccccgggcgtcctgctgctggattgtcgacttgtaagaccatcgatatggaactggtcaagagaaaacgcattgaggcaatccgcggtcagatcctttctaagctgagactggcgtccccaccatcgcagggtgaggtgcccccgggacccttgccggaggccgtgctcgcgctctacaactccacgagagatcgggtggccggagagtcggctgaaccagaaccagagccagaagccgactactacgccaaagaggtcacccgtgtgctcatggtcgagacgcataacgaaatctacgacaagtttaaacagtcgacccattcgatttacatgttcttcaacacctcggaactgcgggaggccgttccggagccagttctgctgtcgcgggccgagctgcggttgctccggctgaagttgaaggtggagcaacacgtggagctgtaccaaaagtactccaacaattcctggcggtacctgtcgaacaggctgctcgcaccatcggattcccctgagtggctgtccttcgatgtgactggcgtcgtgagacagtggctcagcagaggaggagaaatcgaggggtttcgactgtcggctcattgttcttgcgattcccgggacaacacgttgcaagtcgacatcaatggatttactactggccggaggggggacctcgccacgattcacggcatgaacagacccttcctcctgctcatggcaactccgctggagcgcgcgcagcatcttcaatcatcccgccaccggcgggcacttgacactaactactgcttctcatccactgaaaagaactgctgcgtgcggcaactttacatcgacttcaggaaagaccttggatggaagtggatccacgaaccaaagggctaccatgcaaacttttgtctgggcccctgtccgtacatctggtccctggacacccagtactcaaaagttctggcgctctacaatcagcacaatccgggagcgagcgctgcgccatgctgcgtgccacaggctctcgaaccgctcccgatcgtgtactacgtcggacggaagcctaaagtcgaacagttgtcaaatatgattgtgcgctcctgtaaatgttct

SEQ ID NO: 14225 - DNA, 1170 bp, Artificial Sequence
  derived and/or modified sequence
atgcccccgtccggactgcgcctgctgccgctgcttcttccactgttgtggctcctggtgctcactccaggccggcccgccgctggcctctcgacttgcaagaccatcgatatggagttggtgaagagaaagaggatcgaggctatcaggggtcagatcctttccaaactgcgacttgcttcgccgccttctcaaggggaggtcccgcccggcccgctccccgaggccgtcctcgctctttacaatagcactcgggatcgggtggccggagaatcagcggaacctgaacctgaaccagaagccgactactacgcgaaggaggttactcgcgttctcatggtggaaacgcacaatgagatatacgacaaattcaagcagtcaacccattcaatctacatgttcttcaacacttccgaactgagggaggccgtgccggagccggtccttctttcacgcgccgaacttcgcttgctgagactcaaactgaaagtggaacaacatgtggaactgtaccagaaatactccaacaactcgtggcgctatctgtcaaaccgcctcctggccccgtcggatagcccggaatggctgtcatttgatgtgaccggggtcgtcagacaatggctctcgagagggggcgaaatcgagggattcagactgagcgctcattgctcgtgtgacagccgcgacaacacgctgcaggtggacatcaacgggttcaccactggcagacgcggcgatctggcaaccatccacgggatgaatcgccctttcctcctcctgatggcgacgccacttgagagagcgcaacacctgcaatcgtcaagacaccgccgagcactcgatacgaactactgctttagcagcaccgaaaagaattgctgcgtgcgccagttgtacatcgactttcggaaggatttgggatggaagtggatccacgaaccgaagggttaccacgcgaacttctgtctgggaccatgcccatatatctggtcgctcgacactcaatactccaaggtgctggccttgtacaaccagcataacccgggagcctccgcggcaccgtgctgcgttccccaagccctggaaccattgcctattgtgtattacgtcggccggaagccgaaggtcgagcagctgtccaatatgatcgttagatcttgtaaatgttcc

SEQ ID NO: 14226 - DNA, 1170 bp, Artificial Sequence
  derived and/or modified sequence
atgccaccttcagggttgaggctgttgccgctgttacttcctcttctctggctgcttgtactaactcctgggcggcctgccgccgggctaagtacctgcaaaaccatcgacatggaactggtcaagcgcaagaggatcgaagcgattcgaggtcaaatactcagtaagctacgactcgcctctccacctagccagggagaggtgcctccggggccacttcccgaggccgtgctggccttgtataactcaacccgcgatagggtggcgggcgagtccgcagagccagagcctgagcccgaggccgattactacgcgaaagaggtgacaagggtcctgatggtcgaaacccacaatgaaatctacgataaattcaagcagagcactcattctatttatatgtttttcaacacctcagagttgagggaggcagtgcctgagccggttcttctgagccgggctgagctgaggctcctgcgtttgaagctgaaagtagagcagcacgtggagctgtatcagaagtacagtaataactcatggaggtatttgagtaatcgtctgttggcccccagtgattcccctgagtggctgtctttcgatgttacaggagtggtgaggcagtggctgtcccgtggcggcgagatcgaaggctttcgactgtccgctcattgttcctgcgatagcagagacaacacactgcaggtggacatcaatggctttacaactgggcgcaggggcgacctcgccacaattcacggaatgaaccgacccttcctactgctgatggccacacctctggaacgagctcaacacctccagagctctaggcacaggagagcgctcgataccaactattgtttcagctccaccgaaaaaaactgctgcgtccgccagctttacatcgacttccgcaaggacctgggctggaagtggattcatgaacccaagggttaccacgcgaacttctgtcttggcccatgcccctatatctggagcctcgatacacagtatagcaaagttctggctttgtataatcagcataaccctggtgcttcagccgccccctgctgtgtaccacaggctttggagcccctgccaatagtgtactatgttgggcgaaagcccaaagtggaacaactttcaaacatgattgtgaggagttgtaaatgttcg

SEQ ID NO: 14227 - DNA, 1170 bp, Artificial Sequence
  derived and/or modified sequence
atgcccccatctgggctacgcctgttacccctgctgctgcctctgctctggctgttggttctcacccccggtaggcctgctgccggtctctctacctgtaaaacgattgatatggagctggtgaagcggaaaaggatagaagccatccgcggacagatcctgagcaaactgaggttggcctctcctcctagtcagggggaggtgccccctggtccccttcctgaagcagtgctggctctgtataactcgacaagagatagagtcgcaggggagtccgcggagccagagccagagcctgaagctgactattacgccaaggaggtgaccagggtgctgatggtggagacacacaatgaaatatacgacaagtttaagcaatctacccacagtatctacatgttcttcaacacgtcagagctgcgagaagcagtgccagagcccgtcctcctgtcccgggccgaactgaggctcttgcggctgaagcttaaggtagagcagcacgtggagttgtaccagaaatacagtaacaactcttggcggtacctgtcaaatagactgctcgccccctctgactcgcccgaatggctcagttttgacgtgaccggagtagtgcgtcagtggctatcccgaggaggagaaattgagggcttcagactgagtgcccactgcagctgtgacagccgtgataatacgttacaggtggatatcaatggctttactaccggacgccggggggacctcgcaaccatccatggcatgaatagacccttcctgcttctcatggcgacacccctcgagcgtgcccagcacttgcaaagctcacggcacagacgcgcccttgacacaaattactgcttttcatctacggagaagaactgctgtgtgcggcagctgtacatagatttcaggaaggacttgggctggaaatggatccacgaaccaaagggatatcatgctaatttctgcctgggtccctgcccgtacatctggagcctggacacccagtatagcaaagttttggcactctacaatcagcacaaccctggagcgtccgctgcgccatgttgcgttccgcaggcactggagcctctccccattgtgtactacgtgggcaggaagccgaaggtggaacagcttagtaatatgatcgtacgctcatgcaagtgctca

SEQ ID NO: 14228 - DNA, 1170 bp, Artificial Sequence
  derived and/or modified sequence
atgccaccttcggggctgcgcctcttgccacttctcctgccgctcctttggcttttggtgttgactccaggtagaccggccgcgggactctcaacctgcaagacgatcgatatggagctggttaaacgcaagcgaatcgaggcaatccggggacagatcctctccaaacttaggctggcctcgccaccgagccagggagaggtgcctccgggaccgctgccggaggcggtgctggcgctgtacaactcaacccgggatcgcgtggccggcgagagcgcggagcctgaaccggaaccggaagcggactactacgcgaaggaagtgacccgcgtcctgatggtggaaacccataacgaaatctacgacaaattcaagcaatccacccacagcatctacatgttcttcaatacctcggagctgcgcgaagcagtgccggagcctgtgctgctctcccgcgcggaactcagactgctgagactgaagctcaaagtcgagcaacacgtggaactgtaccagaagtactctaacaactcctggcggtacctttccaaccggctcctcgcaccgtccgattcaccggaatggttgtcgtttgacgtcaccggtgtggtcagacagtggctgtcacggggaggcgaaatcgaaggcttccggctttcggctcattgctcatgcgattcacgcgacaataccctgcaggtggacatcaacggattcacgaccggtcggcggggcgacctggcgacgatccacggaatgaatagaccgttcctgctgttgatggctacccctctggagcgggcccagcacctgcaaagcagcagacacagacgggccctcgacactaactactgtttctcaagcaccgaaaagaactgttgcgtgagacaactgtacatcgacttcaggaaggacctgggatggaagtggatccacgaacccaaggggtaccacgccaatttctgcctgggaccatgcccatacatctggtcactggacactcagtacagcaaagtgctggccctgtacaatcaacacaacccaggagcttcggctgccccgtgctgtgtgccacaagccctggaacctctgccaatcgtgtactacgtgggaagaaagccaaaggtggagcaattgtccaacatgatcgttaggtcgtgcaagtgcagt

SEQ ID NO: 14229 - DNA, 1170 bp, Artificial Sequence
  derived and/or modified sequence
atgcccccaagcgggcttcgcctgctgccccttctcctgcctctcctgtggctgctggtgctgactccgggcaggcctgcagccgggctctccacttgcaagaccattgatatggagctcgttaagaggaaacgcatcgaggctatccgagggcaaatcctgagcaagttgcgattagcttctcccccttcacaaggggaagtgcctccaggccccctgcctgaggcagtacttgccctgtataattcaacgcgggatagggtcgcgggcgagagtgctgagccggaacccgagccagaagctgattattacgcaaaggaagtaaccagggtattgatggtggaaactcataatgagatttacgacaagtttaagcaaagtacacatagcatctacatgtttttcaatactagcgagctacgggaggctgtcccagagcctgtgctgcttagtagggccgagcttaggcttttacgcctgaagctgaaggtcgaacaacacgtggagctgtatcagaaatatagcaacaactcttggcgctatcttagcaaccggctcctggccccctcagattctcccgagtggctgtcgtttgacgtaactggagtcgtcaggcagtggctgtccaggggaggagaaatagagggcttcaggctttctgcacactgctcttgtgactcccgcgacaacacactccaggtcgacattaatggcttcaccacagggaggaggggcgatctggcgacaatacatggcatgaaccgcccctttctcttgctgatggctacacctttagagcgagcacagcatttacagagctctagacataggagagctctagataccaattactgtttttcgtctaccgaaaagaattgctgcgttcggcagctctatatagatttcagaaaagacttgggttggaaatggattcacgaacccaagggctaccacgccaacttctgcctcgggccctgtccgtacatttggtctctcgatacacagtactctaaggtgctcgccctatacaatcagcacaatcccggagccagcgcggctccatgctgcgtgccacaggctctggagcccctgcccattgtctactacgtgggacgaaagccaaaggtggaacagctgagcaatatgattgtgaggtcttgtaagtgctct

SEQ ID NO: 14230 - DNA, 1170 bp, Artificial Sequence
  derived and/or modified sequence
atgccaccctccggtctgaggctgcttccgttgctgctgccactgctctggctcctggtgcttacccccggacggcccgccgctggactgtcaacctgtaagactattgacatggagttggtgaagagaaaaagaattgaagctatacgaggacaaatcttgtcgaaattaagactggcctccccgccttctcagggagaagtccctcctggacctctcccagaggccgtgctggccctgtacaactctactagagatcgcgtggctggggagtctgctgagcctgaacctgagcctgaagctgattattacgctaaggaggtcactagggtgctcatggtcgaaacccacaatgaaatctacgacaagttcaagcagtccacccacagtatctatatgttcttcaacacatccgagttgcgcgaggccgtgccagagcctgtcttgctgtcgcgggcagaattgcggctgctcagactaaagttaaaagttgagcagcatgtggaactgtaccaaaagtactccaacaactcatggcgctacctctccaatcgcctgcttgccccctcagattcgcctgaatggctatcttttgacgtaaccggcgtggtgagacagtggctgagtagaggcggagagattgaagggttccgcctttccgcccactgttcctgcgactcacgcgataatactttacaggtggatatcaacgggttcaccaccgggagacggggggatctggcgaccatccatggcatgaatcgtccctttttgcttctgatggccacccctctggagcgggcccaacatctgcagtcctctagacacaggagagcacttgataccaactattgcttctcctccaccgagaagaattgttgcgtcagacagctgtatatcgacttccgtaaagatctagggtggaagtggattcatgagcctaagggctaccacgccaatttctgtttaggcccttgtccctatatctggtcactcgacacacagtatagtaaagttttggcactgtacaatcaacacaatccaggtgcctccgcagcaccctgctgcgtacctcaggccctggagcccctgcccatcgtatactatgtgggtaggaagcctaaagtggagcagctgagcaacatgattgtgagatcttgcaagtgcagc

SEQ ID NO: 14231 - DNA, 1170 bp, Artificial Sequence
  derived and/or modified sequence
atgccgccttctggcctaaggttgctgccgctcctgctgccactgctgtggttgttggtcctgacacctggccgtcctgcagcgggcctgtcaacatgcaaaaccattgacatggagctcgtgaaacgcaaacgcattgaggcgatcaggggccagatcttgagtaagctcaggctggccagccctccaagccagggagaagtgcccccagggccgctgcccgaagctgtgttggccctctacaactctactagagatcgagtggccggcgaatcggcagaaccagagccggaacccgaggccgattattacgcaaaggaagtcactagggtcctgatggttgagactcacaacgaaatatatgacaaattcaagcagagcactcacagtatctatatgttttttaatacttctgagctgcgcgaggcagtccctgagcccgtcttgttgtcccgagctgagctgagactcctaaggcttaaactgaaagtcgagcagcacgtcgagctctaccagaagtactcaaataacagctggcgctacctctccaaccgacttcttgcgccctccgattcgcctgaatggctgtcattcgacgttacgggtgtggtgcgccaatggctgagccgcggcggtgaaatcgagggctttaggctatctgcccactgctcttgtgattctcgtgacaatacactgcaggtggacataaacggattcactacaggacggagaggggacctcgcaaccatccacggtatgaataggcctttcctactgctgatggcgacccccctggagcgagctcagcacctccagtcgagccggcacaggagagcactcgacaccaattactgtttttcctctactgagaaaaactgctgtgtgcggcagctttacatcgatttcaggaaggacttaggttggaaatggatacacgaacctaagggctatcacgcaaacttctgtcttggcccatgtccatacatttggtccctggacacccagtattcaaaggttctggcactctataaccaacacaaccccggcgccagcgcagcaccttgctgtgttccacaggctctcgagccactgccaatcgtgtactacgtgggtaggaaacccaaagttgagcagctttccaacatgatcgttcgcagctgcaaatgttcc

SEQ ID NO: 14232 - DNA, 1170 bp, Artificial Sequence
  derived and/or modified sequence
atgccgccgtcgggactgcgcctgctcccacttctcttgccgctcctgtggctcctggtccttaccccaggccgcccggccgcaggtttgagcacgtgcaagactattgacatggaactggtgaagcgcaagagaatcgaggctatacgcggccaaatcttgagcaaactcagattggccagcccgccgtcccaaggcgaggtgccgccaggacctctgccggaagccgtcctggctttgtacaactcgacccgggatcgcgtcgcgggagagagcgctgagcctgaacctgaaccggaggcagactactacgcaaaggaagttactcgcgtcctgatggtcgagactcacaacgaaatctacgacaaattcaaacagtctacccattcgatctatatgtttttcaacaccagcgaactgcgcgaagcagttccggaacctgtgctcctgtcccgcgctgagctgcgccttctgagacttaagctgaaagtggaacaacatgtggagctctaccaaaagtactccaataactcttggcgctacctctccaatcggttgctggctccgtcggacagcccagaatggctgtcattcgacgtgactggcgttgtgcgccaatggttgtcacggggcggggagatcgaaggcttcaggctgtccgcacactgttcgtgcgactccagggacaacactctgcaggtggacatcaacggcttcacgactggacgccgcggtgatctggctactattcacggaatgaatcgcccgttcctcctgcttatggcaaccccactcgagcgcgcccagcacctgcagtcatcccgccaccggcgcgcgctggataccaactattgcttttcatccaccgagaagaattgctgcgtgcggcagctttacatcgacttccggaaggatctcggctggaagtggatccatgaaccgaagggatatcatgccaacttctgcctgggcccttgtccgtacatctggtcccttgatacccaatactcaaaagtgctggccttgtacaaccaacacaatccaggagccagcgccgccccgtgctgcgtaccgcaggcactggaacccctgcctatcgtgtactacgtgggacggaagccgaaggtggagcagctgtcgaacatgatcgtcagaagctgtaagtgctcc

SEQ ID NO: 14233 - DNA, 1170 bp, Artificial Sequence
  derived and/or modified sequence
atgcctccgtccggtttgcgtctgttgcccctgctacttcctctcctctggctgttagtcctgacccctgggaggcctgctgccgggctcagtacctgcaagacgatagatatggaattggtaaaacgcaagcgaatcgaggctattaggggtcagatcctctccaagttacgtctcgcatcacctcctagccaaggtgaggtgcctcctggcccattacccgaagctgtgctggcactctacaactctacgcgcgacagagttgccggtgaaagcgccgaaccagagccggagcccgaagccgactactatgcaaaagaggtgacacgcgttctcatggtcgagactcataacgaaatttacgataagtttaaacagtccacgcactcgatctatatgtttttcaatacctctgaacttagagaagctgttcctgaacccgtacttctctcgagggccgagctccgactcttgagacttaagcttaaggttgaacaacatgtcgagctctatcagaaatatagtaataattcctggcgctatctttctaataggctcttggcaccctcggatagccctgagtggctcagcttcgatgtgactggtgtcgttcgacagtggttgtctcggggaggagaaatcgaggggttccgtttgtcggcgcattgtagttgtgactcgcgagacaacactcttcaggtcgatatcaacggtttcacgacaggtcgtcggggtgatttagcgaccatacacggtatgaaccgtccctttttgctgctaatggcaacaccgttggaaagggcccagcacctgcagtcatctcgtcataggcgagccctagacactaattattgttttagctccacagagaagaattgctgcgtgaggcagttgtatatcgactttcggaaagatttaggttggaaatggatccatgagccaaaaggataccacgcaaacttctgcctcggtccatgcccgtatatatggagtcttgatacccagtacagcaaagtcttggcgttgtacaaccagcataaccctggcgcctccgcagctccatgttgtgttcctcaggccttggagccactgcccatcgtctattacgtcggtcgtaagccaaaggttgaacagctaagcaatatgatcgttcgctcttgcaagtgtagc

SEQ ID NO: 14234 - DNA, 1170 bp, Artificial Sequence
  derived and/or modified sequence
atgcctcctagtggattgcggctcttgcctcttttactccctctcttatggctgctggttctgacacccggacgccccgcagctggcttgtctacctgtaagactatcgatatggagctcgtgaaacgtaaacggattgaggccattaggggccaaattctgagtaaactgcgcctggcaagtccccctagccaaggtgaggtaccgcctggacctctgccagaggccgtcctggccttgtataattccacaagagaccgcgtggctggggagtccgctgaacctgagccagaacccgaggcggattattacgctaaggaggtgactagagtcctgatggttgaaacacacaacgagatctatgacaaatttaagcagtctacacacagcatatacatgttcttcaacacatcggagctccgggaagcagtgcccgaaccggtgctcttatcgagagcagagcttagactgcttaggttaaaactgaaagtggaacagcatgtagaactataccagaagtattcaaacaatagctggaggtaccttagtaaccggctccttgcacccagcgactccccagaatggctgagttttgacgtgacgggagtggttagacagtggctgtcacggggaggcgaaatcgaaggttttcggcttagcgcccactgctcctgcgacagccgcgacaacactctccaggttgacataaacggctttacaaccgggaggcggggagatctcgccaccatccatggcatgaaccggccatttctgttgttgatggcgacacctttagagcgggcccaacacctgcaatcctctcgacatagacgagcgcttgacacaaactactgtttttctagcacagaaaagaactgttgtgtgcgacagctgtacatcgacttcaggaaggaccttggctggaaatggattcatgaaccaaaaggatatcacgcaaacttctgtctaggtccctgcccctatatatggagccttgatacccagtacagcaaggtgctcgcactctacaatcaacataaccccggtgcttccgcagccccgtgctgcgtgccccaggctctggaacccctccctatcgtgtactatgtggggcggaagcccaaggttgagcagctgtcaaatatgatcgtcaggagttgtaagtgtagt

SEQ ID NO: 14235 - DNA, 1170 bp, Artificial Sequence
  derived and/or modified sequence
atgcctccatcgggtctgaggctgctaccacttctgttgcccctgttgtggttactggttcttaccccagggaggcccgctgcgggtttgtccacttgcaagaccatagacatggagcttgtgaaaagaaagcgcatcgaagccattagaggacagatcctgagtaaactccggctggcgtcacctccatctcaaggcgaggttccaccaggccccctaccagaagcggttttggctctttataatagcacgcgtgaccgagttgccggtgagtccgctgagcctgagccagaacccgaggctgactattacgcgaaggaagtgaccagggtcctgatggtggaaacccataacgaaatatacgacaaattcaagcagtcaacacattccatttacatgttttttaatacatccgaactccgggaagcagtccctgaacctgtgttattgagccgggcggagctgcgcttgttgcggctgaagctcaaggtagagcagcatgtcgagctgtatcagaagtattccaacaatagttggagatacttatcaaacagattgttggcaccgtcagacagccctgagtggctttccttcgacgttacgggcgtggttcggcagtggctgtcccgggggggagaaatcgaaggttttcgtctgagcgcccattgtagctgtgattccagggacaacaccttacaggtggacatcaacgggttcacaaccggtagaagaggcgacctcgccacgatccacgggatgaataggccatttctgttgttaatggcaactcccctcgagcgggctcagcacctgcagtcatctagacaccgaagagcactggacaccaactactgcttttcttcaacggaaaagaattgttgcgtccgccagttgtatattgatttccggaaggacctagggtggaagtggattcatgagccaaagggataccatgcgaacttttgcctcggcccctgtccctacatatggagcctcgacactcagtattcaaaggtgctcgccctctacaaccaacataatccgggcgccagtgccgccccttgttgtgtgcctcaggccctggagccactgccaatcgtgtactatgttggacgcaagcccaaagtggaacagctaagcaacatgattgtgcggtcttgcaaatgtagt

SEQ ID NO: 14236 - DNA, 1170 bp, Artificial Sequence
  derived and/or modified sequence
atgccaccttcaggccttcggcttctgccactgcttctaccactgctgtggctgttagtgctgacacctggacggcccgctgctggccttagcacatgtaaaaccatcgatatggaactggtgaaaagaaagcggattgaggcaattcgggggcaaattctcagcaaattacgattggcttctccgccttcacagggtgaagtgccaccaggcccgctccccgaggctgttttggcgctttacaactcaacaagagatagagttgcaggggaatctgcagaaccagagcctgaacctgaggccgactattatgccaaggaagtgactcgggtcttaatggttgagactcacaacgagatatacgataagttcaagcagtccacccatagtatttatatgttttttaatacatccgagctccgagaggcggtccctgagcccgtgctgctctcaagggcagaattgagactgcttcgcctgaagctgaaggtggagcaacacgttgagctttaccaaaaatatagcaacaatagctggcgctacctctctaatcgccttctcgcaccgtcggactcaccagaatggctctcatttgacgtcaccggagtcgtgagacagtggctgagccgggggggtgagattgagggattccgcctcagcgctcattgcagctgtgatagccgggacaacactctccaggtggacatcaacgggttcaccacagggcggcggggcgatctcgctacgatccacggcatgaatcgtcccttcctgttactgatggctactcccctcgaacgtgcacagcacttgcagagttcacgacacagaagggctctggacacaaactactgtttttcctccactgaaaaaaactgttgtgtaagacagctgtacatagacttccgaaaggacctgggttggaagtggattcacgaacctaagggttatcacgctaacttctgtctaggtccctgtccctatatttggtccctcgacacccaatattcaaaggtgctggctctctataatcaacacaaccctggggcatctgcagctccatgctgtgtcccccaggccctagaaccgctgccaatcgtatactacgttggcaggaagccaaaggtggaacagctctccaacatgattgtgaggtcgtgcaaatgttca

SEQ ID NO: 14237 - DNA, 1170 bp, Artificial Sequence
  derived and/or modified sequence
atgccaccatcaggcctgagattgctgcctcttctgctgccactgctgtggttgttggtgcttactcctgggaggcctgccgctggacttagcacctgcaagaccatcgatatggaattggttaagcgcaagaggatcgaggctatcaggggacagattctgtcaaagttgaggctggccagtcccccatcccagggcgaggttccgcccggccccctgccagaggccgtcctcgccctgtataactccacccgggatagggttgccggcgagtcagccgagcccgaacccgagccagaagcagactattacgccaaggaggtcacaagggtgctcatggtggaaacccataacgagatctacgataaattcaagcagtctacccacagtatttacatgttcttcaacaccagtgaactgagggaggctgttcctgagcccgtccttttgagccgcgccgagcttaggctgctgagactgaaactgaaagtggaacagcatgtggagctgtaccagaaatactctaataacagttggagatacctgtccaatcgactgctggcccccagcgactcacccgagtggctttcatttgatgtaactggcgtggtgcgccaatggctttccaggggcggggaaattgaggggttcagacttagtgcacactgcagctgtgattcccgcgataacaccctgcaagtggatatcaatggctttaccactggccggaggggggatctggcgacaattcatgggatgaacagaccattcctcttgctcatggccacacctttggagcgggctcaacacctgcagtcatcaaggcaccggagagccctcgatactaactattgtttctccagcaccgaaaagaactgctgtgtccgacagctgtatatcgactttaggaaggatctgggttggaaatggattcacgagcctaaaggctatcatgctaacttttgtctcgggccttgcccctacatctggagcctcgatacccagtattccaaagttcttgcgctctacaaccagcacaatccgggtgcctccgctgctccctgctgcgtgcctcaggccctggaacccctgccaatcgtgtactatgtcgggaggaagcccaaagtcgaacagctctccaatatgatcgtgagatcatgtaaatgttct

SEQ ID NO: 14238 - DNA, 1170 bp, Artificial Sequence
  derived and/or modified sequence
atgccaccttcggggctgaggctgctgcccctgctgctcccactcctctggctgcttgtgttgacgccgggcagacctgcagcaggactgtcgacttgcaagaccatcgatatggagctggttaagaggaagcgcatcgaggccattcggggtcagatcctgagcaaactcaggctggcctctccaccatcacagggagaggtgccgccggggccgttgccggaggcagtgctggcactttacaactcgacccgcgatcgggtggcgggagagtcggcggaaccagaacccgaacctgaggcagactactacgcaaaggaggtcacgcgggtgctgatggtcgaaacccacaatgagatctacgacaagttcaagcaaagtacccactcgatctacatgttcttcaatacttcagaacttagagaagctgttcccgagcctgtgctgctgagccgggccgaactgcggctcctgcgcctgaaattgaaggtcgagcaacacgtggaactgtaccagaagtattccaataactcctggcggtacctgagcaacagactccttgcaccctccgatagcccggagtggctgagctttgacgtcaccggggtggtccggcaatggttgagccgagggggagagatcgaaggattcagattgtcagctcactgttcgtgcgactccagggacaatactctgcaggtggatatcaacggctttacgaccgggcggcgaggagatctggcgaccattcacggtatgaatcgccctttcctcctgttgatggcaaccccactggagcgcgcccagcatctccaatcatcacgccatcgcagagcgttggataccaattactgtttctcctcgactgaaaagaactgttgcgtccgccaactctacatagactttcgcaaagacctcggttggaagtggatccacgagcctaaaggctaccatgccaacttctgcctgggaccttgcccatacatttggtccttggatactcaatactcaaaagtgctggccctctacaatcagcataatccgggggcctcggcagcaccatgttgcgtccctcaggcactcgaacccctgccgatcgtttactacgtgggccggaagccgaaggtcgaacagctgagcaacatgatagtgcgctcctgcaagtgttcc

SEQ ID NO: 14239 - DNA, 1170 bp, Artificial Sequence
  derived and/or modified sequence
atgccccctagcggcttgcgcctgttacctttgctgttacccttattgtggttgctggttcttacccctggtcgaccagccgctgggctttcaacttgtaaaacaattgatatggaattggtcaagagaaagcgtatcgaggctattaggggacaaattttgtcaaagctcaggcttgcttcacctccgtcccagggtgaggtccctcctggaccgttgcctgaagccgttctcgctctctataactccactcgagacagggttgccggagaatcagctgaacctgaaccagaaccggaagccgattattatgctaaggaagtgacccgcgtactcatggtggagacgcataatgagatctacgataagttcaaacagtcgactcacagcatatatatgttctttaacacctctgaactaagagaggccgttccagaaccggtcttgttaagtagagccgagttgcgtttgcttcgtttgaaacttaaagttgagcagcatgttgagctctatcaaaaatattctaataattcttggcgatatttgtctaaccgtctacttgctcctagcgattcacctgagtggctttcatttgacgttacgggcgtcgtgcgacagtggctttcaagaggaggcgaaatcgaaggttttagactttctgctcattgttcctgcgatagccgtgataacactcttcaggttgatattaatggctttacgactggccggcgaggagacttagctactattcatggaatgaaccgaccattcctgctccttatggcgactcccctggagagagctcaacatcttcagtcttccagacatcgacgtgcattggacactaattattgtttctcgagtaccgaaaaaaattgttgtgtcagacagttgtacatcgatttcagaaaggacttaggatggaagtggattcatgagcctaagggttatcatgcgaatttttgccttgggccttgtccttatatatggtcgctggatacccaatatagcaaagttttagctctatataatcagcataatccgggtgcctccgctgcgccatgttgtgtccctcaagctcttgaacctctcccaattgtatattacgttggtcgtaagcccaaggttgaacaattatctaacatgattgtaaggtcatgcaagtgctcg

SEQ ID NO: 14240 - DNA, 1170 bp, Artificial Sequence
  derived and/or modified sequence
atgccgccctcaggcctgcggctgctgccgctcctcctcccgctgctgtggctcctggtgctcactcctggccgtcccgccgcaggactgagcacttgcaagaccatcgacatggaactcgtgaagcgcaagcggatcgaagccatcaggggccaaatcctgagcaagctccgcctggcgtcgccaccgtcacagggtgaagtgccgccgggacctctgccagaggcggtgctggccctttacaactccactagagacagagtggccggggagtcggccgagcctgagcccgagccagaagcggattactatgcgaaggaggtgactagagtgctgatggtggagactcacaatgaaatctacgacaaattcaagcaatccacccattcaatctatatgttcttcaacacctctgaactgagggaagcagtgccggaaccagtgctgctctcccgagcagagctgcgccttctcaggctcaagctgaaagtggaacagcacgtggagctgtatcagaaatactcgaacaattcctggagatacctgtcgaatcggctcctcgcaccgtcggactccccggagtggctctcattcgacgtgactggagtagtccgccagtggctgtccagaggtggagaaatcgaaggcttcaggctgtcagcacattgctcgtgcgattcgcgcgacaacactttgcaagtggacatcaacggcttcaccaccggacggcgcggcgaccttgccaccatccacggaatgaaccggccgttcctcctgctgatggccactccgctcgaacgggcgcagcacttgcagagctcccgccatcgccgcgccctggataccaattactgttttagcagcaccgaaaagaactgctgcgtccggcaactgtacatcgacttccgcaaagacctgggttggaagtggatccacgaaccgaaaggataccacgccaatttctgtctcggaccctgcccatacatctggtccctcgacacgcagtactcgaaagtgttggcgctttacaatcagcataaccctggagcaagcgcagccccgtgctgcgtccctcaggccttggaaccgctcccaattgtgtactacgtcggcagaaagccaaaggtggagcagctgagcaacatgattgtgagatcatgtaaatgctcc

SEQ ID NO: 14241 - DNA, 1170 bp, Artificial Sequence
  derived and/or modified sequence
atgccgcctagcgggcttagactgctgcctcttctgcttcctcttctgtggctgctggttctgacgcctgggaggccagccgctggactctccacctgtaagaccattgatatggagctggtcaagcggaagcggatcgaggcgattagggggcaaattctttcgaagctgcgtctcgcctcgccaccctcccagggagaggtgccaccgggtcctctccctgaggcagttctggcactttacaacagcacccgagacagggtggcgggcgaatcggcggagcccgagccggagccagaagccgactactacgccaaagaagtgactcgcgtgcttatggtggaaacgcacaacgaaatctacgacaaattcaaacaatcgacccactcgatttacatgttctttaacaccagtgaattgagagaagccgtgcctgagcccgtgcttttgagtagagctgaacttcggctgctgagacttaagctgaaggtggagcaacatgtggaactttaccagaagtacagcaacaattcgtggaggtacctttccaataggttgcttgcaccatccgattcgcctgaatggctcagctttgatgtgaccggtgtggtacggcaatggcttagccgaggaggcgaaatcgagggattccggctgagcgctcattgctcatgcgacagcagggataacactttgcaagtggacataaacggcttcacgaccggacgaagaggtgatctggcaactatccacggtatgaatcggccgtttctgcttctgatggcaaccccactggagagagctcagcacctgcagagctctcgccatagaagggcccttgatactaactactgctttagcagcaccgaaaagaattgctgtgtgcgccaactctacatagactttcgcaaagatctcgggtggaaatggatacacgagccgaaaggctaccatgcgaatttctgccttggaccatgtccctacatttggtcacttgacactcagtactccaaggtcctcgcactctacaaccaacataatcctggagcgtccgcagccccctgctgtgttccacaggcacttgaaccacttccaatagtgtattatgtcgggcggaagcctaaggtggaacaactctccaatatgatcgtcagatcgtgtaagtgtagc

SEQ ID NO: 14242 - DNA, 1170 bp, Artificial Sequence
  derived and/or modified sequence
atgccgccatcgggacttagactgttgcctctgctgctgcctttgctgtggctcttggttcttactcctggacgcccagccgcaggtctgtccacctgtaagacgattgatatggaactggttaagcgcaagcgcattgaagcaatcagagggcagatattgtcgaaactgcggcttgcttcccctccgtcacagggtgaagtgcctcctggtcctctgccggaggcagtgcttgcactctacaactccaccagagatagagtggcaggagagtccgcagaaccagagcccgagcctgaagcagactactacgctaaggaggtgacgagagtgcttatggtggaaacgcataacgagatttacgataagtttaagcaaagcactcacagcatctacatgttctttaacacctcagaactgcgtgaagcagtgccagaacctgtgcttctgtcaagggcagaactcaggctgctgcgactgaagctcaaggttgagcaacacgtggagctgtaccaaaagtacagcaataactcatggaggtacctgtcgaaccggcttctggccccctcggatagccctgagtggctgtcgttcgacgtaactggagtggtgagacagtggctgagtagaggtggggaaatcgaagggtttcgcttgtccgcccattgcagctgtgatagcagggataacaccctgcaagtggacattaacgggtttactactggtcgacggggagatctggccaccattcatggaatgaatcgtcctttccttctgttgatggcaactccgttggagcgcgcccaacatctccagtcgtcaagacataggagagcactggacaccaactactgtttttcatcaaccgaaaagaattgttgtgtgcgccaactctatattgacttccgcaaagatcttgggtggaaatggattcacgaaccaaaaggataccatgctaacttttgccttggaccatgcccttacatctggtcccttgatacccagtatagtaaggtcctcgctttgtacaaccagcacaatcctggcgcttcggcggcaccatgctgtgtgcctcaagcactggagccccttcccattgtctactacgtcggtcgaaagccgaaagtggagcagctcagcaatatgattgtgcggtcctgtaagtgttcc

SEQ ID NO: 14243 - DNA, 1170 bp, Artificial Sequence
  derived and/or modified sequence
atgcccccctccggcctgcgactcctgcccctattgttgcctctgctgtggcttctcgtcctgacccccggtcggccggccgcgggcctctcgacctgcaagaccatcgacatggaacttgtcaagaggaaacgcatcgaggcgatcagaggacagatcttatccaaactcaggctcgcctcgcctccctctcagggtgaggtcccgccgggacctttgcccgaggccgtcctcgcgctttacaactctacaagggaccgtgtcgccggcgagtccgctgagccggaacctgagcccgaggctgactattatgctaaggaagtgacccgtgtgttgatggtggaaacccacaacgagatttacgacaagttcaagcagtcgacccacagtatctatatgttcttcaacacctcggagctgcgggaggcggtcccggagccggtcctattgtctcgtgctgagctgcgactgcttaggctcaagctgaaggtcgagcaacacgtcgagctgtaccaaaagtactccaacaattcgtggaggtatctgagtaaccgcctcctagcgccgagcgactcgcctgaatggctgtcgttcgacgtcaccggtgtcgtccgtcagtggctctcccgcgggggtgagatcgaaggtttccgtttgtctgctcactgcagttgcgactctcgggacaacacgctgcaggtcgatattaacggattcacgaccgggaggcgcggcgacctggcaactatccacggtatgaaccgccctttcctcctgctgatggccacaccgctcgaacgtgctcagcacttgcagtcctcccgtcataggcgggcgcttgatacgaactattgcttctcgtctaccgagaagaactgctgtgtgcgccagctctacatcgatttccgtaaagatctgggctggaagtggatccatgagcccaagggctatcacgcgaacttctgcctgggaccctgcccgtacatatggtccctcgacacccaatactcgaaggttctggccctttacaaccaacacaaccccggtgccagcgcggctccgtgttgcgtgccccaagcgttggagccactgccgatcgtctactatgtgggtcgtaagccgaaggtcgagcagttgtctaacatgatcgttcgctcgtgcaagtgctcc

SEQ ID NO: 14244 - DNA, 1170 bp, Artificial Sequence
  derived and/or modified sequence
atgccccctagcggactccgcctcctgcctttgctgctcccacttctgtggcttctcgtactgactccgggacgaccagccgccggactgtcgacttgcaagaccatcgacatggaactggtgaagagaaagcgcattgaggcaatccgcggtcaaatcctgagcaagttgaggctcgcttcacctccttcccagggggaggtgcccccaggaccacttccagaggcggttctggctttgtacaactcgactcgtgaccgcgtggcaggagaatccgcagaacctgaaccggaaccggaggcggattactatgccaaggaggtcactagggtgctgatggtggagacgcataacgaaatctacgacaagttcaagcaatcgactcactccatctacatgttctttaacacttccgagcttcgggaggcggtcccggaaccagtcttgctgtcccgcgctgaactgaggctgctccgtctgaagctgaaggtcgaacagcacgtggaactgtaccaaaagtactcaaataacagttggcgctacttgtcgaatcggctgctggcgcctagcgattcgcctgagtggctctcgttcgacgttaccggagtcgtacggcagtggctttcgaggggcggcgaaatcgagggattccggctgtcggcacactgttcctgcgattcccgggataacaccttgcaggtggacattaatggcttcaccacgggacgccggggagatttggcgacgatccatggaatgaatagaccgtttctgctgttgatggcaacccctctcgagcgggcccagcatctgcaatcgagcaggcaccgccgggccctggacacgaactactgcttttcctccaccgaaaagaactgctgcgtccggcagctctacatcgatttccgcaaggacctcggatggaaatggatacatgagccaaagggctaccacgccaacttctgcctgggaccttgcccgtacatttggtcactcgacacccagtattcaaaagtgctggcactgtacaaccagcacaatcccggtgccagcgcggcgccatgctgtgtgccacaggccctggaaccgttgccgatcgtctactacgtggggcgaaaaccgaaagtggaacaactctccaacatgatcgtgcggagctgcaaatgttca

SEQ ID NO: 14245 - DNA, 1170 bp, Artificial Sequence
  derived and/or modified sequence
atgccaccgtccggcttgagactgcttcccctgctgttgccgttgctgtggctgttggttctgaccccgggtagaccggctgcaggtctcagtacctgcaagactattgatatggagctcgtgaagcgcaagagaatcgaggctattagaggacagattctcagtaagctgcgccttgcctctccacccagtcagggcgaggtgccgcccggaccgctccctgaagcagtgcttgctctgtataattcaacgagagatcgcgtcgccggcgagtctgcggaacctgaaccggagcctgaggcggactactatgcgaaagaggtaacaagggttctgatggtagagacgcacaacgagatctacgacaaattcaagcagagtacacattccatttacatgtttttcaacacaagcgaactccgcgaggctgtgcctgaacctgtgctgctttcccgcgctgagctgaggttgctcaggttgaaactgaaggtagagcagcacgtggaactgtaccagaagtacagtaacaacagttggcgctatctgtccaataggctgctggctccttccgatagccccgaatggctgagtttcgatgtgaccggagttgtaaggcaatggctgtcaagaggaggagagattgaaggttttcgcctcagcgcccactgctcttgtgatagtagggataatacgcttcaagtagatattaatggctttaccactggtagaagaggtgacttggcaaccattcatggcatgaatagaccgttcctgctgttgatggccactcccctggaacgcgcacagcacctccaatcttccagacatagaagggctttggatactaactattgtttcagttccacggagaaaaactgttgtgttagacagttgtatatcgactttaggaaggaccttggctggaagtggattcatgaacccaagggctaccacgccaatttctgtctgggtccatgcccttatatctggtcccttgacacccagtattcaaaggtgttggctctgtataaccagcacaaccctggagcgtctgctgctccgtgttgcgttccccaagctctggagcctctccccattgtgtactatgtcggaaggaagccaaaagtggagcagctgtctaacatgatcgtccgctcctgcaagtgtagc

SEQ ID NO: 14246 - DNA, 1170 bp, Artificial Sequence
  derived and/or modified sequence
atgcccccttcgggtctgcgcctgctgccacttctcctgcctcttttgtggctgttggtgctcaccccaggcagaccagcggcgggcctttcgacctgtaagacgatagatatggaactggtcaagcggaaacgaatagaggccatcagggggcagattctctcaaagctgcgtctggcaagcccgccttcgcaaggtgaggtccctcctggacctctccctgaggccgtgctggcactttacaacagcacgcgcgacagagtggcaggggaatccgcagaacctgagcccgagcctgaggccgattactatgcaaaggaagtgacccgcgtgctcatggtggagactcataacgaaatctacgataagtttaagcaatccacccattccatttacatgtttttcaacacctccgagttgagagaggcagtgcctgaaccggtgctgctcagcagagcagagcttcgactccttcgtctgaaacttaaggttgagcagcatgttgaactctaccagaagtattccaacaattcatggcggtacctgtcgaatcggctcttggcgccttctgacagtcctgaatggttgtcgttcgatgtgacgggagtcgtgaggcagtggctctcacgaggcggtgagattgagggattccgcctgagcgcacattgctcgtgcgattcacgagataacaccctccaggtggatatcaatggttttaccaccggtagacggggggacctcgcaaccattcacggaatgaaccggccattcctgcttctgatggcaaccccgctggagcgagcacaacatctccaatcttcgagacacagaagagcccttgacacgaactactgcttttcctcgactgagaaaaactgttgcgtgcgtcaactctacattgattttaggaaggacctgggatggaagtggattcacgaacccaagggttaccatgctaatttctgtctcggaccatgtccttacatatggtccctggacacccagtactcgaaggtcctcgcactgtacaatcaacataatccaggagcatcagcagcgccatgttgcgtgccccaagccctcgagccgctgcctattgtgtactacgtcggcagaaaacctaaggtggaacaactgtcaaacatgattgtgagatcctgtaagtgctcg

SEQ ID NO: 14247 - DNA, 1170 bp, Artificial Sequence
  derived and/or modified sequence
atgccaccctctggattgaggctcctgcctcttctcctccccctactgtggctcctggtactgacccccggccgacctgccgcaggcctctccacatgcaagaccattgacatggagttggtgaaaagaaaacgaatcgaggcgattcgcggccagatcctgtcaaaactgcgactggcctcacctccctctcagggagaagtgccaccaggacctctgcccgaggccgtgctggctttgtataactctactcgagacagggttgcgggagagtccgctgaacccgagccagagccggaggccgattactatgctaaagaggttaccagagtcctgatggttgagactcacaacgagatctacgataagttcaaacagagtacccactctatatatatgttttttaataccagcgagctgcgagaggccgtaccggaacccgtcctattgagtcgcgcagagttgcggctcctgagattaaaacttaaagttgaacagcatgtcgagttgtaccagaaatactctaataatagctggcgatacctctctaataggttgctggcccccagtgattctcccgagtggttgagtttcgatgtaacgggagtggtccgtcaatggctctcacgtggaggtgagattgagggattccggctgtctgctcactgcagctgtgattcaagagataacaccttacaagtggacatcaatgggtttacaacgggccgtcgcggggacctagcaacaattcacggcatgaacagaccattccttctcctcatggctactccactggagcgagcacagcacctgcagtcttctcgccacaggcgggcccttgatacgaactattgtttttcgtccacagagaaaaattgctgtgtgcgccagctgtacatcgattttaggaaagatttgggatggaaatggatccacgaacccaaggggtaccacgccaacttttgcctcggaccctgcccctacatttggagccttgacactcaatactcgaaggtactcgctttatacaatcagcacaaccctggggcttctgctgccccctgctgcgtgccgcaggctctggagccactgcccattgtgtattacgtgggcagaaaaccgaaagtggaacagttgtctaatatgatcgtgcgaagctgcaaatgcagc

SEQ ID NO: 14248 - DNA, 1170 bp, Artificial Sequence
  derived and/or modified sequence
atgccgccatcggggttgcgccttctcccactccttctgccgcttctgtggctccttgtgctgactccgggaaggcctgctgcgggactctcgacctgcaagaccatcgacatggagttggttaaaaggaagcgaatcgaagctatccgcggacagatcctctcgaagctcaggcttgcgtcgccgcctagtcaaggagaagtgccccccggaccgctgcctgaagctgtgctcgctttgtacaactcaacccgggaccgtgtggccggggaatcggcagaaccggaacccgaaccggaagccgactattacgcgaaggaagtgacgcgggtcctgatggtcgagactcataatgagatctatgataagttcaaacagtcgacccattcaatctacatgttcttcaacacttcagagctgcgcgaagccgtgccggaacctgttttgctctccagggccgagcttcggctgcttagactgaagctcaaagtcgaacaacacgtggagctttaccagaagtatagcaacaactcatggcggtacctgagcaataggctcctggcaccatcagattcccccgagtggctctcgtttgatgtcactggagtcgtgagacaatggttgtcaagaggaggagagatcgagggcttccgtctgagcgcgcattgctcctgtgacagccgcgacaatacccttcaggtggacatcaacgggtttaccacgggccggcgcggcgacctggccactattcacggaatgaacaggccgttcctgctgctgatggccacgccactggagagggctcagcacctccaatcctcccgccatagacgggccctggataccaattactgcttcagcagcaccgagaaaaactgttgcgtgcggcagctctacatagatttcagaaaggatctcggctggaagtggatccacgagcctaagggctaccacgcaaacttttgcctgggaccgtgcccgtacatttggtcgttggacactcagtactccaaagtgctggcgctttacaaccagcacaacccgggtgcatccgccgcgccatgttgcgtgcctcaagccttggagccacttccgattgtatactacgtgggtcgtaaacccaaggtcgaacagttgtcgaatatgatcgttcgaagctgcaagtgtagc

SEQ ID NO: 14249 - DNA, 1170 bp, Artificial Sequence
  derived and/or modified sequence
atgcccccctccggcctccgattgttacctctgttgctcccactgctttggctactagtgttgacgcctgggcgacccgctgcaggactgtccacttgcaagaccattgacatggagcttgtgaaaagaaaaagaatagaagctattagaggccagatcttgtccaaactcaggctggctagcccacctagtcagggcgaggttccacctgggcctctgcctgaggcagtgcttgccttgtacaacagcacccgtgaccgggtggcaggggaatctgccgagcccgagcccgagcctgaagctgactactatgctaaggaagtgacccgagtgctgatggtggagacacacaacgagatttacgacaaatttaagcagtcgactcactccatctatatgttcttcaatacctccgagcttagggaagccgtccccgaaccagtcttgctgtcacgcgctgagctgcggctgctaaggttaaagctgaaagtcgagcagcacgttgaactataccagaaatattccaacaactcgtggcggtacctttccaaccgcttactcgccccttctgattcacccgagtggctgagttttgacgtcactggagtagttcggcagtggttaagtcgggggggcgaaatcgagggcttcaggctgagtgcacactgtagttgtgacagcagagacaacactttacaggtcgatattaacggatttacaaccgggcgacgcggcgacctggccactatccacgggatgaataggccgttcctactgttgatggccaccccgctggaacgagcccagcacctccaatcctctagacatagacgcgccctggataccaattactgtttctcctcaacagagaagaattgctgcgtgcgtcagctctacatagattttcggaaggacctgggttggaagtggatccatgaaccgaagggataccatgctaacttctgtcttggcccatgcccttacatttggtcactggatacccagtacagcaaggtgctagcgttgtataatcagcataatcccggcgcgtctgccgcaccttgttgcgtacctcaagcactggaaccattgcctattgtctattacgtaggcagaaagccaaaggtagaacagctgtccaacatgatcgttcgttcttgtaagtgctcc

SEQ ID NO: 14250 - DNA, 1170 bp, Artificial Sequence
  derived and/or modified sequence
atgccccctagtggacttagactcctcccactcctcctgccacttctgtggcttctggttctgactcccggaaggcctgctgccggcctcagcacatgtaaaactatagacatggagctagtgaaaagaaaaaggatagaggcaatccggggacaaatcttgagtaaactgaggttagcttcgcctccgagccagggcgaagtccctccaggccctctgcccgaagcagtgttagccctgtataacagcaccagggatcgggtggcaggcgaaagtgccgagccagaaccagagcctgaagcagattactacgctaaggaagtgacacgggttcttatggtcgaaactcacaatgaaatctatgataagttcaaacaatcgacacactctatttatatgttttttaatacaagcgagctaagggaggccgtccccgagccggttctgctctccagagccgagctgcgcctcctcaggttgaagctgaaagtggagcagcacgtcgagctgtatcagaaatacagcaacaactcttggaggtaccttagcaacagattgttggctccaagcgactctcctgaatggcttagttttgatgttacaggggtggtgagacagtggctgagccgcggaggtgagatcgagggctttcgactgtccgcccattgcagttgtgattcccgcgacaatacacttcaggtggacataaacggctttacgactggaaggagaggagaccttgcgactatccatggaatgaatcgccccttcctgctgcttatggccacccctttggagagggcgcagcacttgcagtcgtcaaggcaccgacgagcgctggatacaaattattgcttttcttcaaccgagaagaactgctgcgtgaggcaactatacatcgattttaggaaggatttgggctggaagtggatacatgagcccaaaggctatcatgcaaacttctgcctggggccatgcccctatatctggtctcttgatactcagtatagcaaagtgctggctctgtataaccagcacaatcccggtgccagcgctgccccttgctgcgtgccacaggctctggagccattgcccatcgtgtactatgtcgggagaaagccaaaggtggaacaactgagcaacatgatagtgagatcgtgcaaatgtagt

SEQ ID NO: 14251 - DNA, 1170 bp, Artificial Sequence
  derived and/or modified sequence
atgcctccatcaggattacgacttttaccattattacttcctttattatggcttttagtattaacaccaggacgtccagcagctggattatcaacttgtaaaacaatagatatggaattagttaaaagaaaaagaattgaagctattagaggacaaattttatcaaaattaagacttgcttctccaccatcacaaggagaagttcctccaggaccacttccagaagctgtacttgctctttataattcaacacgtgatagagtcgcaggagaatcagcagaaccagaaccagaacctgaagctgattattatgcaaaagaagtaactagagttttgatggttgaaacacacaatgaaatctatgataaatttaaacaaagtacacattcaatttatatgttctttaatacatcagaattacgagaagcagttcctgagccagttttactttcaagagctgaattaagattattaagattaaaactaaaagtagaacaacatgttgaattatatcagaaatatagtaataattcatggagatatttatcaaatagattattggctccttctgactctccagaatggttgagttttgatgtaacaggtgttgtaagacaatggttaagtagaggtggtgaaattgaagggttcaggttatctgcacattgttcttgcgattctagagataatacattgcaagtcgatattaatggatttactacaggtcgacgtggtgatttagctacaatacatggaatgaatagaccttttcttcttcttatggctactccacttgaaagagctcaacacttacaatctagtagacatagacgtgcactagatactaattactgtttttcatctacagaaaaaaattgttgtgttcgacaactttacattgattttagaaaagatttgggttggaaatggattcatgaaccaaaaggatatcatgcaaatttttgtttgggaccatgtccttatatatggtcattagatacacaatattcaaaagttttagccttatataatcaacataatccaggagcttccgcagcaccttgttgtgttccacaagcattagaacctttgccaattgtatattatgttggaagaaagccaaaggttgagcaattatctaatatgattgtaagatcatgtaaatgttca

SEQ ID NO: 14252 - DNA, 1170 bp, Artificial Sequence
  derived and/or modified sequence
atgcccccatccgggctgcgactcctgcccttgctcctgcctttgttatggttgttagtgctgacgcccgggaggcccgcggcagggctctcgacctgtaagaccatagacatggagttagtcaagagaaagcgtattgaggctatccgggggcagattctgagcaagttgcgcctggcgtcccctcctagtcagggtgaggtgcctccaggccctttgcctgaggcagtgctggccctatacaacagcaccagagaccgcgttgccggggaatctgccgagccggagccggaacccgaagctgactactatgccaaggaggttacgagggtccttatggtggagacacataatgaaatttacgataaattcaagcagtctactcacagcatctatatgttttttaatacatcagaactgcgggaagcagtgcctgagcctgtgcttttgagtcgcgctgagctaaggctgttgcgcctgaaactcaaagtcgagcagcacgtcgagctgtaccagaagtacagcaataatagctggaggtacctgtctaacaggctgctcgccccctcggactccccggaatggctctcctttgatgtcacaggggtcgtacgacaatggctatctcgcggtggggaaatcgagggatttaggctctctgctcactgtagttgcgactctcgcgataatacgctacaagtcgacatcaacggtttcacgacaggccgcagaggggatctggctaccattcatggcatgaaccgaccttttcttctcctgatggccacccctctggagagggctcagcaccttcagtcgtccaggcacaggcgcgcccttgacaccaattactgcttttcctccactgagaaaaattgctgcgtgcggcaactgtacatcgattttcggaaagacctgggatggaagtggattcacgaacccaaaggctatcatgccaacttctgtctcggaccatgcccctacatttggagtctagacacgcagtactctaaagtacttgctctatacaaccagcacaaccccggtgcaagcgctgcgccctgctgtgtcccacaggctctggaaccattgcctatcgtgtactacgtgggtcggaaacctaaagtggaacaactgtccaatatgattgtcagaagctgtaaatgctca

SEQ ID NO: 14253 - DNA, 1170 bp, Artificial Sequence
  derived and/or modified sequence
atgccaccatctggattgcgtcttctccctctgctgcttccattgctctggcttctggtgttgacacccggaaggcccgccgctggtctctccacttgcaaaaccatcgatatggagctggttaagagaaagaggatagaggccatcagaggtcagatcttgagcaaattgcgtctcgcatcacctccttcccaaggtgaagtccctccaggccctctccctgaggcagtcctggctctttacaatagcacccgcgatagggtggccggagaaagtgcagagcccgaacccgaaccagaggctgattattatgctaaggaagtgacacgcgtccttatggtggaaacacataatgaaatatacgacaagtttaaacagagtacccacagcatctacatgttcttcaacacatccgaactgagagaggcagtacctgaaccagtgctcttgagtagggctgaactgaggctgctcagactgaagctgaaggtggagcagcacgtagaactctatcagaagtactcaaataattcttggagatacctcagtaatagactccttgcaccatccgattcaccagagtggttgtctttcgatgtcaccggtgtcgtcaggcagtggctctctcgtggtggagagatcgagggatttagactctccgcacactgctcatgcgattccagagacaatacccttcaggttgacattaacggcttcacaactggccgtcgcggcgacttggccactattcacggcatgaaccgtccttttctgttgctgatggcaaccccactggagcgtgcacagcacttgcagtcctctagacacagaagggcccttgatactaactactgtttcagttccaccgagaagaactgctgcgtgaggcagctctacattgacttccgcaaggacctgggttggaaatggattcatgaacccaaaggatatcatgctaatttctgtctgggtccatgcccctacatctggtccttggacacacaatatagcaaggtgctggcactttataaccagcacaatccaggcgcctcagccgccccatgctgtgtgcctcaggccctggagccactgcctattgtgtactatgtaggacgtaaacctaaggtcgagcagttgtctaacatgattgtgagatcatgcaagtgtagc

SEQ ID NO: 14254 - DNA, 1170 bp, Artificial Sequence
  derived and/or modified sequence
atgccaccatcaggcctccggctgcttccgctgctgctgccactcctgtggctgcttgtcctgacgccaggccggccagctgcggggttgtctacatgtaagaccattgacatggaactcgtgaaaagaaagcggattgaagccattaggggtcagatccttagcaagctgagactcgcttcccccccctcacaaggagaggttccccctgggcccctgcctgaagccgtgctggccttgtacaattccactagagacagggtggccggcgaaagtgccgagccggaaccagaacctgaagccgattactacgccaaggaggtgactagagtattgatggtggagacccacaatgaaatatatgacaagttcaagcagtctacacactcaatctacatgttcttcaacactagcgaactgagggaggccgtcccggaacccgtgttgctgtctcgagccgaactgcgcctcctgcggcttaaattgaaggtggagcaacatgtagagttgtaccagaagtattcaaataatagttggagatatctgtccaaccgtctgctagctcctagcgactctccggagtggctgtcattcgatgttaccggggtggtcaggcagtggctgtcccgaggaggcgaaatcgaagggtttaggctcagcgcacactgctcgtgtgactcaagggacaacactctgcaggtggacatcaatgggtttacaaccgggcgacggggggacctcgccacaatacacggcatgaataggcctttcctgttgctcatggcgacccccctggagcgcgcccaacatctgcaaagttcacggcatcgcagagcattagacaccaactactgtttttcttctacagagaaaaactgctgtgtacgccaactgtatatcgacttccgcaaggacctggggtggaagtggatccacgagcccaagggatatcacgccaatttctgtcttggcccttgtccatacatttggagcctggacactcagtattcgaaggtgctcgccctatacaaccagcacaaccccggggcctcggctgccccctgttgcgtcccacaggcgctcgagccactccctatcgtatactatgtaggacggaaacctaaggtggaacagttaagcaacatgattgttcgttcatgtaagtgtagc

SEQ ID NO: 14255 - DNA, 1170 bp, Artificial Sequence
  derived and/or modified sequence
atgcctcctagcggacttcggcttcttccgcttctgcttcccctcctttggctgcttgtgttgaccccaggacgcccagctgccgggctgtccacttgcaagaccattgatatggagttggtcaaaagaaagaggatagaagcaattagaggacagattcttagcaagttgaggttggcgtcccctccgtcccagggcgaggtgccacccggacctcttcccgaggcagtcctggcgttgtacaactcgacgagagatagagtggccggggaatccgccgaacccgaacctgaaccggaagcagattactacgccaaggaggtgaccagggtgctgatggtcgaaactcataacgagatttacgataagtttaaacagtcgactcattcaatttacatgttctttaacacctcggaactccgagaagctgttcctgaacctgtccttctttccagggcggaactccgcctgctgcgccttaagctgaaggtggaacaacatgtcgagctctaccagaaatactccaataactcgtggagatacctgagcaacaggctgctggcaccatcggactcgcctgagtggcttagcttcgatgtgactggagtggtgagacaatggctttcgagagggggagagattgaaggatttcgcctgagcgcacattgcagctgcgattcgagagacaatacgcttcaagtggacattaatggattcaccacgggtaggcgaggcgacttggcgactattcatggaatgaaccgcccctttctcctgctgatggcaactccactcgagcgagcacagcatcttcaatcgtcccggcacagaagggcactcgataccaactactgtttttcatccactgagaaaaactgttgtgtgcgccagctgtacattgatttcaggaaggacctcggttggaaatggattcacgagccaaagggttaccacgcaaacttttgtctcggaccctgcccttacatttggtcgctggatacccagtacagcaaggtgcttgcactttacaaccaacacaatccaggagcaagcgccgccccgtgttgtgtcccgcaagcgctggaaccactgccaatcgtgtactacgtgggacggaaacctaaagtggagcagctcagcaatatgatcgtgcggtcatgtaaatgctcc

SEQ ID NO: 14256 - DNA, 1170 bp, Artificial Sequence
  derived and/or modified sequence
atgccaccttcaggcctgcggctgcttcctttgctgcttcctcttctctggctccttgtgcttactccaggacggccagcagcaggcctgtccacctgcaaaaccattgatatggagcttgtgaagagaaaacgaattgaagcaataagaggacagatccttagcaagctgcggcttgcatcgccaccttcccagggtgaggtgcctccaggtccacttccagaagccgtcttggccttgtataacagcacccgtgatagagtggcaggggaatcggctgagccggaacccgaacctgaagcagactactacgcaaaggaggtgaccagagtgctcatggtcgaaacccacaacgaaatctacgataagttcaagcaatcaactcattcaatttacatgtttttcaacacttcggaacttagggaagcggtgcctgaaccagtcctgctctctcgggcggaactccgtctcctccgacttaagttgaaagttgagcagcacgtcgagctgtaccagaagtactccaacaactcgtggaggtacctctcgaaccgactgcttgctcctagcgactctccagagtggctttcgtttgatgtgactggagtcgtgcgacaatggctctcccggggaggggaaatagaaggctttagactgagcgctcactgttcgtgcgactcgcgcgataacactctgcaagtcgacataaacggttttaccaccggacgtcgcggtgatcttgcaaccattcatggaatgaaccgcccttttcttcttctcatggcgacccccctggagagagcacaacaccttcaatcgtccaggcataggagagcgctcgatacgaactactgcttcagtagcaccgagaagaactgttgcgttcggcagctttacatcgattttcgcaaggatctgggatggaagtggatccatgaaccgaaaggataccacgccaatttctgtctgggaccctgtccatacatttggagcctggatactcagtactccaaggtgcttgcactgtacaatcaacataatcctggagcctccgcagcaccatgttgcgtgccccaagcactcgagcccctccctattgtgtactacgtcggaagaaaacccaaggtggaacagctttccaacatgatagtgagatcctgcaagtgttcg

SEQ ID NO: 14257 - DNA, 1170 bp, Artificial Sequence
  derived and/or modified sequence
atgcccccctctggtcttaggctactgcctctgctacttcctctcctgtggttgctcgttctgactcccgggagacccgcagcggggctttccacatgcaagaccattgacatggagcttgtcaagcggaagcgcatcgaggcaatcaggggtcagatattgtcaaaactcagactggctagccctcctagccagggtgaggtccctcccggccccctgccagaagcggtgctggctctttataattctacccgagatagggttgccggggaatcagccgagcctgaaccagagcctgaagcagattactatgccaaagaggttacacgtgtactcatggtggaaactcacaacgaaatatatgacaagttcaaacagtctacacactccatttatatgtttttcaatacttctgaacttcgtgaggcagtgcctgaacccgtgctgctctccagagcggagctgcgtctgctgagactgaaattgaaggtggaacaacatgtcgagctgtatcagaagtacagcaacaacagttggagatacttgtccaatagactgctcgctccatccgacagccctgaatggctgtcttttgatgtcacaggagtggtgagacagtggctcagcagaggaggcgaaatcgaagggttccgtctttccgcccactgttcatgcgactctcgcgacaatacccttcaggtggacataaacgggttcactaccggaaggcggggcgatctcgcaaccattcacggcatgaacaggccgtttctcctcctgatggccacgcccctcgaaagagcacaacacctccaaagtagtagacacaggcgggcactcgatacgaactattgctttagctcaaccgagaagaactgttgtgtccggcagctttacatcgactttcggaaagacttagggtggaagtggattcacgaacccaagggctatcacgctaacttttgtcttggaccgtgtccctatatctggtctcttgacacgcagtacagcaaggttctcgcactgtacaaccagcacaaccccggcgcctctgctgctccatgctgcgttcctcaggcactcgagcctctgcctattgtctattacgttggtcgtaaacccaaggtcgagcagctctcaaatatgattgtgagatcctgtaagtgttcg

SEQ ID NO: 14258 - DNA, 1170 bp, Artificial Sequence
  derived and/or modified sequence
atgcccccatctggattaaggctgcttccactgttactcccacttttatggcttctcgtgctgacgccgggacgcccagctgctgggctctccacctgcaagactatcgacatggagctggtcaagaggaagcgcatcgaggccatccgagggcagatcctgagcaaactgagattagcttctccgccttcacaaggtgaggtgccccctgggccactcccagaagccgtgctcgcattatacaacagtacaagggatcgagtcgccggcgaatccgccgaacctgaacccgagccggaggccgattactatgcgaaagaggttactcgcgtactgatggtagagacacataatgagatatatgataagttcaagcaatccacccacagcatatacatgtttttcaatacaagcgaacttagggaagccgtgcccgagcccgttttgttgtctcgcgctgagcttcgactgctgcgcctgaagctaaaggttgagcagcatgtggaactgtaccagaagtactcaaacaatagctggcgctacctatcaaacaggctcctcgccccaagcgactctcctgaatggttaagctttgatgtgaccggtgtggtccgtcagtggctctctcgcggcggggaaatcgaagggtttagattaagtgcgcattgtagttgcgattccagggacaacacattgcaagtggacattaacgggtttactactgggagaaggggggacctggctactatccatggaatgaacaggccgtttctccttctgatggctacacccctggagcgtgcacagcatctacagagctcgcgccacagacgtgcccttgacacaaactattgtttcagtagcactgaaaaaaactgttgcgtgcgccagctatacattgattttaggaaggaccttggttggaaatggatccatgagccaaaaggctatcacgccaatttctgcctgggaccctgcccctacatctggagcctggatacccagtatagtaaggtgctggccttgtacaaccagcacaacccaggagcctctgcagcaccgtgctgcgtcccccaggcactagaacctctgcctattgtctattacgttggccgtaagccaaaagtggagcaactgtccaatatgatcgttaggtcatgtaagtgcagt

SEQ ID NO: 14259 - DNA, 1170 bp, Artificial Sequence
  derived and/or modified sequence
atgcccccctctgggcttaggctgctgccactgcttttgccacttctatggttgctggttctgactcccggccgacccgctgctggtctttcaacttgcaagactatcgatatggagcttgtaaagcgaaagcgaattgaagcgatccggggccaaatcctgagcaaactgcgcttagcgagccctccatcccagggcgaggtgccccccggacctctgcccgaagccgtgctggctctctataatagtacccgggaccgggtggctggtgaatccgctgagccggaaccagagccagaagccgactactatgctaaagaagtgacccgggtcctcatggtagagactcataacgaaatttacgacaagttcaagcagagtacccactccatttatatgttcttcaatacaagcgaactcagggaagctgtacccgagccagttctcctcagccgggctgagttgcgactgctccgccttaagttaaaggttgagcagcacgtggagctgtatcagaaatatagcaacaatagctggaggtatcttagcaacagattgctcgctccaagtgattcccctgagtggctgagcttcgacgtcacaggagtcgtgcgccagtggctgtcccgtgggggagaaatcgagggcttccgtctctcagcccattgtagttgcgatagccgagacaacaccttacaagtggatatcaatggctttaccactggtcgcaggggggatctggcgaccattcacggcatgaaccggccgttcctcctcttgatggctactcccctggaacgggcccagcatctccagagttccagacataggcgagcgcttgataccaactattgtttttcttccactgaaaaaaactgctgcgtgcgccaactctacattgattttaggaaggatctcggttggaagtggatccatgagccgaagggctatcacgccaacttttgtttggggccatgtccgtatatttggagtcttgacacccaatactcaaaggttctggcactttataatcagcataatcctggtgctagtgctgctccctgctgcgtgccccaggcccttgagcccctgcccattgtttattacgtcggcagaaagcccaaggtcgagcagctgagcaatatgatcgttcggagctgcaaatgcagc

SEQ ID NO: 14260 - DNA, 2199 bp, Artificial Sequence
  derived and/or modified sequence
ccccgccgccgccgcccttcgcgccctgggccatctccctcccacctccctccgcggagcagccagacagcgagggccccggccgggggcaggggggacgccccgtccggggcacccccccggctctgagccgcccgcggggccggcctcggcccggagcggaggaaggagtcgccgaggagcagcctgaggccccagagtctgagacgagccgccgccgcccccgccactgcggggaggagggggaggaggagcgggaggagggacgagctggtcgggagaagaggaaaaaaacttttgagacttttccgttgccgctgggagccggaggcgcggggacctcttggcgcgacgctgccccgcgaggaggcaggacttggggaccccagaccgcctccctttgccgccggggacgcttgctccctccctgccccctacacggcgtccctcaggcgcccccattccggaccagccctcgggagtcgccgacccggcctcccgcaaagacttttccccagacctcgggcgcaccccctgcacgccgccttcatccccggcctgtctcctgagcccccgcgcatcctagaccctttctcctccaggagacggatctctctccgacctgccacagatcccctattcaagaccacccaccttctggtaccagatcgcgcccatctaggttatttccgtgggatactgagacacccccggtccaagcctcccctccaccactgcgcccttctccctgaggacctcagctttccctcgaggccctcctaccttttgccgggagacccccagcccctgcaggggcggggcctccccaccacaccagccctgttcgcgctctcggcagtgccggggggcgccgcctcccccatgccgccctccgggctgcggctgctgccgctgctgctaccgctgctgtggctactggtgctgacgcctggccggccggccgcgggactatccacctgcaagactatcgacatggagctggtgaagcggaagcgcatcgaggccatccgcggccagatcctgtccaagctgcggctcgccagccccccgagccagggggaggtgccgcccggcccgctgcccgaggccgtgctcgccctgtacaacagcacccgcgaccgggtggccggggagagtgcagaaccggagcccgagcctgaggccgactactacgccaaggaggtcacccgcgtgctaatggtggaaacccacaacgaaatctatgacaagttcaagcagagtacacacagcatatatatgttcttcaacacatcagagctccgagaagcggtacctgaacccgtgttgctctcccgggcagagctgcgtctgctgaggctcaagttaaaagtggagcagcacgtggagctgtaccagaaatacagcaacaattcctggcgatacctcagcaaccggctgctggcacccagcgactcgccagagtggttatcttttgatgtcaccggagttgtgcggcagtggttgagccgtggaggggaaattgagggctttcgccttagcgcccactgctcctgtgacagcagggataacacactgcaagtggacatcaacgggttcactaccggccgccgaggtgacctggccaccattcatggcatgaaccggcctttcctgcttctcatggccaccccgctggagagggcccagcatctgcaaagctcccggcaccgccgagccctggacaccaactattgcttcagctccacggagaagaactgctgcgtgcggcagctgtacattgacttccgcaaggacctcggctggaagtggatccacgagcccaagggctaccatgccaacttctgcctcgggccctgcccctacatttggagcctggacacgcagtacagcaaggtcctggccctgtacaaccagcataacccgggcgcctcggcggcgccgtgctgcgtgccgcaggcgctggagccgctgcccatcgtgtactacgtgggccgcaagcccaaggtggagcagctgtccaacatgatcgtgcgctcctgcaagtgcagctgaggtcccgccccgccccgccccgccccggcaggcccggccccaccccgccccgcccccgctgccttgcccatgggggctgtatttaaggacacccgtgccccaagcccacctggggccccattaaagatggagagaggactgcgg

SEQ ID NO: 14261 - DNA, 1173 bp, Artificial Sequence
  derived and/or modified sequence
atgccccccagcggcctgagactgctgcccctgctgctgcccctgctgtggctgctggtgctgacccccggcagacccgccgccggcctgagcacctgcaagaccatcgacatggagctggtgaagagaaagagaatcgaggccatcagaggccagatcctgagcaagctgagactggccagcccccccagccagggcgaggtgccccccggccccctgcccgaggccgtgctggccctgtacaacagcaccagagacagagtggccggcgagagcgccgagcccgagcccgagcccgaggccgactactacgccaaggaggtgaccagagtgctgatggtggagacccacaacgagatctacgacaagttcaagcagagcacccacagcatctacatgttcttcaacaccagcgagctgagagaggccgtgcccgagcccgtgctgctgagcagagccgagctgagactgctgagactgaagctgaaggtggagcagcacgtggagctgtaccagaagtacagcaacaacagctggagatacctgagcaacagactgctggcccccagcgacagccccgagtggctgagcttcgacgtgaccggcgtggtgagacagtggctgagcagaggcggcgagatcgagggcttcagactgagcgcccactgcagctgcgacagcagagacaacaccctgcaggtggacatcaacggcttcaccaccggcagaagaggcgacctggccaccatccacggcatgaacagacccttcctgctgctgatggccacccccctggagagagcccagcacctgcagagcagcagacacagaagagccctggacaccaactactgcttcagcagcaccgagaagaactgctgcgtgagacagctgtacatcgacttcagaaaggacctgggctggaagtggatccacgagcccaagggctaccacgccaacttctgcctgggcccctgcccctacatctggagcctggacacccagtacagcaaggtgctggccctgtacaaccagcacaaccccggcgccagcgccgccccctgctgcgtgccccaggccctggagcccctgcccatcgtgtactacgtgggcagaaagcccaaggtggagcagctgagcaacatgatcgtgagaagctgcaagtgcagctag

SEQ ID NO: 14262 - DNA, 1173 bp, Artificial Sequence
  derived and/or modified sequence
atgcctccctccgggctgagattactccccctgctgttgcccctgttatggctccttgtcttaacgccagggaggccagccgccggactatcgacatgcaaaacaattgacatggagctggtcaagaggaaaagaatcgaggctataagggggcagatactgagcaaacttaggcttgcaagtccgccgtcccagggcgaagtgcctcctggcccgctcccggaggctgtgctggctctttacaatagtacaagggaccgggtcgccggcgagtccgccgaacccgaacctgagcccgaagccgattactacgcgaaggaggtgacccgcgtgctaatggtagaaacacacaatgagatctacgataagtttaaacaatccacacacagcatttacatgttttttaacacttcagaactcagggaagctgtacccgaacctgtcctccttagccgagcagagttgcgactacttcggctcaaactgaaggtcgagcaacacgtggaattataccagaaatattccaacaactcatggcgttacctcagtaatcgactgcttgccccaagcgattcgcctgagtggctgtccttcgacgtgactggggtcgtgcgccagtggctgagccgtggtggagagatcgaagggtttcgcctctccgcacactgtagctgcgactcacgcgacaatacactgcaggtcgatatcaacggctttaccacagggcgacgaggtgacctggctaccatacacggaatgaaccgtccttttcttctgcttatggccacaccactggagcgcgcccaacacctccagtcctctcgtcaccggagggccctagacaccaattattgtttctcatccaccgaaaagaactgctgtgtacgacagctctacatcgactttcggaaggatttggggtggaagtggatccatgagcctaaaggataccatgcaaatttctgcttgggaccatgcccgtacatctggagcctagatacacagtatagcaaggttctcgcactgtataatcagcataacccgggagcgagtgcagccccctgctgtgtacctcaagctctcgagcccctccccatcgtgtactatgttggccgcaagcctaaggtggaacagctctcaaacatgattgtacgctcctgtaaatgctcctag

SEQ ID NO: 14263 - DNA, 1173 bp, Artificial Sequence
  derived and/or modified sequence
atgccacccagcggcctgcggctgctgcccctgctgctgcccctgctgtggctgctggtgctgaccccaggccggcctgctgctggcctgagcacctgcaagaccatcgacatggagctggtgaagaggaagagaattgaggccatccggggccagatcctgagcaagctgcggctggccagcccccccagccagggcgaggtgcccccaggccccctgcctgaggccgtgctggccctgtacaacagcacccgggacagagtggccggggagagcgctgagcctgagcctgagcctgaggccgactactatgccaaggaggtgaccagggtgctgatggtggagacccacaatgagatctatgacaagttcaagcagagcacccacagcatctacatgttcttcaacaccagcgagctgcgggaggccgtgcctgagcctgtgctgctgagcagagctgagctgcggctgctgcggctgaagctgaaggtggagcagcacgtggagctgtaccagaagtacagcaacaacagctggagatacctgagcaaccggctgctggcccccagcgacagccctgagtggctgagctttgatgtgactggagtggtgcggcagtggctgagcagaggaggagaaattgagggcttccggctgagcgcccactgcagctgtgacagccgggacaacaccctgcaggtggacatcaatggcttcaccactggaagaagaggagacctggccaccatccacggcatgaaccggcccttcctgctgctgatggccacccccctggagcgggcccagcacctgcagagcagccgccacagaagagccctggacaccaactactgcttcagcagcacagagaagaactgctgcgtgcggcagctgtacatcgacttcaggaaggacctgggctggaagtggatccacgagcccaagggctaccacgccaacttctgcctgggcccctgcccctacatctggagcctggacacccagtacagcaaggtgctggccctgtacaaccagcacaaccctggggccagcgctgccccctgctgcgtgccccaggccctggagcccctgcccatcgtgtactacgtgggcaggaagcccaaggtggagcagctgagcaacatgattgtgcgcagctgcaagtgcagctag

SEQ ID NO: 14264 - DNA, 1173 bp, Artificial Sequence
  derived and/or modified sequence
atgccccccagcggcctgcggctgctgcccctgctgctgcccctgctgtggctgcttgtcttaacccccggtagacccgccgccggactttctacttgcaagacgatcgacatggagttggttaaacggaaacgcatcgaggcgatcagaggtcaaatactgagcaaactacgcctggctagcccgccatctcagggtgaagtgccgccaggccctctccccgaggcagtcttggccctttacaactctacaagggaccgggtagccggtgaaagcgctgagccggagcccgagccggaggctgattattatgctaaagaagtcactagagtgcttatggtcgagacccacaatgagatttacgacaagtttaaacagtcaacccattctatatacatgttctttaatacatcagaattacgtgaggccgttcctgagccagtgctcttatctcgggctgagctccgtctcctccgcttaaagctgaaggtcgagcagcacgttgagttgtatcagaagtactctaacaactcctggaggtacctctctaaccgcctgctggccccttcagattcccctgaatggctcagctttgatgtgacaggtgtcgtgcgacagtggttgtcaaggggcggagaaatagagggatttaggctgagcgctcactgttcatgcgacagccgcgataacactctgcaggtcgatattaatggtttcactacaggtagaaggggcgatcttgccactatccacgggatgaaccggcctttcttactactcatggcgacaccattggagagggctcagcacctgcaatcaagtcggcataggagggccctagacacaaattattgcttcagtagtacggagaagaactgttgcgttagacagctgtatatcgattttaggaaggacctggggtggaagtggattcacgaaccaaaagggtatcatgcaaacttttgtctagggccctgcccatatatctggagtttggacacacaatatagcaaagtgcttgctttatacaaccaacacaaccccggcgcctcggccgctccgtgctgcgttcctcaggccctcgaacctttgccgattgtatattatgtaggtcggaagcccaaggttgaacaactgtccaacatgattgtgaggtcctgtaagtgtagctag

SEQ ID NO: 14265 - DNA, 1173 bp, Artificial Sequence
  derived and/or modified sequence
atgcccccatctggactgagactcctacctctattactcccgttgctttggttactcgtattaacgcccggtagacccgcagccggactctctacctgcaagaccattgacatggaactggttaagcgaaaaaggatcgaagcgatcaggggacagattctgagcaaactacggcttgcaagtcccccatcccagggtgaagtgccccctggacctctgcccgaagctgtgctggctctttacaactcaacccgcgaccgcgtggctggcgagagtgccgaacctgagcccgagccagaagccgactattatgcaaaggaggtcacccgagtcctgatggtcgaaacacacaacgagatttatgacaagtttaaacaatcaactcattctatttacatgttttttaatacctcagaattaagagaggctgtccccgaacctgtcctactgtcaagggcggaactgagacttctgaggcttaagctgaaagtggaacagcacgtggaattgtatcaaaaatacagtaataactcctggcgctacttgagtaacagactgctggcacctagcgacagccccgagtggttgtccttcgacgtcactggagttgtgaggcagtggctttcacgaggcggtgagattgaaggctttcgtctctctgctcactgctcatgtgacagtcgggacaacaccctgcaggtggatataaacggctttacaaccggcagacgaggtgatttagcaacgattcacggcatgaatcgaccattcctgctcctgatggccacccctttggagagggcccaacatctgcagtccagcagacatcgtagagcattggatacaaattactgtttctcatcaaccgagaagaattgttgcgtgagacagttgtacattgatttccgaaaggatcttggctggaaatggatccatgagcccaagggataccacgcaaacttttgtctgggaccgtgcccatacatctggagccttgacacccagtatagcaaggttctcgccctgtacaaccagcataaccccggtgcttccgccgcaccctgctgcgtgcctcaggctcttgaaccactccccatcgtatactatgttggccgtaaacctaaagtggagcagttaagcaatatgatcgtgaggagctgtaaatgctcatag

SEQ ID NO: 14266 - DNA, 1173 bp, Artificial Sequence
  derived and/or modified sequence
atgccccctagcgggcttcggctgctgcccctcctactgcctcttctctggctgctggtcctgactcctgggagaccggccgctggcttatcgacctgcaagacaattgatatggaactggtgaaacgcaaacgcattgaagctataagagggcaaattctctctaaacttaggctggcttctccgccctcccagggggaagtaccccccggacctttgcccgaagctgtcctggccctttacaattccacccgcgaccgggttgctggagaatccgcagaacctgagccagaaccagaggccgattactacgcaaaagaagtaacgagggtccttatggtagaaacacacaatgaaatctatgacaagtttaaacagtcaactcattccatatacatgttctttaatacaagcgagttgcgtgaggccgttccggaacctgtccttttatcccgagccgagttgcgccttctccggctgaagttaaaagttgaacaacatgtggaattataccagaaatatagcaacaattcctggaggtatcttagcaatcgcctgttagcccctagcgatagccccgaatggttgtcttttgacgttacgggagtcgtgcggcagtggctatctcgcggcggcgagatcgagggctttcggttaagcgcgcattgttcctgcgattcaagggataatacactacaggttgacattaatggatttactacaggcaggcggggtgacctagcgacgatccacggtatgaatagaccctttctcctgctgatggcaactcctttagaacgggcacagcatctccagtcgtcaaggcacaggcgggcactggatactaactattgttttagtagtacagagaaaaactgttgcgtccgtcaattatacattgattttcgaaaggacctgggatggaagtggatacatgaacctaagggttaccatgctaacttctgcctggggccctgcccgtatatctggtctctcgatactcagtattctaaagtgcttgcactctataaccaacacaatcctggcgcttctgctgctccatgctgcgtcccacaggccttagaacctcttcctatcgtgtattacgtgggccgaaagcctaaggtagagcagttaagcaatatgatcgtgcgctcctgtaaatgcagctag

SEQ ID NO: 14267 - DNA, 1173 bp, Artificial Sequence
  derived and/or modified sequence
atgcccccaagcggcctgcgacttctgcctctcctgctccctcttctttggctgttggtcctgacacctggcaggcccgcagcaggtctgtctacctgtaaaacaatcgatatggagctcgttaaacggaagcgaatagaagctattcgagggcagatattaagtaagctgagattagcttcgcctccctcccagggcgaggtcccccccggtccactgcccgaggccgtactagcactgtataacagtacacgagatagagttgctggtgagtccgcagagcccgagccagaacctgaggccgattactacgcaaaagaagtaacgagggtccttatggtagaaacacacaatgaaatctatgacaagtttaaacagtcaactcattccatatacatgttctttaatacaagcgagttgcgtgaggccgttccggaacctgtccttttatcccgagccgagttgcgccttctccggctgaagttaaaagttgaacaacatgtggaattataccagaaatatagcaacaattcctggaggtatcttagcaatcgcctgttagcccctagcgatagccccgaatggttgtcttttgacgttactggcgtggtgcgccagtggctgagcagggggggagaaattgaagggtttaggctgagcgctcactgttcgtgcgactctcgagacaatacgctgcaagtggacatcaatgggtttacaacaggccgacgcggcgacctggccaccatccatggaatgaatcgtccatttcttttgctgatggccacccctcttgaacgagcccagcacttacagtcatcgaggcatcgtagggctttagacacgaattactgtttctctagcactgaaaaaaattgttgcgtgagacagctatatattgattttcgaaaggacctgggatggaagtggatacatgaacctaagggttaccatgctaacttctgcctggggccctgcccgtatatctggtctctcgatactcagtattctaaagtgcttgcactctataaccaacacaatcctggcgcttctgctgctccatgctgcgtcccacaggccttagaacctcttcctatcgtgtattacgtgggccgaaagcctaaggtagagcagttaagcaatatgatcgtgcgctcctgtaaatgcagctag

SEQ ID NO: 14268 - DNA, 2217 bp, Artificial Sequence
  derived and/or modified sequence
ccccgccgccgccgcccttcgcgccctgggccatctccctcccacctccctccgcggagcagccagacagcgagggccccggccgggggcaggggggacgccccgtccggggcacccccccggctctgagccgcccgcggggccggcctcggcccggagcggaggaaggagtcgccgaggagcagcctgaggccccagagtctgagacgagccgccgccgcccccgccactgcggggaggagggggaggaggagcgggaggagggacgagctggtcgggagaagaggaaaaaaacttttgagacttttccgttgccgctgggagccggaggcgcggggacctcttggcgcgacgctgccccgcgaggaggcaggacttggggaccccagaccgcctccctttgccgccggggacgcttgctccctccctgccccctacacggcgtccctcaggcgcccccattccggaccagccctcgggagtcgccgacccggcctcccgcaaagacttttccccagacctcgggcgcaccccctgcacgccgccttcatccccggcctgtctcctgagcccccgcgcatcctagaccctttctcctccaggagacggatctctctccgacctgccacagatcccctattcaagaccacccaccttctggtaccagatcgcgcccatctaggttatttccgtgggatactgagacacccccggtccaagcctcccctccaccactgcgcccttctccctgaggacctcagctttccctcgaggccctcctaccttttgccgggagacccccagcccctgcaggggcggggcctccccaccacaccagccctgttcgcgctctcggcagtgccggggggcgccgcctcccccatgccgccctccgggctgcggctgctgccgctgctgctaccgctgctgtggctactggtgctgacgcctggccggccggccgcgggactatccacctgcaagactatcgacatggagctggtgaagcggaagcgcatcgaggccatccgcggccagatcctgtccaagctgcggctcgccagccccccgagccagggggaggtgccgcccggcccgctgcccgaggccgtgctcgccctgtacaacagcacccgcgaccgggtggccggggagagtgcagaaccggagcccgagcctgaggccgactactacgccaaggaggtcacccgcgtgctaatggtggaaacccacaacgaaatctatgacaagttcaagcagagtacacacagcatatatatgttcttcaacacatcagagctccgagaagcggtacctgaacccgtgttgctctcccgggcagagctgcgtctgctgaggctcaagttaaaagtggagcagcacgtggagctgtaccagaaatacagcaacaattcctggcgatacctcagcaaccggctgctggcacccagcgactcgccagagtggttatcttttgatgtcaccggagttgtgcggcagtggttgagccgtggaggggaaattgagggctttcgccttagcgcccactgctcctgtgacagcagggataacacactgcaagtggacatcaacgggttcactaccggccgccgaggtgacctggccaccattcatggcatgaaccggcctttcctgcttctcatggccaccccgctggagagggcccagcatctgcaaagctcccggcaccgccgagccctggacaccaactattgcttcagctccacggagaagaactgctgcgtgcggcagctgtacattgacttccgcaaggacctcggctggaagtggatccacgagcccaagggctaccatgccaacttctgcctcgggccctgcccctacatttggagcctggacacgcagtacagcaaggtcctggccctgtacaaccagcataacccgggcgcctcggcggcgccgtgctgcgtgccgcaggcgctggagccgctgcccatcgtgtactacgtgggccgcaagcccaaggtggagcagctgtccaacatgatcgtgcgctcctgcaagtgcagctgaggtcccgccccgccccgccccgccccggcaggcccggccccaccccgccccgcccccgctgccttgcccatgggggctgtatttaaggacacccgtgccccaagcccacctggggccccattaaagatggagagaggactgcggaaaaaaaaaaaaaaaaaa

SEQ ID NO: 14269 - RNA, 1316 nt, Artificial Sequence
  derived and/or modified sequence
gggaaauaagagagaaaagaagaguaagaagaaauauaagagccaccaugcccccaucgggauugagauuguugccccuucugcuuccgcugcuuugguugcucguccugaccccuggcaggcccgcagcgggguugucgacguguaagacgauugacauggagcucgugaaacgcaagagaauugaagcaaucaggggucaaauucugagcaaacucagacucgcauccccaccgucccagggugaggucccaccgggaccucugcccgaggcgguccuggccuuguacaacucgacacgcgaccgagucgcaggggagucagcggaacccgagcccgaacccgaggccgacuacuacgccaaagaggucacucgggucuugaugguggaaacucacaacgaaaucuacgacaaguuuaagcagucgacccauucgaucuacauguucuucaauaccagcgagcuuagagaagcgguccccgagccgguacuuuuguccagagcggagcugcgguugcucaggcucaagcugaaaguggaacagcacguagagcuuuaucagaaguacagcaacaauucauggcgguaucucucgaaccggcuguuggcgccgucggauucacccgaauggcucagcuuugaugucacggggguggugcgccagugguuguccaggggcggagagaucgaaggauuucggcucucagcccacuguucgugugauagcagggacaacacgcuccaaguagauaucaacggauucacuacuggucgcagaggggaucuugcgacaauccacgguaugaaucgcccuuuucuccugcugauggccacaccccuugaacgggcgcaacaucuucagucaucccgccauaggagagcacuggacacgaacuacuguuuuucgucgacagagaagaauugcugcgugcggcagcuuuacaucgacuuccgaaaagaucucggguggaaauggauucaugaaccgaagggguaucacgccaacuucugccuggguccguguccuuauaucuggucguuggauacacaguauucaaagguguuggcucuuuacaaucagcacaacccgggagccucggcugcgccuuguugcguaccccaggcauuggagccauugccgauuguguauuaugugggaagaaagccgaaaguggagcaguugucgaauaugaucguacggagcugcaaaugcuccugauaagcugccuucugcggggcuugccuucuggccaugcccuucuucucucccuugcaccuguaccucuuggucuuugaauaaagccugaguaggaag

SEQ ID NO: 14270 - protein, 375 aa, Artificial Sequence
  derived and/or modified sequence
MSTAGKVIKCKAAVLWELKKPFSIEEVEVAPPKAHEVRIKMVAVGICGTDDHVVSGTMVTPLPVILGHEAAGIVESVGEGVTTVKPGDKVIPLAIPQCGKCRICKNPESNYCLKNDVSNPQGTLQDGTSRFTCRRKPIHHFLGISTFSQYTVVDENAVAKIDAASPLEKVCLIGCGFSTGYGSAVNVAKVTPGSTCAVFGLGGVGLSAIMGCKAAGAARIIAVDINKDKFAKAKELGATECINPQDYKKPIQEVLKEMTDGGVDFSFEVIGRLDTMMASLLCCHEACGTSVIVGVPPDSQNLSMNPMLLLTGRTWKGAILGGFKSKECVPKLVADFMAKKFSLDALITHVLPFEKINEGFDLLHSGKSIRTILMF

SEQ ID NO: 14271 - DNA, 1128 bp, Artificial Sequence
  derived and/or modified sequence
atgagcacggccgggaaggtgattaaatgcaaggctgcagttttgtgggagctcaagaaacctttttccatcgaggaagtggaggtggccccgcccaaagcccacgaggttcgcataaaaatggttgccgtagggatctgtggaactgatgatcacgtcgtttctggaactatggtgacacctctgccggtgattctgggtcacgaagccgcggggatcgtggaaagcgttggggaaggtgtcacaaccgtgaagcccggggataaagtcatacccctcgccattcctcagtgtggaaagtgcagaatctgcaaaaacccagagtcaaactattgcctgaaaaatgatgtgtctaatcctcaaggaacattgcaggacggcacttccaggttcacttgccgcaggaaaccgattcatcatttcctcggaatctccaccttttcccagtacacagtagtcgacgagaatgccgtcgctaagatcgacgctgcatctccccttgagaaggtgtgtcttatcggctgcggtttctccacaggatacggatctgccgtgaacgtggcaaaagtcactccaggaagtacatgcgcggtgtttggactgggaggcgtgggtctttccgccattatgggctgcaaggccgccggggccgctcgtatcattgcagtagacatcaataaggacaaattcgctaaagccaaagagttgggagctacagaatgcataaatccacaggattacaaaaagcccattcaggaagtcctcaaagaaatgactgacgggggtgtggacttctcatttgaggtcattggcaggctggacactatgatggcctctcttctgtgctgccacgaggcctgcggcacatctgtgatagtgggcgtaccacccgactcccagaatctgagcatgaatcctatgttactgcttacaggtcggacatggaagggcgcaatcttaggaggttttaagtcgaaagaatgtgttccaaaactcgtggcggattttatggctaagaagttttccttggatgccctcataactcacgtgctgccatttgagaaaatcaacgaggggtttgatctcctgcactctgggaagtccatccgtaccattcttatgttctag

SEQ ID NO: 14272 - DNA, 1128 bp, Artificial Sequence
  derived and/or modified sequence
atgagcacagctgggaaggtgatcaagtgcaaggctgctgtgctgtgggagctgaagaagcccttcagcattgaggaggtggaggtggccccacccaaggcccacgaggtgcgcatcaagatggtggccgtgggcatctgtggcacagatgaccacgtggtgtctggcaccatggtgacccccctgcctgtgatcctgggccacgaggccgccggcatcgtggagagcgtgggggagggcgtgaccaccgtgaagccaggggacaaggtgatccccctggccatcccccagtgtgggaagtgccgcatctgcaagaaccctgagagcaactactgcctgaagaatgatgtgagcaacccccagggcaccctgcaggacggcaccagccgcttcacctgcaggaggaagcccatccaccacttcctgggcatcagcaccttcagccagtacacagtggtggatgaaaatgctgtggccaagattgatgctgccagccccctggagaaggtgtgcctgattggctgcggcttcagcacaggctacggcagcgctgtgaatgtggccaaggtgaccccaggcagcacctgtgctgtgtttggcctgggcggcgtgggcctgagcgccatcatgggctgcaaggctgctggagctgcccgcatcatcgctgtggacatcaacaaggacaagtttgccaaggccaaggagctgggcgccacagagtgcatcaacccccaggactacaagaagcccatccaggaggtgctgaaggagatgacagatggcggcgtggacttctcctttgaagtcatcggccgcctggacaccatgatggccagcctgctgtgctgccacgaggcctgtggcaccagcgtcatcgtgggcgtgcccccagacagccagaacctgtccatgaaccccatgctgctgctgactggaagaacctggaagggggccatcctgggcggcttcaagagcaaagaatgtgtgcccaagctggtggccgacttcatggccaagaagttcagcctggatgccctgatcacccacgtgctgccctttgagaagatcaatgaaggatttgacctgctgcacagcggcaagagcatccgcaccatcctgatgttttag

SEQ ID NO: 14273 - DNA, 1128 bp, Artificial Sequence
  derived and/or modified sequence
atgagcaccgccggcaaggtgatcaagtgcaaggccgccgtgctgtgggaactcaaaaagcctttcagcatcgaggaagtcgaagtcgcgcctcccaaggctcatgaagtacgcataaagatggtagccgtgggaatctgtgggacagatgatcatgtagtgtcaggcacaatggttaccccactccccgtgatcctcggacatgaagccgccgggattgttgaatctgtcggtgagggagtgaccaccgtcaagccaggcgataaagtcatccctctggccattcctcaatgtggaaagtgtcggatatgcaagaatccagaaagcaactattgcttgaagaatgatgtgagcaacccgcagggcaccctgcaggacgggacctccaggtttacgtgtcgccgcaaacccattcaccacttccttgggatttccacgttttcccagtacacagtcgtggacgaaaatgctgttgccaagattgacgctgcctctccgcttgagaaagtttgcctgatcgggtgcggattctctacaggctatggtagcgccgttaacgttgcaaaggtgacccctggtagcacttgtgcggtgtttggactggggggggtcggattgtcagcaattatggggtgtaaagcagctggagcagcaaggataatcgctgtggatataaataaagacaaattcgccaaggctaaggaactcggagccactgaatgtatcaatccacaggattacaagaaaccaatccaggaagtactgaaagaaatgacagatgggggagtggattttagcttcgaggttattgggcgcctggatactatgatggcatcactcctgtgctgccatgaggcatgcggaacttcggtaatcgtaggtgttccccccgactcacaaaacctcagtatgaacccgatgctactgctcaccggacgcacttggaagggcgccattctaggcggtttcaaaagcaaggagtgtgttcccaagcttgttgccgattttatggctaaaaaattctctttggacgcgctgatcactcatgtgctgccttttgagaagattaatgaaggatttgacctgcttcattctggaaaatcgatacggaccatcttaatgttctag

SEQ ID NO: 14274 - DNA, 1128 bp, Artificial Sequence
  derived and/or modified sequence
atgagcaccgctgggaaggttattaagtgcaaggccgcagttctctgggaactgaaaaagccttttagcatcgaggaggtggaggtggctcctcctaaagcacacgaggtgcgcatcaaaatggttgccgtgggtatttgtggaaccgacgaccatgtcgtatcgggcactatggtgacacctctgccagtcattcttgggcatgaggccgcaggaattgtggagagtgtgggggaaggcgtgactactgtgaagcctggagataaggtgattcctctggccatccctcagtgtggaaagtgccgaatttgcaagaaccctgaatcaaactactgcttgaagaacgatgtgagcaatcctcagggcactctgcaggatgggacgtcacgctttacatgcaggagaaaacctatccatcacttcctgggtatctctaccttctcgcagtataccgtggtggacgagaatgccgtggcgaagatcgacgccgcttctcctcttgaaaaggtttgcctcatcggttgcggatttagcaccggctatgggtcagcagtcaatgtagccaaggtcacccctggatcgacatgtgcggtttttggcctaggtggggtcggcttgtccgcaatcatgggatgtaaagctgctggtgctgccagaattatcgcagtggacattaataaggataaattcgcgaaagctaaggaactgggcgctaccgagtgtatcaaccctcaggactataaaaagcctatccaagaggtccttaaagaaatgacggacgggggtgttgacttctcctttgaagttatcggtcgccttgacactatgatggcctcactcctgtgttgccacgaagcttgtggaacatccgtgattgtaggcgtcccgcctgactctcaaaacctgtccatgaatcctatgctactactgactggaaggacctggaaaggcgcaattttgggtggctttaagtcaaaagagtgcgttccgaagttagtggcagatttcatggccaagaagttctctcttgatgctttaattacacatgtgcttcccttcgagaagatcaatgaaggattcgacttgttgcacagcggcaaaagtatcagaaccattttaatgttctag

SEQ ID NO: 14275 - DNA, 1128 bp, Artificial Sequence
  derived and/or modified sequence
atgagcaccgccggcaaggtgatcaagtgcaaggccgccgtgctgtgggagctgaagaagcccttcagcatcgaggaggtggaggtggccccccccaaggcccacgaggtgagaatcaagatggtggccgtgggcatctgcggcaccgacgaccacgtggtgagcggcaccatggtgacccccctgcccgtgatcctgggccacgaggccgccggcatcgtggagagcgtgggcgagggcgtgaccaccgtgaagcccggcgacaaggtgatccccctggccatcccccagtgcggcaagtgcagaatctgcaagaaccccgagagcaactactgcctgaagaacgacgtgagcaacccccagggcaccctgcaggacggcaccagcagattcacctgcagaagaaagcccatccaccacttcctgggcatcagcaccttcagccagtacaccgtggtggacgagaacgccgtggccaagatcgacgccgccagccccctggagaaggtgtgcctgatcggctgcggcttcagcaccggctacggcagcgccgtgaacgtggccaaggtgacccccggcagcacctgcgccgtgttcggcctgggcggcgtgggcctgagcgccatcatgggctgcaaggccgccggcgccgccagaatcatcgccgtggacatcaacaaggacaagttcgccaaggccaaggagctgggcgccaccgagtgcatcaacccccaggactacaagaagcccatccaggaggtgctgaaggagatgaccgacggcggcgtggacttcagcttcgaggtgatcggcagactggacaccatgatggccagcctgctgtgctgccacgaggcctgcggcaccagcgtgatcgtgggcgtgccccccgacagccagaacctgagcatgaaccccatgctgctgctgaccggcagaacctggaagggcgccatcctgggcggcttcaagagcaaggagtgcgtgcccaagctggtggccgacttcatggccaagaagttcagcctggacgccctgatcacccacgtgctgcccttcgagaagatcaacgagggcttcgacctgctgcacagcggcaagagcatcagaaccatcctgatgttctag

SEQ ID NO: 14276 - DNA, 1499 bp, Artificial Sequence
  derived and/or modified sequence
aagcaaaaaaaataaataaatacctatgcaatacacctgctttatgcacttgagcagggaagaaatccacaaggactcaccagtctcctggtctgcagagaagacagaatcaacatgagcacagcaggaaaagtaatcaaatgcaaagcagctgtgctatgggagttaaagaaacccttttccattgaggaggtggaggttgcacctcctaaggcccatgaagttcgtattaagatggtggctgtaggaatctgtggcacagatgaccacgtggttagtggtaccatggtgaccccacttcctgtgattttaggccatgaggcagccggcatcgtggagagtgttggagaaggggtgactacagtcaaaccaggtgataaagtcatcccactcgctattcctcagtgtggaaaatgcagaatttgtaaaaacccggagagcaactactgcttgaaaaacgatgtaagcaatcctcaggggaccctgcaggatggcaccagcaggttcacctgcaggaggaagcccatccaccacttccttggcatcagcaccttctcacagtacacagtggtggatgaaaatgcagtagccaaaattgatgcagcctcgcctctagagaaagtctgtctcattggctgtggattttcaactggttatgggtctgcagtcaatgttgccaaggtcaccccaggctctacctgtgctgtgtttggcctgggaggggtcggcctatctgctattatgggctgtaaagcagctggggcagccagaatcattgcggtggacatcaacaaggacaaatttgcaaaggccaaagagttgggtgccactgaatgcatcaaccctcaagactacaagaaacccatccaggaggtgctaaaggaaatgactgatggaggtgtggatttttcatttgaagtcatcggtcggcttgacaccatgatggcttccctgttatgttgtcatgaggcatgtggcacaagtgtcatcgtaggggtacctcctgattcccaaaacctctcaatgaaccctatgctgctactgactggacgtacctggaagggagctattcttggtggctttaaaagtaaagaatgtgtcccaaaacttgtggctgattttatggctaagaagttttcattggatgcattaataacccatgttttaccttttgaaaaaataaatgaaggatttgacctgcttcactctgggaaaagtatccgtaccattctgatgttttgagacaatacagatgttttcccttgtggcagtcttcagcctcctctaccctacatgatctggagcaacagctgggaaatatcattaattctgctcatcacagattttatcaataaattacatttgggggctttccaaagaaatggaaattgatgtaaaattatttttcaagcaaatgtttaaaatccaaatgagaactaaataaagtgttgaacatcagctggggaattgaagccaataaaccttccttcttaaccatt

SEQ ID NO: 14277 - protein, 375 aa, Artificial Sequence
  derived and/or modified sequence
MSTAGKVIKCKAAVLWEVKKPFSIEDVEVAPPKAYEVRIKMVAVGICHTDDHVVSGNLVTPLPVILGHEAAGIVESVGEGVTTVKPGDKVIPLFTPQCGKCRVCKNPESNYCLKNDLGNPRGTLQDGTRRFTCRGKPIHHFLGTSTFSQYTVVDENAVAKIDAASPLEKVCLIGCGFSTGYGSAVNVAKVTPGSTCAVFGLGGVGLSAVMGCKAAGAARIIAVDINKDKFAKAKELGATECINPQDYKKPIQEVLKEMTDGGVDFSFEVIGRLDTMMASLLCCHEACGTSVIVGVPPASQNLSINPMLLLTGRTWKGAVYGGFKSKEGIPKLVADFMAKKFSLDALITHVLPFEKINEGFDLLHSGKSIRTVLTF

SEQ ID NO: 14278 - protein, 335 aa, Artificial Sequence
  derived and/or modified sequence
MVAVGICHTDDHVVSGNLVTPLPVILGHEAAGIVESVGEGVTTVKPGDKVIPLFTPQCGKCRVCKNPESNYCLKNDLGNPRGTLQDGTRRFTCRGKPIHHFLGTSTFSQYTVVDENAVAKIDAASPLEKVCLIGCGFSTGYGSAVNVAKVTPGSTCAVFGLGGVGLSAVMGCKAAGAARIIAVDINKDKFAKAKELGATECINPQDYKKPIQEVLKEMTDGGVDFSFEVIGRLDTMMASLLCCHEACGTSVIVGVPPASQNLSINPMLLLTGRTWKGAVYGGFKSKEGIPKLVADFMAKKFSLDALITHVLPFEKINEGFDLLHSGKSIRTVLTF

SEQ ID NO: 14279 - protein, 362 aa, Artificial Sequence
  derived and/or modified sequence
MSTAGKVIKCKAAVLWEVKKPFSIEDVEVAPPKAYEVRIKMVAVGICHTDDHVVSGNLVTPLPVILGHEAAGIVESVGEGVTTVKPGDKVIPLFTPQCGKCRVCKNPESNYCLKNDLGNPRGKPIHHFLGTSTFSQYTVVDENAVAKIDAASPLEKVCLIGCGFSTGYGSAVNVAKVTPGSTCAVFGLGGVGLSAVMGCKAAGAARIIAVDINKDKFAKAKELGATECINPQDYKKPIQEVLKEMTDGGVDFSFEVIGRLDTMMASLLCCHEACGTSVIVGVPPASQNLSINPMLLLTGRTWKGAVYGGFKSKEGIPKLVADFMAKKFSLDALITHVLPFEKINEGFDLLHSGKSIRTVLTF

SEQ ID NO: 14280 - DNA, 1128 bp, Artificial Sequence
  derived and/or modified sequence
atgtccacagctggtaaggtgattaaatgcaaagctgccgttttgtgggaagtgaaaaagccttttagcatcgaagacgtggaagtggctcccccgaaagcttacgaggtgaggattaaaatggtggcggtgggcatctgtcacacagatgaccacgtggttagcggtaacctcgttaccccactccccgtgattttgggccacgaggccgcaggcatagtcgaaagcgtgggcgagggcgtgaccacagtgaaacccggcgacaaggtgatcccactttttaccccccagtgcggaaaatgccgggtgtgtaagaatccggaaagtaactattgcttgaagaatgatctggggaaccctagagggacactgcaagatggaacgaggcgttttacatgtagaggtaagcctattcatcattttctggggactagcaccttttcgcaatatacagtggttgacgagaatgccgtggctaaaatagacgccgcatcccccctcgagaaagtgtgtctgataggttgcgggttctcaacagggtatggatctgccgtcaacgtggccaaggtcacccccgggagtacctgcgctgtatttggcctgggcggagtggggctgtctgcagttatgggctgtaaagctgctggtgcagcgagaatcatcgctgtcgacatcaataaagacaaattcgcaaaagccaaggagctgggagccactgaatgtatcaacccgcaagactataagaagccaattcaagaggtactgaaggagatgaccgatggtggggtggatttttcctttgaggtgattggtcgattggacacgatgatggcgtcattattatgttgtcatgaggcctgcggcacaagcgttatcgtcggagttccccctgcttcgcaaaatctttcaattaaccccatgctgcttttgaccgggcgtacgtggaagggcgccgtgtatgggggctttaagagcaaggaagggatcccgaagctggtagcagattttatggcaaagaagttctccctcgatgctctaattactcatgttctgcccttcgagaagattaatgagggctttgacctcttgcactccggaaagtctattagaaccgtgcttactttctag

SEQ ID NO: 14281 - DNA, 1089 bp, Artificial Sequence
  derived and/or modified sequence
atgtcgaccgccggcaaggtgatcaagtgtaaggctgccgtgctctgggaagttaagaagccattttcaattgaagacgtagaagtggctccgccgaaggcttacgaggtaaggatcaagatggtcgctgtagggatttgccacaccgacgaccacgtcgtgtccgggaacctggtgaccccactccctgtcatcctcggacacgaagctgccggcattgtggagagtgtcggtgaaggcgtcaccaccgttaaacctggcgacaaagtcataccactctttactcctcaatgcggcaagtgccgagtgtgcaaaaaccctgaaagtaactactgcttgaaaaatgacctgggaaatccgcgtggcaagcccatccatcacttcttggggacctcaacgttctctcagtatacagtagtcgacgaaaacgccgtggctaagatcgacgccgcctccccactggagaaagtgtgcctcattggttgcggcttttcaactggatacgggtccgccgtgaacgtcgccaaagttactcccggatccacttgtgcagtgttcggcctaggcggagttggcctgagcgccgtgatgggatgcaaagccgctggcgctgcgcgaatcatcgccgtcgatatcaataaagataaatttgctaaggctaaagagctgggtgctaccgagtgtattaacccccaggattacaagaagccgattcaagaggtgttgaaagaaatgacggatggtggagtggatttttctttcgaagtgattggacggctggacacaatgatggccagcctactatgctgtcatgaagcatgcgggaccagcgtaattgttggagtaccaccggcctcccagaacctgtccatcaacccaatgctgttgctgactggtagaacctggaagggagcagtttacggaggttttaaaagcaaagaggggatacctaagcttgttgcagattttatggctaagaagtttagcctcgatgctctgatcacccatgttctgccgttcgagaagatcaacgagggctttgacttgctccacagtggaaaatccatcaggaccgtcctcaccttctag

SEQ ID NO: 14282 - DNA, 1128 bp, Artificial Sequence
  derived and/or modified sequence
atgagcacagctgggaaggtgatcaagtgcaaggctgctgtgctgtgggaggtgaagaagcccttcagcattgaagatgtggaggtggccccacccaaggcctatgaggtgcgcatcaagatggtggccgtgggcatctgccacacagatgaccacgtggtgtctggcaacctggtgacccccctgcctgtgatcctgggccacgaggccgccggcatcgtggagagcgtgggggagggcgtgaccaccgtgaagccaggggacaaggtgatccccctcttcaccccccagtgtgggaagtgccgggtgtgcaagaaccctgagagcaactactgcctgaagaatgacctgggcaacccccggggcaccctgcaggacggcacccggcgcttcacctgccggggcaagcccatccaccacttcctgggcaccagcaccttcagccagtacacagtggtggatgaaaatgctgtggccaagattgatgctgccagccccctggagaaggtgtgcctgattggctgcggcttcagcacaggctacggcagcgctgtgaatgtggccaaggtgaccccaggcagcacctgtgctgtgtttggcctgggcggcgtgggcctgtctgctgtgatgggctgcaaggctgctggagctgcccgcatcatcgctgtggacatcaacaaggacaagtttgccaaggccaaggagctgggcgccacagagtgcatcaacccccaggactacaagaagcccatccaggaggtgctgaaggagatgacagatggcggcgtggacttctcctttgaagtcatcggccgcctggacaccatgatggccagcctgctgtgctgccacgaggcctgtggcaccagcgtcatcgtgggcgtgcccccagccagccagaacctgagcatcaaccccatgctgctgctgactggaagaacctggaagggagctgtgtatggaggcttcaagagcaaggagggcatccccaagctggtggccgacttcatggccaagaagttcagcctggatgccctgatcacccacgtgctgccctttgagaagatcaatgaaggatttgacctgctgcacagcggcaagagcatcagaacagtgctgaccttctag

SEQ ID NO: 14283 - DNA, 1089 bp, Artificial Sequence
  derived and/or modified sequence
atgagcacagctgggaaggtgatcaagtgcaaggctgctgtgctgtgggaggtgaagaagcccttcagcattgaagatgtggaggtggccccacccaaggcctatgaggtgcgcatcaagatggtggccgtgggcatctgccacacagatgaccacgtggtgtctggcaacctggtgacccccctgcctgtgatcctgggccacgaggccgccggcatcgtggagagcgtgggggagggcgtgaccaccgtgaagccaggggacaaggtgatccccctcttcaccccccagtgtgggaagtgccgggtgtgcaagaaccctgagagcaactactgcctgaagaatgacctgggcaacccccggggcaagcccatccaccacttcctgggcaccagcaccttcagccagtacacagtggtggatgaaaatgctgtggccaagattgatgctgccagccccctggagaaggtgtgcctgattggctgcggcttcagcacaggctacggcagcgctgtgaatgtggccaaggtgaccccaggcagcacctgtgctgtgtttggcctgggcggcgtgggcctgtctgctgtgatgggctgcaaggccgccggggccgcccgcatcatcgctgtggacatcaacaaggacaagtttgccaaggccaaggagctgggcgccacagagtgcatcaacccccaggactacaagaagcccatccaggaggtgctgaaggagatgacagatggaggagtggacttctcctttgaggtgattggccgcctggacaccatgatggccagcctgctgtgctgccacgaggcctgtggcacctctgtgattgtgggcgtgcccccagccagccagaacctgagcatcaaccccatgctgctgctgaccggccgcacctggaagggagctgtgtatggaggcttcaagagcaaggagggcatccccaagctggtggccgacttcatggccaagaagttcagcctggatgccctgatcacccacgtgctgccctttgagaagatcaatgaaggatttgacctgctgcacagcggcaagagcatcagaacagtgctgaccttctag

SEQ ID NO: 14284 - DNA, 4072 bp, Artificial Sequence
  derived and/or modified sequence
gcactcaagcagagaagaaatccacaaagactcacagtctgctggtgggcagagaagacagaaacgacatgagcacagcaggaaaagtaatcaaatgcaaagcagctgtgctatgggaggtaaagaaacccttttccattgaggatgtggaggttgcacctcctaaggcttatgaagttcgcattaagatggtggctgtaggaatctgtcacacagatgaccacgtggttagtggcaacctggtgaccccccttcctgtgattttaggccatgaggcagccggcatcgtggagagtgttggagaaggggtgactacagtcaaaccaggtgataaagtcatcccgctctttactcctcagtgtggaaaatgcagagtttgtaaaaacccggagagcaactactgcttgaaaaatgatctaggcaatcctcgggggaccctgcaggatggcaccaggaggttcacctgcagggggaagcccattcaccacttccttggcaccagcaccttctcccagtacacggtggtggatgagaatgcagtggccaaaattgatgcagcctcgcccctggagaaagtctgcctcattggctgtggattctcgactggttatgggtctgcagttaacgttgccaaggtcaccccaggctctacctgtgctgtgtttggcctgggaggggtcggcctatctgctgttatgggctgtaaagcagctggagcagccagaatcattgcggtggacatcaacaaggacaaatttgcaaaggccaaagagttgggtgccactgaatgcatcaaccctcaagactacaagaaacccattcaggaagtgctaaaggaaatgactgatggaggtgtggatttttcgtttgaagtcatcggtcggcttgacaccatgatggcttccctgttatgttgtcatgaggcatgtggcacaagcgtcatcgtaggggtacctcctgcttcccagaacctctcaataaaccctatgctgctactgactggacgcacctggaagggggctgtttatggtggctttaagagtaaagaaggtatcccaaaacttgtggctgattttatggctaagaagttttcactggatgcgttaataacccatgttttaccttttgaaaaaataaatgaaggatttgacctgcttcactctgggaaaagtatccgtaccgtcctgacgttttgaggcaatagagatgccttcccctgtagcagtcttcagcctcctctaccctacaagatctggagcaacagctaggaaatatcattaattcagctcttcagagatgttatcaataaattacacatgggggctttccaaagaaatggaaattgatgggaaattatttttcaggaaaatttaaaattcaagtgagaagtaaataaagtgttgaacatcagctggggaattgaagccaacaaaccttccttcttaaccattctactgtgtcacctttgccattgaggaaaaatattcctgtgacttcttgcatttttggtatcttcataatctttagtcatcgaatcccagtggaggggacccttttacttgccctgaacatacacatgctgggccattgtgattgaagtcttctaactctgtctcagttttcactgtcgacattttcctttttctaataaaaatgtaccaaatccctggggtaaaagctagggtaaggtaaaggatagactcacatttacaagtagtgaaggtccaagagttctaaatacaggaaatttcttaggaactcaaataaaatgccccacattttactacagtaaatggcagtgtttttatgacttttatactatttctttatggtcgatatacaattgattttttaaaataatagcagatttcttgcttcatatgacaaagcctcaattactaattgtaaaaactgaactattcccagaatcatgttcaaaaaatctgtaatttttgctgatgaaagtgcttcattgactaaacagtattagtttgtggctataaatgattatttagatgatgactgaaaatgtgtataaagtaattaaaagtaatatggtggctttaagtgtagagatgggatggcaaatgctgtgaatgcagaatgtaaaattggtaactaagaaatggcacaaacaccttaagcaatatattttcctagtagatatatatatacacatacatatatacacatatacaaatgtatatttttgcaaaattgttttcaatctagaacttttctattaactaccatgtcttaaaatcaagtctataatcctagcattagtttaatattttgaatatgtaaagacctgtgttaatgctttgttaatgcttttcccactctcatttgttaatgctttcccactctcaggggaaggatttgcattttgagctttatctctaaatgtgacatgcaaagattattcctggtaaaggaggtagctgtctccaaaaatgctattgttgcaatatctacattctatttcatattatgaaagaccttagacataaagtaaaatagtttatcatttactgtgtgatcttcagtaagtctctcaggctctctgagcttgttcatcctttgttttgaaaaaattactcaaccaatccattacagcttaaccaagattaaatgggatgatgttaatgaaagagcttcgccaattaagaagggccatgtaaatgtgggtaacctgattgttttgtcaaaaatgctaaagcggggtggggggtggcgcagtggcttatccctgtaatcccagcactttgggaggtcaagacgggtggatgacctgaggtcaggagtttgagaccagcctggtcaacatggtgaaaccccatctctactaaaaatacaaaaatttgccaggcatggtggcaggtggctgtaatcccagctactcaggaggctgaggcaagagaatcgctggagcctgggaggcggaggttgcagtgagcagaaatcttgccactgcacagcagcctaggcgacaagagcaaaactctgtcaaaagaaaagaaaagaaaatgctgaaggagttactcagggtcaagaaagttttcagaatgtccgtaagataacatcatcatgggacactacctgttgctgggtgctctgcggcttttacactgatgctgattgtgtgagatccagaaaaagaaaatggagttctacatgcccatctcacagcagggtcatcaaatcctgctagtgacacagaagctgacatccagctcccacccgccttcctcccaggttcggggagcaggtagagtgggagccattaggtgggctctgccagtgttgtcatagagtggcaagtcctccatgggatgggagtggcatgtgggagccttctgcatcatgcactatgaaaaaagaaaatttactatggggcaagtggttcatatagttaagtgattgtatatatatatatatatatatatatatatatatatatatatatatatacactatggggcaagtggttcatatagttaagtgattgtatatatatatatatatatatatgtattccagtgtagaaagtattggctgggtctgtaatcaagtattccacagaagtgccttcataggtgctgaaacaggattatgagagtgacagacacaggactgaagacagggagaaaatgtgcatggctgtgagaatatattgctttgattctttgacttctcatgatatatgaaaacaaataaagtgggggggggtgacttcaataatatcacgaacatatttaaaatgaaattctgagcatggagaaaaatttcaaattctggtataaacaaataatctaaaaatatagataaggaaaaaatgttttcatttttttggtcatattgatttgggtcatatatgattgaccaaaaaaaaagatatttctaaaatcctggtgctttttcatttaaaaatagacaaccaaagaggaaaatgaacaatgatggaaattcgtggaagaggaaactaaaatggcaaaatagcatattaaatggcactgagccttggtgtgatcaaaaaaaaaaataaagcaaaatgagatattactgctta

SEQ ID NO: 14285 - DNA, 4059 bp, Artificial Sequence
  derived and/or modified sequence
gcactcaagcagagaagaaatccacaaagactcacagtctgctggtgggcagagaagacagaaacgacatgagcacagcaggaaaagtaatcaaatgcaaagcagctgtgctatgggaggtaaagaaacccttttccattgaggatgtggaggttgcacctcctaaggcttatgaagttcgcattaagatggtggctgtaggaatctgtcacacagatgaccacgtggttagtggcaacctggtgaccccccttcctgtgattttaggccatgaggcagccggcatcgtggagagtgttggagaaggggtgactacagtcaaaccaggtgataaagtcatcccgctctttactcctcagtgtggaaaatgcagagtttgtaaaaacccggagagcaactactgcttgaaaaatgatctaggcaatcctcgggggaccctgcaggatggcaccaggaggttcacctgcagggggaagcccattcaccacttccttggcaccagcaccttctcccagtacacggtggtggatgagaatgcagtggccaaaattgatgcagcctcgcccctggagaaagtctgcctcattggctgtggattctcgactggttatgggtctgcagttaacgttgccaaggtcaccccaggctctacctgtgctgtgtttggcctgggaggggtcggcctatctgctgttatgggctgtaaagcagctggagcagccagaatcattgcggtggacatcaacaaggacaaatttgcaaaggccaaagagttgggtgccactgaatgcatcaaccctcaagactacaagaaacccattcaggaagtgctaaaggaaatgactgatggaggtgtggatttttcgtttgaagtcatcggtcggcttgacaccatgatggcttccctgttatgttgtcatgaggcatgtggcacaagcgtcatcgtaggggtacctcctgcttcccagaacctctcaataaaccctatgctgctactgactggacgcacctggaagggggctgtttatggtggctttaagagtaaagaaggtatcccaaaacttgtggctgattttatggctaagaagttttcactggatgcgttaataacccatgttttaccttttgaaaaaataaatgaaggatttgacctgcttcactctgggaaaagtatccgtaccgtcctgacgttttgaggcaatagagatgccttcccctgtagcagtcttcagcctcctctaccctacaagatctggagcaacagctaggaaatatcattaattcagctcttcagagatgttatcaataaattacacatgggggctttccaaagaaatggaaattgatgggaaattatttttcaggaaaatttaaaattcaagtgagaagtaaataaagtgttgaacatcagctggggaattgaagccaacaaaccttccttcttaaccattctactgtgtcacctttgccattgaggaaaaatattcctgtgacttcttgcatttttggtatcttcataatctttagtcatcgaatcccagtggaggggacccttttacttgccctgaacatacacatgctgggccattgtgattgaagtcttctaactctgtctcagttttcactgtcgacattttcctttttctaataaaaatgtaccaaatccctggggtaaaagctagggtaaggtaaaggatagactcacatttacaagtagtgaaggtccaagagttctaaatacaggaaatttcttaggaactcaaataaaatgccccacattttactacagtaaatggcagtgtttttatgacttttatactatttctttatggtcgatatacaattgattttttaaaataatagcagatttcttgcttcatatgacaaagcctcaattactaattgtaaaaactgaactattcccagaatcatgttcaaaaaatctgtaatttttgctgatgaaagtgcttcattgactaaacagtattagtttgtggctataaatgattatttagatgatgactgaaaatgtgtataaagtaattaaaagtaatatggtggctttaagtgtagagatgggatggcaaatgctgtgaatgcagaatgtaaaattggtaactaagaaatggcacaaacaccttaagcaatatattttcctagtagatatatatatacacatacatatatacacatatacaaatgtatatttttgcaaaattgttttcaatctagaacttttctattaactaccatgtcttaaaatcaagtctataatcctagcattagtttaatattttgaatatgtaaagacctgtgttaatgctttgttaatgcttttcccactctcatttgttaatgctttcccactctcaggggaaggatttgcattttgagctttatctctaaatgtgacatgcaaagattattcctggtaaaggaggtagctgtctccaaaaatgctattgttgcaatatctacattctatttcatattatgaaagaccttagacataaagtaaaatagtttatcatttactgtgtgatcttcagtaagtctctcaggctctctgagcttgttcatcctttgttttgaaaaaattactcaaccaatccattacagcttaaccaagattaaatgggatgatgttaatgaaagagcttcgccaattaagaagggccatgtaaatgtgggtaacctgattgttttgtcaaaaatgctaaagcggggtggggggtggcgcagtggcttatccctgtaatcccagcactttgggaggtcaagacgggtggatgacctgaggtcaggagtttgagaccagcctggtcaacatggtgaaaccccatctctactaaaaatacaaaaatttgccaggcatggtggcaggtggctgtaatcccagctactcaggaggctgaggcaagagaatcgctggagcctgggaggcggaggttgcagtgagcagaaatcttgccactgcacagcagcctaggcgacaagagcaaaactctgtcaaaagaaaagaaaagaaaatgctgaaggagttactcagggtcaagaaagttttcagaatgtccgtaagataacatcatcatgggacactacctgttgctgggtgctctgcggcttttacactgatgctgattgtgtgagatccagaaaaagaaaatggagttctacatgcccatctcacagcagggtcatcaaatcctgctagtgacacagaagctgacatccagctcccacccgccttcctcccaggttcggggagcaggtagagtgggagccattaggtgggctctgccagtgttgtcatagagtggcaagtcctccatgggatgggagtggcatgtgggagccttctgcatcatgcactatgaaaaaagaaaatttactatggggcaagtggttcatatagttaagtgattgtatatatatatatatatatatatatatatatatatatatatatatatacactatggggcaagtggttcatatagttaagtgattgtatatatatatatatatatatatgtattccagtgtagaaagtattggctgggtctgtaatcaagtattccacagaagtgccttcataggtgctgaaacaggattatgagagtgacagacacaggactgaagacagggagaaaatgtgcatggctgtgagaatatattgctttgattctttgacttctcatgatatatgaaaacaaataaagtgggggggggtgacttcaataatatcacgaacatatttaaaatgaaattctgagcatggagaaaaatttcaaattctggtataaacaaataatctaaaaatatagataaggaaaaaatgttttcatttttttggtcatattgatttgggtcatatatgattgaccaaaaaaaaagatatttctaaaatcctggtgctttttcatttaaaaatagacaaccaaagaggaaaatgaacaatgatggaaattcgtggaagaggaaactaaaatggcaaaatagcatattaaatggcactgagccttggtgtgatcaaaaaaaaaaataaagcaaaatgag

SEQ ID NO: 14286 - DNA, 1231 bp, Artificial Sequence
  derived and/or modified sequence
gcactcaagcagagaagaaatccacaaagactcacagtctgctggtgggcagagaagacagaaacgacatgagcacagcaggaaaagtaatcaaatgcaaagcagctgtgctatgggaggtaaagaaacccttttccattgaggatgtggaggttgcacctcctaaggcttatgaagttcgcattaagatggtggctgtaggaatctgtcacacagatgaccacgtggttagtggcaacctggtgaccccccttcctgtgattttaggccatgaggcagccggcatcgtggagagtgttggagaaggggtgactacagtcaaaccaggtgataaagtcatcccgctctttactcctcagtgtggaaaatgcagagtttgtaaaaacccggagagcaactactgcttgaaaaatgatctaggcaatcctcgggggaagcccattcaccacttccttggcaccagcaccttctcccagtacacggtggtggatgagaatgcagtggccaaaattgatgcagcctcgcccctggagaaagtctgcctcattggctgtggattctcgactggttatgggtctgcagttaacgttgccaaggtcaccccaggctctacctgtgctgtgtttggcctgggaggggtcggcctatctgctgttatgggctgtaaagcagctggagcagccagaatcattgcggtggacatcaacaaggacaaatttgcaaaggccaaagagttgggtgccactgaatgcatcaaccctcaagactacaagaaacccattcaggaagtgctaaaggaaatgactgatggaggtgtggatttttcgtttgaagtcatcggtcggcttgacaccatgatggcttccctgttatgttgtcatgaggcatgtggcacaagcgtcatcgtaggggtacctcctgcttcccagaacctctcaataaaccctatgctgctactgactggacgcacctggaagggggctgtttatggtggctttaagagtaaagaaggtatcccaaaacttgtggctgattttatggctaagaagttttcactggatgcgttaataacccatgttttaccttttgaaaaaataaatgaaggatttgacctgcttcactctgggaaaagtatccgtaccgtcctgacgttttgaggcaatagagatgccttcccctgtagcagtcttcagcctcctctaccctacaagatctggagcaacagctagga

SEQ ID NO: 14287 - DNA, 1128 bp, Artificial Sequence
  derived and/or modified sequence
atgagcaccgccggcaaggtgatcaagtgcaaggccgccgtgctgtgggaggttaagaaacccttttcaatcgaggatgttgaagtggctccacccaaggcttacgaggtaagaatcaaaatggtggctgtcgggatttgccatacggacgatcatgttgtaagtggtaacctggtaactccactcccagtgatcctgggacacgaggcagcaggaattgtcgagagtgttggtgaaggcgtaactaccgtgaagccaggagataaggtcatccctctttttacacctcagtgcggaaaatgtcgcgtttgcaagaatccggaatccaactactgccttaaaaacgatctgggtaatcctcgcggcactctacaagatggtacccgacgctttacctgccgcgggaagcctatccatcactttcttggtacgtccaccttctcccagtacaccgtggtcgatgagaatgcagtggccaagattgacgctgcatccccgttagagaaagtgtgtttgattggctgtgggttcagcaccggctacggctctgctgtgaacgtggccaaggttacgcctggatccacgtgcgccgttttcggactggggggggtggggctgagcgccgtcatgggatgtaaggccgccggtgcagcaagaatcatcgccgtcgatattaataaagacaagttcgccaaggccaaggagcttggcgctaccgaatgcattaacccacaggattataagaagcctattcaggaagttctcaaagagatgaccgacgggggggtcgatttctcatttgaggtgatcgggagactagacaccatgatggcaagcctgctgtgctgtcatgaggcctgcgggacgtctgtgattgtaggggttccgcccgcgagtcaaaatctttcgatcaaccccatgctgctcttgactggaagaacatggaaaggtgcagtgtatggggggttcaaaagcaaggagggcataccaaagctggtcgccgatttcatggccaaaaagttctccctggatgccctgatcacccacgtcctgcccttcgaaaagattaatgagggttttgatctcctgcacagtgggaagagcattcgaacagttttaaccttctag

SEQ ID NO: 14288 - DNA, 1089 bp, Artificial Sequence
  derived and/or modified sequence
atgagcaccgccggcaaggtgatcaagtgcaaggccgccgtgctgtgggaggtaaagaagcctttttccattgaagacgtggaggtggcccccccaaaagcttacgaggtccgaatcaagatggtggcagtcggaatctgtcatacagatgaccacgtggtgagcggaaatctggtcactccgctgcctgttattctaggacacgaagccgccggaattgttgaatctgtgggtgagggtgtgaccaccgtgaaaccgggagacaaagtgatcccactgttcactccccagtgcggtaaatgccgcgtgtgcaaaaatcctgaatccaattactgccttaaaaatgatttaggaaaccctagaggaaagccaatacaccattttcttggtactagtacgttctctcagtataccgtcgtggatgaaaacgctgttgctaagatcgacgcggcttcccctctggagaaggtctgtctgattggctgcgggttctccaccggttatggcagtgccgttaatgtcgccaaagtgacacctggatctacctgcgctgtcttcggactggggggggtaggcctgtctgcagtaatgggatgcaaggccgcgggagccgctcgcattatcgcagtggatattaataaagataagttcgccaaggccaaggagctcggcgccaccgagtgcatcaatccacaggattataaaaaaccaatccaggaagtgttaaaagaaatgacagacggcggagtagacttttccttcgaagtgattggtagacttgacacaatgatggccagcctgctttgttgtcatgaggcttgtgggacaagcgttatcgtgggagtgcctcccgcatcccagaatttgtcaatcaaccccatgctcctcctgacaggtcgcacatggaagggcgcagtttacggggggttcaagtcgaaagagggaattcccaagctggtggcagacttcatggctaagaagtttagcctggatgccttgattacgcatgtgcttcccttcgagaaaattaatgaaggatttgatttgctccattcaggtaagagcattcggaccgtgctaacattctag

SEQ ID NO: 14289 - DNA, 1128 bp, Artificial Sequence
  derived and/or modified sequence
atgagtacagcaggcaaagtgattaaatgtaaagccgctgttctgtgggaagtaaaaaagcccttcagcattgaggatgtcgaagttgcccctccgaaggcttacgaagtgcgtataaaaatggtggcggtgggcatctgccataccgacgaccatgtagtgtccggaaacctcgtgacacccctgcctgtgattctgggccatgaagccgcaggaattgtcgagtccgtaggtgagggagtgactaccgtaaagcccggtgataaggttattccgctctttacaccgcagtgcgggaaatgtagggtgtgtaagaacccagaatccaactattgccttaaaaacgacctgggcaatcctcgcggtacattacaagatggtaccagacggttcacttgcaggggcaaaccaatccaccattttctgggcacctcaacctttagccagtacacagtcgtggacgagaacgccgtagctaagatcgatgctgctagcccgctggagaaagtctgtcttattggctgcggcttctccactggctacggatcagcagtcaatgtggctaaggtcacccccggaagtacatgcgcagttttcgggttaggtggtgtcggcctgtctgccgtgatgggctgtaaggctgctggggcagcgcgaatcatcgcagtggacatcaacaaagataagttcgccaaggcaaaggagctgggtgccaccgagtgcattaatccccaagattataaaaaacctatacaggaagtgctgaaggaaatgactgacggtggtgtggacttctcattcgaggtcatcgggagattggacaccatgatggcttcgctgttgtgctgccacgaggcatgcgggaccagcgtaatcgtcggggttccacccgcttcacagaatctgtcgattaatccaatgcttctcttgactggcagaacctggaagggcgctgtgtacgggggattcaagtccaaagagggaatacctaagctggtggctgattttatggctaagaagttttctctggacgctctgatcacccacgtgttgccatttgagaagattaatgaggggttcgatctgctccattctgggaagtcaattagaacggtgctcactttttag

SEQ ID NO: 14290 - DNA, 1089 bp, Artificial Sequence
  derived and/or modified sequence
atgagcactgctggaaaggtcatcaaatgcaaagccgctgtcctgtgggaagtgaaaaagcccttctctattgaggacgtcgaagtggcaccccctaaggcctacgaagttcgaattaagatggtcgctgtgggaatctgtcacacggacgatcatgttgtgtcagggaatctggttactccactgcccgttattcttggccatgaggccgctggcattgttgagagcgtcggagaaggcgtgacgactgtgaaacctggggataaagtcattcccctgttcactcctcagtgcggtaagtgtcgggtttgcaagaacccagaatcaaactactgcctgaagaacgatctcggcaatcccagaggaaagccgattcatcattttcttggcacatcgactttctcacaatatacagtggtggacgagaacgcagtggccaagattgacgccgcatctcctctagagaaagtgtgcctaatcggatgtgggttcagcacaggttatggatccgccgtgaatgttgccaaagtgacacctggcagtacttgcgcagtttttgggttaggcggagtgggtcttagcgcagtgatgggttgtaaagctgcaggagctgcgaggatcattgctgtggatataaataaggacaagttcgcgaaagctaaggagctgggggctacagaatgtattaacccacaagactataaaaaacccattcaggaagtactgaaggagatgacagacggaggggtggattttagctttgaggtgatagggaggctggacactatgatggcatctctactttgttgccatgaggcatgtgggacctctgttatcgttggcgtgcccccagcctctcagaacctgagcatcaatcctatgctgttgctgacaggtaggacctggaaaggagcggtgtatgggggttttaagagtaaggagggcatccccaaacttgttgcagatttcatggcaaaaaagttttcacttgacgcactgattacgcacgtactcccgtttgaaaagatcaatgaagggttcgacctgctgcattctggcaaatctattaggacggtcctgaccttctag

SEQ ID NO: 14291 - DNA, 1128 bp, Artificial Sequence
  derived and/or modified sequence
atgagcaccgccggcaaggtgatcaagtgcaaggccgccgtgctgtgggaggtgaagaagcccttcagcatcgaggacgtggaggtggccccccccaaggcctacgaggtgagaatcaagatggtggccgtgggcatctgccacaccgacgaccacgtggtgagcggcaacctggtgacccccctgcccgtgatcctgggccacgaggccgccggcatcgtggagagcgtgggcgagggcgtgaccaccgtgaagcccggcgacaaggtgatccccctgttcaccccccagtgcggcaagtgcagagtgtgcaagaaccccgagagcaactactgcctgaagaacgacctgggcaaccccagaggcaccctgcaggacggcaccagaagattcacctgcagaggcaagcccatccaccacttcctgggcaccagcaccttcagccagtacaccgtggtggacgagaacgccgtggccaagatcgacgccgccagccccctggagaaggtgtgcctgatcggctgcggcttcagcaccggctacggcagcgccgtgaacgtggccaaggtgacccccggcagcacctgcgccgtgttcggcctgggcggcgtgggcctgagcgccgtgatgggctgcaaggccgccggcgccgccagaatcatcgccgtggacatcaacaaggacaagttcgccaaggccaaggagctgggcgccaccgagtgcatcaacccccaggactacaagaagcccatccaggaggtgctgaaggagatgaccgacggcggcgtggacttcagcttcgaggtgatcggcagactggacaccatgatggccagcctgctgtgctgccacgaggcctgcggcaccagcgtgatcgtgggcgtgccccccgccagccagaacctgagcatcaaccccatgctgctgctgaccggcagaacctggaagggcgccgtgtacggcggcttcaagagcaaggagggcatccccaagctggtggccgacttcatggccaagaagttcagcctggacgccctgatcacccacgtgctgcccttcgagaagatcaacgagggcttcgacctgctgcacagcggcaagagcatcagaaccgtgctgaccttctag

SEQ ID NO: 14292 - DNA, 1089 bp, Artificial Sequence
  derived and/or modified sequence
atgagcaccgccggcaaggtgatcaagtgcaaggccgccgtgctgtgggaggtgaagaagcccttcagcatcgaggacgtggaggtggccccccccaaggcctacgaggtgagaatcaagatggtggccgtgggcatctgccacaccgacgaccacgtggtgagcggcaacctggtgacccccctgcccgtgatcctgggccacgaggccgccggcatcgtggagagcgtgggcgagggcgtgaccaccgtgaagcccggcgacaaggtgatccccctgttcaccccccagtgcggcaagtgcagagtgtgcaagaaccccgagagcaactactgcctgaagaacgacctgggcaaccccagaggcaagcccatccaccacttcctgggcaccagcaccttcagccagtacaccgtggtggacgagaacgccgtggccaagatcgacgccgccagccccctggagaaggtgtgcctgatcggctgcggcttcagcaccggctacggcagcgccgtgaacgtggccaaggtgacccccggcagcacctgcgccgtgttcggcctgggcggcgtgggcctgagcgccgtgatgggctgcaaggccgccggcgccgccagaatcatcgccgtggacatcaacaaggacaagttcgccaaggccaaggagctgggcgccaccgagtgcatcaacccccaggactacaagaagcccatccaggaggtgctgaaggagatgaccgacggcggcgtggacttcagcttcgaggtgatcggcagactggacaccatgatggccagcctgctgtgctgccacgaggcctgcggcaccagcgtgatcgtgggcgtgccccccgccagccagaacctgagcatcaaccccatgctgctgctgaccggcagaacctggaagggcgccgtgtacggcggcttcaagagcaaggagggcatccccaagctggtggccgacttcatggccaagaagttcagcctggacgccctgatcacccacgtgctgcccttcgagaagatcaacgagggcttcgacctgctgcacagcggcaagagcatcagaaccgtgctgaccttctag

SEQ ID NO: 14293 - protein, 380 aa, Artificial Sequence
  derived and/or modified sequence
MGTKGKVIKCKAAIAWEAGKPLCIEEVEVAPPKAHEVRIQIIATSLCHTDATVIDSKFEGLAFPVIVGHEAAGIVESIGPGVTNVKPGDKVIPLYAPLCRKCKFCLSPLTNLCGKISNLKSPASDQQLMEDKTSRFTCKGKPVYHFFGTSTFSQYTVVSDINLAKIDDDANLERVCLLGCGFSTGYGAAINNAKVTPGSTCAVFGLGGVGLSAVMGCKAAGASRIIGIDINSEKFVKAKALGATDCLNPRDLHKPIQEVIIELTKGGVDFALDCAGGSETMKAALDCTTAGWGSCTFIGVAAGSKGLTIFPEELIIGRTINGTFFGGWKSVDSIPKLVTDYKNKKFNLDALVTHTLPFDKISEAFDLMNQGKSVRTILIF

SEQ ID NO: 14294 - DNA, 1143 bp, Artificial Sequence
  derived and/or modified sequence
atggggaccaagggaaaggtcatcaagtgtaaggcagctatcgcttgggaggccggcaagcctttatgcatcgaggaggtggaagtcgcaccgcctaaggcccatgaagtgcgtatccaaatcatcgctacgagtctttgccacaccgacgctacagtgatagattccaagttcgagggcctggctttccccgtcattgtggggcatgaagccgcagggatagtagaaagtattggaccaggggtaactaatgttaagccgggggacaaggtgatcccgctgtacgcccctctgtgtagaaaatgtaaattctgtctttctcccttgaccaacctttgtggaaaaatttccaacctgaaaagccccgcttccgatcagcagttgatggaggataaaaccagccggtttacgtgtaaaggtaaacctgtgtatcatttctttggcactagcacgttttcccagtataccgtggtttcggatatcaaccttgccaagatcgacgatgatgctaatctggaaagagtgtgcctcctgggctgtgggttttccaccgggtatggcgccgctattaacaatgctaaagttactcccggatcaacgtgcgctgtttttggccttggcggagtgggcctctctgcggtcatggggtgcaaagcggcaggcgcctctaggatcatcggaattgacatcaatagtgagaagtttgtgaaggccaaagcgctcggagcaaccgattgtctgaaccctcgtgatctccataaaccaatccaggaggtcattattgagctgacgaagggaggggtcgactttgccttagactgcgctggaggatccgagaccatgaaggcggccctggattgcacaacagccgggtgggggagctgcaccttcataggcgtcgccgcaggctccaaggggctgacaatttttcctgaagaacttataatcgggcgaaccattaatggtaccttcttcggtggctggaagtctgtggatagtatacccaagctcgtgactgattacaagaataagaaattcaacctcgatgcgttggtgacacacaccctgccatttgataagatcagcgaagcctttgacctcatgaaccaggggaagagtgtccggacaattctgatcttctag

SEQ ID NO: 14295 - DNA, 1143 bp, Artificial Sequence
  derived and/or modified sequence
atgggcaccaagggcaaggtgatcaagtgcaaggccgccatcgcctgggaggccggcaagcccctgtgcatcgaggaggtggaggtggccccacccaaggcccacgaggtgcgcatccagatcatcgccaccagcctgtgccacacagatgccaccgtcatcgacagcaagtttgagggcctggccttccctgtgattgtgggccatgaagctgctggcatcgtggagagcatcggccctggggtgaccaacgtgaagccaggggacaaggtgatccccctgtatgcccccctgtgcaggaagtgcaagttctgcctgagccccctgaccaacctgtgtgggaagatcagcaacctgaagagccctgccagtgaccagcagctgatggaggacaagaccagccgcttcacctgcaagggcaagcctgtgtaccacttcttcggcaccagcaccttcagccagtacacagtggtgtctgacatcaacctggccaagattgatgatgatgccaacctggagcgggtgtgcctgctgggctgcggcttcagcacaggctacggggccgccatcaacaatgccaaggtgaccccaggcagcacctgtgctgtgtttggcctgggcggcgtgggcctgtctgctgtgatgggctgcaaggccgccggggccagccgcatcatcggcatcgacatcaacagcgagaagtttgtgaaggccaaggccctgggcgccacagactgcctgaacccccgggacctgcacaagcccatccaggaggtgatcatcgagctgaccaagggcggcgtggactttgccctggactgtgccggcggcagcgagaccatgaaggccgccctggactgcaccacagctggctggggcagctgcaccttcatcggcgtggccgccggcagcaagggcctgaccatcttccctgaggagctgatcatcggccgcaccatcaatggcaccttctttggaggctggaagtctgtggacagcatccccaagctggtgacagactacaagaacaagaagttcaacctggatgccctggtgacccacaccctgccctttgacaagatcagcgaggcctttgacctgatgaaccagggcaagtctgtgaggaccatcctgatcttctag

SEQ ID NO: 14296 - DNA, 1993 bp, Artificial Sequence
  derived and/or modified sequence
acggaactccctgggtaggagtttgaagctttcttaactcagaaagaaacttccaacacagtttcccaaagaaaaatgggcaccaagggcaaagttattaaatgcaaagcagccatcgcctgggaagcaggcaagcccctttgcattgaagaggttgaagtagctccccccaaggctcatgaagttcgcattcagatcattgctacctctctgtgccatactgatgccactgttatcgattctaaatttgagggcctagctttcccagtgatcgttggccatgaggctgcaggtattgtggaaagtattgggccaggagtgaccaacgtcaaaccaggtgacaaagtaattccactttatgcacctctatgtagaaaatgcaagttttgtctgagtccactcacaaatttgtgtgggaaaatcagtaatctcaaaagtcctgctagtgatcaacaactaatggaagacaaaaccagcaggtttacctgcaaaggaaaaccagtttaccatttctttggaaccagtacattctctcagtacactgtggtgtcagatatcaatcttgccaaaatagatgatgatgcaaatttagagagagtttgtctgcttggatgtgggttttcaactggctatggggctgcaatcaacaatgccaaggtcacccctggttcgacttgtgctgtctttggcctaggaggtgtgggtctttctgctgtaatgggttgtaaagcagcaggagcttccagaatcataggtattgacatcaacagtgagaagtttgtgaaggctaaagccctgggagccactgactgcctcaatcctagagacttacataaaccgatccaggaagttatcattgaattgaccaagggaggtgtggattttgcccttgactgtgcaggtggatctgaaaccatgaaagcagccctggactgtacaaccgcaggctggggatcatgtactttcattggagtagctgctggtagcaaaggattgactatttttccagaggagctaataatcggccgtactataaatggaacattctttggtggttggaaaagtgtagattctatcccaaagctggtcactgactataagaataagaaattcaatctggatgcactggtgacccataccctgccttttgacaaaatcagtgaggcatttgacctaatgaaccaaggaaaaagcgtccgaacaatcctcatcttttgaagatgccaggagcaattcagaatactatctgattgaatgtgaacctgcctggttaatttattacctgatttgatgaaccaaggaaagccatgagtttaaacaaatatttacatttaatatgggaacataaaagagctttaaatattatagactttgtacctgttatatatatgaatattccctatgttaaataataataataactagtgtttatgaatagaatcatatcatctttagaaattgtttaaaattagttctgggaagttgaaagtggggaatgaagagataataaataaaactagattggccatatgtttataatttttttagattgggtaatgaatacatggagtttcattatacttttctctccacttttgtctatgttgaaaattttctgggagctaaatgatgagaacacatggacacatgatggggaacaacacacactggggcctgttgagggcagggagtcggcagagagagagcatcaggaagaatagctaatggatgctgggcttcatacctgggtgatgagatgatctgtgcagcaaagcaccatggtacatgtttacctatgtaacaaacctgcacatcctgcacatgtaccctggaacttaataaaagttggaaatttttaaaaagaatgaataagacctggtatttgatagcacaacagggagactatagtcaacagcaatttaattgtatattttaatatgactaaaagagtataatggattgtttgtaacacaaataaatgcttgaggagatg

SEQ ID NO: 14297 - DNA, 1143 bp, Artificial Sequence
  derived and/or modified sequence
atgggcaccaagggcaaggtgatcaagtgcaaggccgccatcgcctgggaagccggcaagccactgtgtatcgaagaggtggaagtggcccccccaaaggctcacgaggtgcgtattcagatcattgccacctcactgtgtcacaccgacgctactgtaattgattccaagttcgaaggcttggcattccctgttatcgtaggacacgaggccgcagggatagttgagtcaattggaccaggagtcactaatgtgaagccaggagataaggtcattcccctgtatgcacccctgtgtcgtaagtgtaaattttgtctgtcaccgctaactaacctttgcgggaagatcagcaacctaaagagccccgcttccgatcagcagctgatggaggacaagaccagtaggttcacatgtaagggcaaaccagtgtaccactttttcggcacctcaacattctcacagtacacagttgtatccgatattaacctggcaaagattgacgatgatgcaaatcttgagagggtgtgcctcctaggctgcggtttctctacgggttacggggccgctattaacaacgccaaagtgaccccagggagtacctgcgccgtttttggcctgggcggtgtgggcctttcggccgtgatgggttgcaaggccgccggggcaagcaggattatcggcatagatatcaatagcgaaaaattcgtgaaggctaaggcactgggcgctaccgactgcttaaacccacgagatctgcacaagccaatccaggaggtcattatagagctgaccaaagggggcgtggatttcgctcttgactgcgcaggcggaagtgagaccatgaaggcagctctcgactgtactacggcaggctggggatcttgtacctttattggcgtggccgccggctctaaggggttaaccatcttccccgaggagctgattatcggaagaaccatcaatggaaccttttttggcggctggaagagtgtggatagcattcccaagcttgtcacagattataagaacaagaaatttaacctggatgccttagtcacccacaccttaccctttgataagatcagtgaagcttttgacctcatgaatcaggggaagtcagtcagaaccatactgattttttag

SEQ ID NO: 14298 - DNA, 1143 bp, Artificial Sequence
  derived and/or modified sequence
atgggcaccaaaggcaaggtcattaagtgcaaggctgccatcgcctgggaagccggaaagccactgtgcatcgaagaggtggaggtggcaccacctaaggcccatgaagtccggattcagatcattgctaccagcctatgtcacacagacgcgactgtcattgactccaaattcgagggtcttgctttccctgtgatcgtgggccacgaggccgctggtattgtcgagagcattggcccaggggtcacgaacgtgaaaccaggagataaggtgattccattatacgcccctctgtgcagaaaatgtaagttctgtctgagccctctcactaacctctgcggcaagattagcaacttaaagtccccggcatctgatcagcagctcatggaagataaaacatccaggttcacatgtaagggtaaacctgtgtaccacttttttggtacaagcactttcagccagtatactgtggtaagtgatattaacctggcaaaaattgatgatgatgcaaatttggagagggtctgcctgctagggtgtggcttttccaccggatatggtgcagccatcaataacgccaaagtcacccccggatcaacttgtgctgtctttgggctcgggggtgtgggcctcagtgcagttatgggctgtaaagcagccggtgcctctcgaatcattgggatagacattaattccgagaagtttgtaaaggctaaagccctgggagctactgattgcctcaatccaagggaccttcacaaaccaattcaggaggtcatcatcgagctcaccaaggggggagtcgattttgccctggattgcgcaggcggatcggaaactatgaaagcggctcttgattgcacgactgccggatggggctcttgtacattcattggggtggccgctgggtccaagggcctgacaattttccccgaagaattgattataggcagaacaatcaatggcacattcttcggcggttggaaaagcgtagactcaattcccaagctagtcaccgactacaagaataagaagtttaacctcgacgcactggtgactcacactttgccatttgacaagatctccgaagccttcgacctgatgaatcaaggtaagtccgttcgcacaattctaattttctag

SEQ ID NO: 14299 - DNA, 1143 bp, Artificial Sequence
  derived and/or modified sequence
atgggcaccaagggcaaggtgatcaagtgcaaggccgccatcgcctgggaggccggcaagcccctgtgcatcgaggaggtggaggtggccccccccaaggcccacgaggtgagaatccagatcatcgccaccagcctgtgccacaccgacgccaccgtgatcgacagcaagttcgagggcctggccttccccgtgatcgtgggccacgaggccgccggcatcgtggagagcatcggccccggcgtgaccaacgtgaagcccggcgacaaggtgatccccctgtacgcccccctgtgcagaaagtgcaagttctgcctgagccccctgaccaacctgtgcggcaagatcagcaacctgaagagccccgccagcgaccagcagctgatggaggacaagaccagcagattcacctgcaagggcaagcccgtgtaccacttcttcggcaccagcaccttcagccagtacaccgtggtgagcgacatcaacctggccaagatcgacgacgacgccaacctggagagagtgtgcctgctgggctgcggcttcagcaccggctacggcgccgccatcaacaacgccaaggtgacccccggcagcacctgcgccgtgttcggcctgggcggcgtgggcctgagcgccgtgatgggctgcaaggccgccggcgccagcagaatcatcggcatcgacatcaacagcgagaagttcgtgaaggccaaggccctgggcgccaccgactgcctgaaccccagagacctgcacaagcccatccaggaggtgatcatcgagctgaccaagggcggcgtggacttcgccctggactgcgccggcggcagcgagaccatgaaggccgccctggactgcaccaccgccggctggggcagctgcaccttcatcggcgtggccgccggcagcaagggcctgaccatcttccccgaggagctgatcatcggcagaaccatcaacggcaccttcttcggcggctggaagagcgtggacagcatccccaagctggtgaccgactacaagaacaagaagttcaacctggacgccctggtgacccacaccctgcccttcgacaagatcagcgaggccttcgacctgatgaaccagggcaagagcgtgagaaccatcctgatcttctag

SEQ ID NO: 14300 - protein, 374 aa, Artificial Sequence
  derived and/or modified sequence
MANEVIKCKAAVAWEAGKPLSIEEIEVAPPKAHEVRIKIIATAVCHTDAYTLSGADPEGCFPVILGHEGAGIVESVGEGVTKLKAGDTVIPLYIPQCGECKFCLNPKTNLCQKIRVTQGKGLMPDGTSRFTCKGKTILHYMGTSTFSEYTVVADISVAKIDPLAPLDKVCLLGCGISTGYGAAVNTAKLEPGSVCAVFGLGGVGLAVIMGCKVAGASRIIGVDINKDKFARAKEFGATECINPQDFSKPIQEVLIEMTDGGVDYSFECIGNVKVMRAALEACHKGWGVSVVVGVAASGEEIATRPFQLVTGRTWKGTAFGGWKSVESVPKLVSEYMSKKIKVDEFVTHNLSFDEINKAFELMHSGKSIRTVVKI

SEQ ID NO: 14301 - DNA, 1125 bp, Artificial Sequence
  derived and/or modified sequence
atggcaaacgaagtgattaagtgcaaggccgcagtggcctgggaagctggtaagcctttatctatcgaagaaattgaggtggcaccaccgaaggcccacgaggtgcgcattaagatcattgcgaccgcagtatgtcatactgacgcctacaccctctccggagccgaccctgaaggctgctttcctgttatcttgggtcacgaaggagccgggatcgtggagagcgtcggcgaaggagtcaccaagcttaaagcaggggatacagtaatccccctctatatcccccagtgcggtgagtgtaaattctgcttaaatccgaaaaccaacttgtgccagaaaatccgagttacccagggtaaagggctcatgcccgacgggacgtctcggttcacctgtaaggggaagacgatcctccactacatggggaccagtacattctccgagtataccgtggtcgcggacatcagcgtagccaagattgacccattagcgcctctggataaggtctgtttgcttggttgcggcatctctaccggctacggggctgcagtgaatacagccaaactagaaccgggctcagtctgcgctgtcttcggcctgggtggagtcggcctggcggttatcatgggatgcaaggtggccggagcctcgcgaatcatcggagttgatattaacaaagataagtttgctcgggctaaggaatttggggctacggagtgcattaatccgcaggacttttcaaaacccatccaggaggtgttgattgagatgaccgacggtggggtggactactcattcgaatgtatcggtaacgtcaaagtcatgagggccgctctggaagcctgtcataaaggttggggcgtaagcgtagtagtgggtgtggcagcctctggcgaagagatcgcgactaggccgtttcagctcgtcacgggacggacctggaagggcacagcctttggaggctggaaatcagttgagtccgtccccaaactggtctccgaatatatgtccaaaaaaatcaaagtggacgaatttgtgactcataatctctcctttgacgagataaacaaggcattcgaactgatgcattctgggaaatcaatccgcactgttgtgaagatctag

SEQ ID NO: 14302 - DNA, 1125 bp, Artificial Sequence
  derived and/or modified sequence
atggccaatgaagtcatcaagtgcaaggctgctgtggcctgggaggccggcaagcccctgagcattgaggagattgaggtggccccacccaaggcccacgaggtgcgcatcaagatcatcgccacagctgtgtgccacacagatgcctacaccctgtctggagctgaccctgagggctgcttccctgtgatcctgggccatgaaggagctggcatcgtggagagcgtgggggagggcgtgaccaagctgaaggccggggacaccgtcatccccctgtacatcccccagtgtggggagtgcaagttctgcctgaaccccaagaccaacctgtgccagaagatccgggtgacccagggcaagggcctgatgccagatggcaccagccgcttcacctgcaagggcaagaccatcctgcactacatgggcaccagcaccttcagcgagtacacagtggtggccgacatctctgtggccaagattgaccccctggcccccctggacaaggtgtgcctgctgggctgcggcatcagcacaggctacggggctgctgtgaacacagccaagctggagcccggctctgtgtgtgctgtgtttggcctgggcggcgtgggcctggccgtcatcatgggctgcaaggtggccggggccagccgcatcatcggcgtggacatcaacaaggacaagtttgcccgggccaaggagtttggagccacagagtgcatcaacccccaggacttcagcaagcccatccaggaggtgctgattgagatgacagatggaggagtggactacagctttgaatgtattggaaatgtgaaggtgatgagagctgccctggaggcctgccacaagggctggggcgtgtctgtggtggtgggcgtggccgccagcggggaggagatcgccacccggcccttccagctggtgacaggccgcacctggaagggcacagcctttggaggctggaagtctgtggagagcgtgcccaagctggtgtctgagtacatgagcaagaagatcaaggtggatgaatttgtgacccacaacctgagctttgatgagatcaacaaggcctttgagctgatgcacagcggcaagagcatcagaacagtggtgaagatctag

SEQ ID NO: 14303 - DNA, 2612 bp, Artificial Sequence
  derived and/or modified sequence
gcgcggcccaccccggatgtcagccccccgcgccgaccagaatccgtgaacatggcgaacgaggttatcaagtgcaaggctgcagttgcttgggaggctggaaagcctctctccatagaggagatagaggtggcacccccaaaggctcatgaagttcgaatcaagatcattgccactgcggtttgccacaccgatgcctataccctgagtggagctgatcctgagggttgttttccagtgatcttgggacatgaaggtgctggaattgtggaaagtgttggtgagggagttactaagctgaaggcgggtgacactgtcatcccactttacatcccacagtgtggagaatgcaaattttgtctaaatcctaaaactaacctttgccagaagataagagtcactcaagggaaaggattaatgccagatggtaccagcagatttacttgcaaaggaaagacaattttgcattacatgggaaccagcacattttctgaatacacagttgtggctgatatctctgttgctaaaatagatcctttagcacctttggataaagtctgccttctaggttgtggcatttcaaccggttatggtgctgctgtgaacactgccaagttggagcctggctctgtttgtgccgtctttggtctgggaggagtcggattggcagttatcatgggctgtaaagtggctggtgcttcccggatcattggtgtggacatcaataaagataaatttgcaagggccaaagagtttggagccactgaatgtattaaccctcaggattttagtaaacccatccaggaagtgctcattgagatgaccgatggaggagtggactattcctttgaatgtattggtaatgtgaaggtcatgagagcagcacttgaggcatgtcacaagggctggggcgtcagcgtcgtggttggagtagctgcttcaggtgaagaaattgccactcgtccattccagctggtaacaggtcgcacatggaaaggcactgcctttggaggatggaagagtgtagaaagtgtcccaaagttggtgtctgaatatatgtccaaaaagataaaagttgatgaatttgtgactcacaatctgtcttttgatgaaatcaacaaagcctttgaactgatgcattctggaaagagcattcgaactgttgtaaagatttaattcaaaagagaaaaataatgtccatcctgtcgtgatgtgataggagcagcttaacaggcagggagaagcgcctccaacctcacagcctcgtagagcttcacagctactccagaaaatagggttatgtgtgtcattcatgaatctctataatcaaggacaaggataattcagtcatgaacctgttttctggatgctcctccacataaataattgctagtttattaaggaatattttaacataataaaagtaatttctacatttgtgtggaaattgtcttgttttatgctgtcatcattgtcacggtttgtctgcccattatcttcattctgcaagggaaagggaaaggaagcagggcagtggtgggtgtctgaaacctcagaaacataacgttgaacttttaagggtctcagtccccgttgattaaagaacagatcctagccatcagtgacaaagttaatcaggacccaagtctgcttctgtgatattatcttgaagggaggtactgtgccttgttcatacctgtaccccaaattcctaggatggcatctgcccttcagggggcactaaaatgtattattgaaacagcattctgggcttaaataggtgtatgtatgtgttggttgtgactgtactatttctagtatagtgaactacatactgaatatccaagttctcagcacctacttttgtcaaatcttaacattttgccacttcgagatcacattgccattcctcccctccagaggtaacaattatccacaatttgatgtttatcattcctgtgttgttgtactttcactgtgtataacctaaaccatctactctttagtactgttttatatatttttaagcctcatacttgctcattctacagcttttttcactcattattgtataattatatctgaagctctcgttcattaattttagtcctgtgtagcagaattcaattacgggaactaccataatttatctgttctccagttgaaggcatgaagttgttgccagtttctgtattataacactgtagtggaacattcttctgcattgggctcactgcgtgttacctaagacgtatcacagaataaacacatttagccttatagacattgccaaattgctcttcaaagtaaatgtgagtttttgtgaattacatgagtatggaatggtgttttattatgactttagtttgcattttcctcaattctcgttaaatccttcattctaatggacattttattgtgaagaacctgttcatatcctgtgctcaactttgtattgaattatttttctctgaataatttttaggagttcttttattctagacatcaatcatttgtcagttttatatgttgcaaatatcttctagtctatcttgtgacttttctttttactttatggtattttgttgaataaagttttaatgtagtcacat

SEQ ID NO: 14304 - DNA, 1125 bp, Artificial Sequence
  derived and/or modified sequence
atggccaacgaggtgatcaagtgcaaggccgccgtggcctgggaggccgggaagccactgtccatagaggagattgaggtggcccctcctaaagctcatgaagtgagaattaagatcatcgcaaccgctgtgtgccacaccgacgcttacaccttgtccggtgctgaccccgagggctgcttcccagtaatcctcggccacgaaggagccggcatcgtagagtcggttggggagggggtgaccaaactgaaagcaggtgatacagttatccccctgtacataccccagtgtggagaatgcaaattctgcctgaacccgaagactaacctctgccaaaaaattagggttacccaaggtaaaggtctgatgccagacgggacttctcgcttcacctgcaaggggaagaccatcttgcactacatgggcacctccacatttagcgagtacacagttgtggccgacatttcggtggctaagatcgaccctcttgcacccttggacaaagtgtgtcttctcggctgcggtatctccacaggctacggcgccgctgtcaacacagctaagttggagccaggttctgtgtgcgctgtgttcggtctggggggggtgggtctcgccgtaattatggggtgcaaagttgccggagcttcaaggattataggagtcgacataaataaagacaagtttgcccgggcaaaagagtttggcgccaccgaatgtattaatccccaggacttttcaaaacccatccaagaggtgctgatcgaaatgacagatggcggggttgattactcctttgaatgtataggcaacgtcaaagttatgcgcgctgcactagaggcttgccataagggctggggggtttcagttgtagtgggcgtagctgctagcggcgaggaaatcgctacccggccctttcagctggtgacaggcagaacatggaagggaactgctttcggcggatggaagtctgtcgagagcgtgcccaagctcgtgtcagaatatatgagtaaaaagatcaaagtggacgagttcgtgacccacaacttaagttttgatgaaataaataaggcatttgagcttatgcattctgggaaaagtattaggaccgtcgttaagatctag

SEQ ID NO: 14305 - DNA, 1125 bp, Artificial Sequence
  derived and/or modified sequence
atggctaatgaggtgatcaagtgcaaggccgctgttgcatgggaggctggcaaacctctgtctattgaggagatcgaggtggcaccccctaaggcacacgaggtgcggatcaagatcatcgccactgctgtgtgtcatacagatgcatatacactgtccggagccgaccccgagggttgctttccagtaatcctcggacacgagggggcaggcatcgtcgagtctgtgggcgagggggtgaccaaattaaaggcgggagacaccgtaattccactgtacatcccacagtgtggcgaatgcaagttttgccttaatcccaaaactaatctgtgccaaaaaatccgtgtgactcagggaaaagggctcatgccagacggcacctcccggtttacatgcaagggcaagactatccttcactatatgggcacatccacattttctgagtacactgttgtggcagatatttctgttgcaaagatcgatcctctggccccactagacaaggtttgtctgctgggatgtggtatcagtaccggctacggagctgcggtgaacacggccaagttagaaccaggatccgtttgtgccgtttttggcctagggggtgtcgggctggccgtgatcatgggctgtaaggtcgcaggggctagccgcataatcggtgtggacatcaataaagacaaatttgccagagctaaagaattcggggctaccgagtgcatcaaccctcaggacttttctaaacccatccaggaagtgctcattgagatgacagatggtggcgttgactacagttttgaatgtatcggcaatgtcaaggtcatgcgtgccgctctggaagcatgccacaagggatggggcgttagtgtggtggtgggagtcgctgcctcaggggaagaaatcgcgacgcggcctttccaattagtcacaggtcgcacatggaaggggacggccttcggcggatggaagtcggtggaatctgtgccaaaacttgtgtccgaatatatgtctaagaagattaaagtggacgaattcgtgacccacaatctttctttcgacgaaatcaacaaggcctttgaattgatgcacagcggtaagagcattcggactgttgtgaagatctag

SEQ ID NO: 14306 - DNA, 1125 bp, Artificial Sequence
  derived and/or modified sequence
atggccaacgaggtgatcaagtgcaaggccgccgtggcctgggaggccggcaagcccctgagcatcgaggagatcgaggtggccccccccaaggcccacgaggtgagaatcaagatcatcgccaccgccgtgtgccacaccgacgcctacaccctgagcggcgccgaccccgagggctgcttccccgtgatcctgggccacgagggcgccggcatcgtggagagcgtgggcgagggcgtgaccaagctgaaggccggcgacaccgtgatccccctgtacatcccccagtgcggcgagtgcaagttctgcctgaaccccaagaccaacctgtgccagaagatcagagtgacccagggcaagggcctgatgcccgacggcaccagcagattcacctgcaagggcaagaccatcctgcactacatgggcaccagcaccttcagcgagtacaccgtggtggccgacatcagcgtggccaagatcgaccccctggcccccctggacaaggtgtgcctgctgggctgcggcatcagcaccggctacggcgccgccgtgaacaccgccaagctggagcccggcagcgtgtgcgccgtgttcggcctgggcggcgtgggcctggccgtgatcatgggctgcaaggtggccggcgccagcagaatcatcggcgtggacatcaacaaggacaagttcgccagagccaaggagttcggcgccaccgagtgcatcaacccccaggacttcagcaagcccatccaggaggtgctgatcgagatgaccgacggcggcgtggactacagcttcgagtgcatcggcaacgtgaaggtgatgagagccgccctggaggcctgccacaagggctggggcgtgagcgtggtggtgggcgtggccgccagcggcgaggagatcgccaccagacccttccagctggtgaccggcagaacctggaagggcaccgccttcggcggctggaagagcgtggagagcgtgcccaagctggtgagcgagtacatgagcaagaagatcaaggtggacgagttcgtgacccacaacctgagcttcgacgagatcaacaaggccttcgagctgatgcacagcggcaagagcatcagaaccgtggtgaagatctag

SEQ ID NO: 14307 - protein, 368 aa, Artificial Sequence
  derived and/or modified sequence
MCTTGQVIRCKAAILWKPGAPFSIEEVEVAPPKAKEVRIKVVATGLCGTEMKVLGSKHLDLLYPTILGHEGAGIVESIGEGVSTVKPGDKVITLFLPQCGECTSCLNSEGNFCIQFKQSKTQLMSDGTSRFTCKGKSIYHFGNTSTFCEYTVIKEISVAKIDAVAPLEKVCLISCGFSTGFGAAINTAKVTPGSTCAVFGLGGVGLSVVMGCKAAGAARIIGVDVNKEKFKKAQELGATECLNPQDLKKPIQEVLFDMTDAGIDFCFEAIGNLDVLAAALASCNESYGVCVVVGVLPASVQLKISGQLFFSGRSLKGSVFGGWKSRQHIPKLVADYMAEKLNLDPLITHTLNLDKINEAVELMKTGKW

SEQ ID NO: 14308 - DNA, 1107 bp, Artificial Sequence
  derived and/or modified sequence
atgtgtaccaccggccaggtgatccgatgcaaagctgcaattctctggaaacccggtgcccccttttccatcgaggaggtagaagttgcccctccgaaagcaaaagaagtacgtatcaaggtagttgccacgggcctctgtgggaccgaaatgaaggtcctcggaagtaagcatctggacctgctgtaccccactatcctgggtcacgaaggggccggtattgtggagtctataggtgaaggagtctcgacagtgaaacccggtgacaaagttatcacgctgttcctccctcagtgtggggaatgcacaagttgcctgaattccgagggaaatttttgtattcagtttaaacagtccaaaacccaattgatgtccgatgggacctcacgtttcacctgcaaaggaaagtccatctatcattttggaaacacaagcaccttttgcgaatacaccgtgatcaaagagatttcagttgctaaaattgacgctgttgcgcctctggagaaagtgtgcttgatctcctgtggctttagtacaggctttggcgctgccatcaataccgcgaaggtgactccgggcagtacttgtgctgtgtttggcctgggaggggtaggtctgtccgtggttatggggtgtaaggcagccggagctgctcggattataggggtcgacgtgaacaaagagaagttcaagaaggctcaggaacttggcgccacagagtgtctgaaccctcaagatctgaaaaaacccatccaggaggtgctattcgatatgactgacgccgggattgatttttgcttcgaggccatcggcaacctggacgttctggccgccgccctagctagttgcaacgaatcctacggtgtgtgcgtcgtggttggcgtcctccccgctagtgtgcagctgaaaattagcggtcagctgtttttctccggccgcagcctgaaggggtcggtgttcggagggtggaaatccaggcaacacatcccgaaactagtggcagactacatggcggagaagctgaatcttgatcccctcatcacacatactctaaatttggataagataaacgaagctgtggaattaatgaaaaccgggaagtggtag

SEQ ID NO: 14309 - DNA, 1107 bp, Artificial Sequence
  derived and/or modified sequence
atgtgcaccaccggccaggtgatccgctgcaaggccgccatcctgtggaagccaggggcccccttcagcattgaggaggtggaggtggccccacccaaggccaaggaggtgcgcatcaaggtggtggccaccggcctgtgtggcacagagatgaaggtgctgggcagcaagcacctggacctgctgtaccccaccatcctgggccatgaaggagctggcatcgtggagagcatcggggagggcgtgtccacagtgaagccaggggacaaggtgatcaccctcttcctgccccagtgtggagaatgtaccagctgcctgaacagcgagggcaacttctgcatccagttcaagcagagcaagacccagctgatgtctgatggcaccagccgcttcacctgcaagggcaagagcatctaccactttggaaacaccagcaccttctgtgagtacaccgtcatcaaggagatctctgtggccaagattgatgctgtggcccccctggagaaggtgtgcctgatcagctgtggcttcagcactggatttggagctgccatcaacacagccaaggtgaccccaggcagcacctgtgctgtgtttggcctgggcggcgtgggcctgtctgtggtgatgggctgcaaggctgctggagctgcccgcatcattggagtggatgtgaacaaggagaagttcaagaaggcccaggagctgggcgccacagagtgcctgaacccccaggacctgaagaagcccatccaggaggtgctgtttgacatgacagatgctggcatcgacttctgctttgaggccatcggcaacctggatgtgctggccgccgccctggccagctgcaatgaaagctatggagtgtgtgtggtggtgggcgtgctgcctgcctctgtgcagctgaagatcagcggccagctgttcttcagcggccgcagcctgaagggctctgtgtttggaggctggaagagccggcagcacatccccaagctggtggccgactacatggccgagaagctgaacctggaccccctcatcacccacaccctgaacctggacaagatcaatgaagctgtggagctgatgaagacaggcaagtggtag

SEQ ID NO: 14310 - DNA, 1691 bp, Artificial Sequence
  derived and/or modified sequence
tgtattttgaaaacaacagaaaagaaatacttttgtacactctgttagaaattttaagtttggacatttaaaagtccaaatttaaaactcaaaaaaatggataataagaggggacctgtttgattaagggagaaaaaaatagtttgcattttcaccttttgtgctctttcactgagatgagcctatttcagattacacttaggaacttccatcaagcagcgggagagcctacttttcctgtttaataattaccagactacagagaaagctcaggacccagccttctgatctaccagtcgcctgtgtacctttgtactttctacagtgaaagttgctacaggatctccctttctcaataaattcatctgcggtggagaaaatcagcatgtgtactacaggccaagtcatcagatgcaaagcagccatactctggaagcctggtgcaccattttctattgaagaggtagaagtggccccaccaaaggcaaaggaagttcgcataaaggttgtggccaccggactgtgtggtacagagatgaaagtgttggggagtaaacacttggacctcttgtatcccaccatcttgggccatgaaggggctggaatcgttgagagtattggagaaggagtaagcacagtgaaaccaggtgacaaagttatcacactctttctgccacagtgtggagaatgtacctcttgcctgaattctgagggcaatttttgtatacaattcaaacagtcaaaaacccaactgatgtctgatggtaccagcaggtttacctgcaagggaaaatcaatatatcactttggtaataccagcaccttctgtgaatacacagtgataaaggaaatctcagttgccaagattgatgcagtcgctcctctagagaaagtatgcctaattagctgtggcttttccactgggtttggtgctgcaatcaatactgccaaggtgactccaggttctacctgtgctgtgtttggcctgggaggagtcggcttgtctgttgtcatgggttgtaaagcagcaggagcagccaggatcattggagtggatgtcaacaaggagaaatttaagaaggcacaggaattgggtgctactgagtgcctcaaccctcaggacttaaagaaacccattcaagaagttttatttgatatgacagatgctggtatagacttctgctttgaggccattggaaatctggacgttctggcagctgccctcgcctcctgcaatgagagctatggggtctgtgtggttgttggggtgttgcctgccagtgttcaactcaaaatcagtggccagttgttcttctcaggacgttctttgaagggttctgtttttggaggctggaagagcagacagcacatccctaaactggttgctgattatatggcagagaagttgaatctagatccactaattactcatactctgaatcttgataaaatcaatgaagcagttgaattaatgaaaactggaaaatggtaaactgcccacataaattttatgtctgtgtgtttgagaccaagagaaagggtgtattggcttgggagtagaagaagggtcgtccctgctgcagaagctgtatactgataattgaagaggctttcaggaatttgtaaagcatctccttcccctctgcattttgttttatttctagctaataaaatacataatcctgaaagta

SEQ ID NO: 14311 - DNA, 1107 bp, Artificial Sequence
  derived and/or modified sequence
atgtgcaccaccggccaggtgatccggtgcaaggccgccatcctgtggaaacctggcgccccttttagtattgaagaagttgaagtggctccccctaaagccaaagaggtgagaattaaggtagttgctacagggctctgtgggacagaaatgaaggttctcggatcaaagcatctggacctgctctatcccaccattctgggccatgaaggggccggcattgtcgagtcaatcggagagggagtcagtacagtgaaaccaggcgacaaggtgatcacattgttcctcccccagtgcggtgagtgtacctcgtgtctcaattccgaaggaaacttctgtatccagttcaagcagtcaaaaacccagctcatgagcgacggcacgagtaggttcacctgtaaagggaagtctatctatcacttcggaaatacatctaccttttgtgaatacaccgtaatcaaagagatttctgtcgccaaaatcgatgctgtagcaccccttgagaaggtgtgcctgatcagctgtggattctccacaggcttcggtgcagctatcaacaccgcgaaggtgacccccggatccacatgcgctgtgtttgggctcggcggggtgggattgtctgttgttatgggctgtaaagccgccggggcagcccgcattatcggcgtggacgtcaacaaagagaagtttaagaaggcccaggagttgggcgccaccgaatgcctgaatccccaggatttaaagaagcccatacaggaagtgctatttgacatgacagatgccggcatcgacttttgtttcgaagctattgggaacctggatgtactggcagccgctctcgcctcttgcaacgaatcctatggcgtctgcgttgtggttggggttcttccagccagcgtccaactgaagatctccgggcaacttttcttcagcggccgctcactgaaggggagcgtattcggagggtggaaatctaggcagcacatccccaagctcgttgccgattacatggccgaaaaactaaacctcgacccactcatcacacatacgctgaaccttgataaaatcaacgaggcagtggaattgatgaagaccggcaagtggtag

SEQ ID NO: 14312 - DNA, 1107 bp, Artificial Sequence
  derived and/or modified sequence
atgtgtaccaccgggcaggttattcggtgtaaagccgctatcctttggaagcctggcgcacctttctcaattgaggaggttgaggttgcccctccgaaggccaaagaggttagaatcaaggtggttgctacgggattgtgcgggacagaaatgaaggtcctgggctccaaacatttggacctactctatccaactatcctggggcacgagggcgcaggcattgtcgagtctattggagaaggggtttctaccgtcaagcccggagataaggtcatcacactgtttctgccgcagtgcggggaatgcaccagctgcttaaactcagagggaaatttctgcatccagttcaagcagtctaagacacaacttatgagtgatggtacctcccgatttacatgtaaggggaaatccatataccacttcgggaacacgagcaccttctgcgaatatacagtcattaaggagatttctgttgccaagatcgacgctgtcgcaccgctggaaaaggtgtgtctcatctcctgtggattttctaccggctttggcgctgccatcaataccgcaaaggtgacccccggttctacctgcgccgtgtttggtcttggcggtgtaggcttgagtgtcgtcatgggatgcaaagctgccggtgcagcgaggattatcggagtggatgtgaacaaagagaagtttaagaaagcccaggaattgggagcgactgagtgcctcaaccctcaggacctgaagaagcctatccaagaggtgctgtttgatatgacggatgccggaatcgatttctgcttcgaggctataggcaatttggacgtcctggcagccgcactcgcgagttgcaacgaaagctacggagtttgtgtagtagtgggtgtgctccctgcctctgtacagctcaaaataagtggacagctgtttttctcgggaagaagccttaagggctcagtcttcggagggtggaaaagcaggcagcacatcccgaagttggttgctgactatatggcagaaaagctgaacctggaccccctgataactcacacattaaacctggataagatcaacgaagcagtggaacttatgaaaacaggcaaatggtag

SEQ ID NO: 14313 - DNA, 1107 bp, Artificial Sequence
  derived and/or modified sequence
atgtgcaccaccggccaggtgatcagatgcaaggccgccatcctgtggaagcccggcgcccccttcagcatcgaggaggtggaggtggccccccccaaggccaaggaggtgagaatcaaggtggtggccaccggcctgtgcggcaccgagatgaaggtgctgggcagcaagcacctggacctgctgtaccccaccatcctgggccacgagggcgccggcatcgtggagagcatcggcgagggcgtgagcaccgtgaagcccggcgacaaggtgatcaccctgttcctgccccagtgcggcgagtgcaccagctgcctgaacagcgagggcaacttctgcatccagttcaagcagagcaagacccagctgatgagcgacggcaccagcagattcacctgcaagggcaagagcatctaccacttcggcaacaccagcaccttctgcgagtacaccgtgatcaaggagatcagcgtggccaagatcgacgccgtggcccccctggagaaggtgtgcctgatcagctgcggcttcagcaccggcttcggcgccgccatcaacaccgccaaggtgacccccggcagcacctgcgccgtgttcggcctgggcggcgtgggcctgagcgtggtgatgggctgcaaggccgccggcgccgccagaatcatcggcgtggacgtgaacaaggagaagttcaagaaggcccaggagctgggcgccaccgagtgcctgaacccccaggacctgaagaagcccatccaggaggtgctgttcgacatgaccgacgccggcatcgacttctgcttcgaggccatcggcaacctggacgtgctggccgccgccctggccagctgcaacgagagctacggcgtgtgcgtggtggtgggcgtgctgcccgccagcgtgcagctgaagatcagcggccagctgttcttcagcggcagaagcctgaagggcagcgtgttcggcggctggaagagcagacagcacatccccaagctggtggccgactacatggccgagaagctgaacctggaccccctgatcacccacaccctgaacctggacaagatcaacgaggccgtggagctgatgaagaccggcaagtggtag

SEQ ID NO: 14314 - protein, 386 aa, Artificial Sequence
  derived and/or modified sequence
MFAEIQIQDKDRMGTAGKVIKCKAAVLWEQKQPFSIEEIEVAPPKTKEVRIKILATGICRTDDHVIKGTMVSKFPVIVGHEATGIVESIGEGVTTVKPGDKVIPLFLPQCRECNACRNPDGNLCIRSDITGRGVLADGTTRFTCKGKPVHHFMNTSTFTEYTVVDESSVAKIDDAAPPEKVCLIGCGFSTGYGAAVKTGKVKPGSTCVVFGLGGVGLSVIMGCKSAGASRIIGIDLNKDKFEKAMAVGATECISPKDSTKPISEVLSEMTGNNVGYTFEVIGHLETMIDALASCHMNYGTSVVVGVPPSAKMLTYDPMLLFTGRTWKGCVFGGLKSRDDVPKLVTEFLAKKFDLDQLITHVLPFKKISEGFELLNSGQSIRTVLTF

SEQ ID NO: 14315 - protein, 374 aa, Artificial Sequence
  derived and/or modified sequence
MGTAGKVIKCKAAVLWEQKQPFSIEEIEVAPPKTKEVRIKILATGICRTDDHVIKGTMVSKFPVIVGHEATGIVESIGEGVTTVKPGDKVIPLFLPQCRECNACRNPDGNLCIRSDITGRGVLADGTTRFTCKGKPVHHFMNTSTFTEYTVVDESSVAKIDDAAPPEKVCLIGCGFSTGYGAAVKTGKVKPGSTCVVFGLGGVGLSVIMGCKSAGASRIIGIDLNKDKFEKAMAVGATECISPKDSTKPISEVLSEMTGNNVGYTFEVIGHLETMIDALASCHMNYGTSVVVGVPPSAKMLTYDPMLLFTGRTWKGCVFGGLKSRDDVPKLVTEFLAKKFDLDQLITHVLPFKKISEGFELLNSGQSIRTVLTF

SEQ ID NO: 14316 - protein, 317 aa, Artificial Sequence
  derived and/or modified sequence
MVSKFPVIVGHEATGIVESIGEGVTTVKPGDKVIPLFLPQCRECNACRNPDGNLCIRSDITGRGVLADGTTRFTCKGKPVHHFMNTSTFTEYTVVDESSVAKIDDAAPPEKVCLIGCGFSTGYGAAVKTGKVKPGSTCVVFGLGGVGLSVIMGCKSAGASRIIGIDLNKDKFEKAMAVGATECISPKDSTKPISEVLSEMTGNNVGYTFEVIGHLETMIDALASCHMNYGTSVVVGVPPSAKMLTYDPMLLFTGRTWKGCVFGGLKSRDDVPKLVTEFLAKKFDLDQLITHVLPFKKISEGFELLNSGQSIRTVLTF

SEQ ID NO: 14317 - DNA, 1161 bp, Artificial Sequence
  derived and/or modified sequence
atgtttgctgaaattcagatccaggacaaggatagaatgggtactgcaggaaaggtgattaaatgcaaagctgcagtgttgtgggaacagaaacagcccttttcaatcgaagagatcgaagtggcacccccaaagaccaaagaagtgagaatcaagatattagcaaccgggatctgtcggacagatgatcacgtgatcaaaggaacaatggtgagcaagtttccggtgattgtgggacatgaagctacagggattgtcgagagtatcggcgagggcgtgactactgtaaaaccaggcgacaaggtcattcccctgtttctaccccaatgccgtgagtgcaatgcctgtcggaacccggacgggaatctgtgcatccgctccgacattactggccggggagtcctcgcggatggcactactcgatttacatgtaagggcaagcctgtacaccacttcatgaatacctccacattcactgagtataccgtagttgacgaaagttcggtggcaaagatagacgacgctgcgccccctgagaaggtgtgtctgatcggttgcggcttcagcactggttatggcgccgccgtgaagaccggcaaggtgaaacctgggtccacttgcgttgttttcggattaggtggtgtggggctaagtgtcattatgggctgtaaatccgccggggcttctcgtatcatagggatcgatctgaataaggataaattcgagaaagcgatggctgttggagcgactgagtgtatcagtcccaaggattccaccaagccaatctctgaagtcctgtctgagatgaccggaaataacgtcggctacacctttgaggttatcggtcacctggagactatgatcgacgctttggcatcatgtcacatgaactacggaacttcggtggtcgtgggcgtaccacctagcgctaagatgctgacctatgaccccatgctgttgtttaccgggcgaacttggaaagggtgtgtctttggcgggctaaagtcccgggatgacgttcctaagctggttaccgaattcctcgccaagaagttcgacctggatcaactgattacacatgttttgccgtttaaaaagattagtgagggttttgagctcctgaactctgggcagagcattaggaccgttctaacattttag

SEQ ID NO: 14318 - DNA, 1125 bp, Artificial Sequence
  derived and/or modified sequence
atggggacggctggaaaagtcattaaatgcaaggctgccgtgctgtgggagcagaaacagccgttcagcatagaggagatcgaagtcgcaccgccaaaaactaaagaagttaggataaagatcttggcgacgggcatatgtcgcactgacgatcacgtgattaaggggactatggtaagcaagttcccagtgattgtcgggcatgaagctacaggaattgtggagtccattggggagggggtaaccactgtgaagccaggtgacaaggtcatcccgctcttccttccgcaatgtcgggagtgcaacgcatgccgtaaccccgacggaaatctatgtattcgcagcgacatcacagggaggggcgtgctggccgacgggacaacccggttcacttgcaagggcaagcctgtgcaccattttatgaacactagtaccttcacggaatataccgtagtcgacgagagcagcgtggcaaaaatcgacgacgccgctccacctgaaaaggtttgtctgatcgggtgcggcttcagcacaggttatggggcggccgtgaagaccggaaaggtaaagcccggctccacctgtgtggtctttggactgggcggcgtgggattgtccgtgattatgggctgcaagtccgccggcgcatctaggattattggaattgacttgaacaaagataagttcgagaaggccatggcagttggagctacggaatgcatcagccctaaggattccacaaagccgatctcagaagtactgtccgagatgactggtaataacgtgggatacaccttcgaggtgatcgggcatcttgaaaccatgattgacgcccttgcttcatgccatatgaattacggcacgtccgttgtcgttggggtaccgccaagtgccaagatgcttacctatgacccaatgctgctgttcacagggcgaacatggaaagggtgtgtgtttggcggccttaaaagcagggacgatgtgcctaagcttgtgaccgagttcttagcaaaaaaatttgatctggatcaactgattactcacgtgctcccatttaaaaaaatcagtgaaggctttgagctgctgaactctgggcagagcatccggaccgtcttgacattctag

SEQ ID NO: 14319 - DNA, 954 bp, Artificial Sequence
  derived and/or modified sequence
atggtcagcaagttccctgtaattgtagggcacgaagccacaggaattgtggagtccatcggggagggcgtcaccaccgtgaaaccgggggacaaagtaatccctctgttcctgccacagtgtcgagagtgtaacgcatgtagaaacccagatggaaatctgtgtattaggagtgacatcaccggaagaggcgtgctggctgacggtacaacaaggtttacttgtaaggggaagccggtacaccacttcatgaatactagtacctttaccgaatacaccgtcgtggacgaatcgagcgtcgccaaaatcgacgacgccgctccacctgaaaaagtatgcctcatcggttgcggcttctctaccgggtacggagccgctgtgaagactggcaaagttaaacccggcagcacatgtgttgtgttcggcctgggtggcgtcggtctttccgtaatcatgggctgtaaatccgctggcgcttctcgcattattggcattgatcttaacaaggacaaatttgagaaggctatggctgtcggagcaacggagtgtatctcccccaaggattctaccaagcctatctcagaagtactgtcagaaatgaccgggaataatgtgggttatactttcgaagtgataggtcatctcgagactatgattgatgctctggcctcatgccatatgaactatgggacgtcggtcgttgtgggtgtcccgcctagcgctaagatgctgacatatgacccgatgctgctgttcaccggtcgcacttggaaaggctgcgtgttcggtggtctgaagtccagggacgatgtgccaaaactcgtaaccgagttcctcgccaagaaattcgatctggaccagctcattactcatgttttgccctttaagaagatcagtgaaggcttcgaactgctcaactcaggccagagcatccggaccgttctgacattttag

SEQ ID NO: 14320 - DNA, 1161 bp, Artificial Sequence
  derived and/or modified sequence
atgtttgctgagatccagatccaggacaaggacaggatgggcacagctgggaaggtgatcaagtgcaaggctgctgtgctgtgggagcagaagcagcccttcagcattgaggagattgaggtggccccacccaagaccaaggaggtgcgcatcaagatcctggccaccggcatctgcaggacagatgaccacgtgatcaagggcaccatggtgtccaagtttcctgtgattgtgggccacgaggccactggaattgtggagagcattggagagggcgtgaccaccgtgaagccaggggacaaggtgatccccctcttcctgccccagtgccgggagtgcaatgcctgcagaaatccagatggcaacctgtgcatccgcagtgacatcaccggccggggcgtgctggctgatggcaccacccgcttcacctgcaagggcaagcctgtgcaccacttcatgaacaccagcaccttcacagagtacacagtggtggatgagagctctgtggccaagattgatgatgctgcccctcctgagaaggtgtgcctgattggctgcggcttcagcacaggctacggggctgctgtgaagacaggcaaggtgaagccaggcagcacctgtgtggtgtttggcctgggcggcgtgggcctgagcgtcatcatgggctgcaagtctgctggggccagccgcatcatcggcatcgacctgaacaaggacaagtttgagaaggccatggctgtgggcgccacagagtgcatcagccccaaggacagcaccaagcccatcagcgaggtgctgtctgagatgacaggcaacaacgtgggctacacctttgaggtgattggccacctggagaccatgattgatgccctggccagctgccacatgaactacggcacctctgtggtggtgggcgtgcccccatctgccaagatgctgacctatgaccccatgctgctcttcaccggccgcacctggaagggctgtgtgtttggaggcctgaagagcagagatgatgtgcccaagctggtgacagagttcctggccaagaagtttgacctggaccagctgatcacccacgtgctgcccttcaagaagatcagcgagggctttgagctgctgaacagcggccagagcatcagaacagtgctgaccttctag

SEQ ID NO: 14321 - DNA, 1125 bp, Artificial Sequence
  derived and/or modified sequence
atgggcacagctgggaaggtgatcaagtgcaaggctgctgtgctgtgggagcagaagcagcccttcagcattgaggagattgaggtggccccacccaagaccaaggaggtgcgcatcaagatcctggccaccggcatctgcaggacagatgaccacgtgatcaagggcaccatggtgtccaagtttcctgtgattgtgggccacgaggccactggaattgtggagagcattggagagggcgtgaccaccgtgaagccaggggacaaggtgatccccctcttcctgccccagtgccgggagtgcaatgcctgcagaaatccagatggcaacctgtgcatccgcagtgacatcaccggccggggcgtgctggctgatggcaccacccgcttcacctgcaagggcaagcctgtgcaccacttcatgaacaccagcaccttcacagagtacacagtggtggatgagagctctgtggccaagattgatgatgctgcccctcctgagaaggtgtgcctgattggctgcggcttcagcacaggctacggggctgctgtgaagacaggcaaggtgaagccaggcagcacctgtgtggtgtttggcctgggcggcgtgggcctgagcgtcatcatgggctgcaagtctgctggggccagccgcatcatcggcatcgacctgaacaaggacaagtttgagaaggccatggctgtgggcgccacagagtgcatcagccccaaggacagcaccaagcccatcagcgaggtgctgtctgagatgacaggcaacaacgtgggctacacctttgaggtgattggccacctggagaccatgattgatgccctggccagctgccacatgaactacggcacctctgtggtggtgggcgtgcccccatctgccaagatgctgacctatgaccccatgctgctcttcaccggccgcacctggaagggctgtgtgtttggaggcctgaagagcagagatgatgtgcccaagctggtgacagagttcctggccaagaagtttgacctggaccagctgatcacccacgtgctgcccttcaagaagatcagcgagggctttgagctgctgaacagcggccagagcatcagaacagtgctgaccttctag

SEQ ID NO: 14322 - DNA, 954 bp, Artificial Sequence
  derived and/or modified sequence
atggtgtccaagtttcctgtgattgtgggccacgaggccaccggcatcgtggagagcatcggggagggcgtgaccaccgtgaagccaggggacaaggtgatccccctcttcctgccccagtgcagagaatgtaatgcctgcaggaacccagatggcaacctgtgcatccgcagtgacatcaccggccggggcgtgctggctgatggcaccacccgcttcacctgcaagggcaagcctgtgcaccacttcatgaacaccagcaccttcacagagtacacagtggtggatgagagctctgtggccaagattgatgatgctgcccctcctgagaaggtgtgcctgattggctgcggcttcagcacaggctatggagctgctgtgaagacaggcaaggtgaagccaggcagcacctgtgtggtgtttggcctgggcggcgtgggcctgagcgtcatcatgggctgcaagtctgctggggccagccgcatcattggaattgacctgaacaaggacaagtttgagaaggccatggctgtgggcgccacagagtgcatcagccccaaggacagcaccaagcccatcagcgaggtgctgtctgagatgactggaaacaacgtgggctacacctttgaagtcatcggccacctggagaccatgattgatgccctggccagctgccacatgaactacggcacctctgtggtggtgggcgtgccccccagcgccaagatgctgacctatgaccccatgctgctcttcaccggccgcacctggaagggctgtgtgtttggaggcctgaagagcagagatgatgtgcccaagctggtgacagagttcctggccaagaagtttgacctggaccagctgatcacccacgtgctgcccttcaagaagatcagcgagggctttgagctgctgaacagcggccagagcatcagaacagtgctgaccttctag

SEQ ID NO: 14323 - DNA, 2289 bp, Artificial Sequence
  derived and/or modified sequence
tttcaatagctttgattatcttgtttttgttagatccctcctcttggtttgatcatagtagttactgtatttctttttataagttggtctgcaaagggtagggcttgcagaccattgcaaagttgtgacggctgtgagtcatattgctgaaggtggaactctgaagccagactatctatgtgaaggcacaagctgctgttatatacaacagagtgaactgagcatcagtcagaaaaagtctatgtttgcagaaatacagatccaagacaaagacaggatgggcactgctggaaaagttattaaatgcaaagcagctgtgctttgggagcagaagcaacccttctccattgaggaaatagaagttgccccaccaaagactaaagaagttcgcattaagattttggccacaggaatctgtcgcacagatgaccatgtgataaaaggaacaatggtgtccaagtttccagtgattgtgggacatgaggcaactgggattgtagagagcattggagaaggagtgactacagtgaaaccaggtgacaaagtcatccctctctttctgccacaatgtagagaatgcaatgcttgtcgcaacccagatggcaacctttgcattaggagcgatattactggtcgtggagtactggctgatggcaccaccagatttacatgcaagggcaaaccagtccaccacttcatgaacaccagtacatttaccgagtacacagtggtggatgaatcttctgttgctaagattgatgatgcagctcctcctgagaaagtctgtttaattggctgtgggttttccactggatatggcgctgctgttaaaactggcaaggtcaaacctggttccacttgcgtcgtctttggcctgggaggagttggcctgtcagtcatcatgggctgtaagtcagctggtgcatctaggatcattgggattgacctcaacaaagacaaatttgagaaggccatggctgtaggtgccactgagtgtatcagtcccaaggactctaccaaacccatcagtgaggtgctgtcagaaatgacaggcaacaacgtgggatacacctttgaagttattgggcatcttgaaaccatgattgatgccctggcatcctgccacatgaactatgggaccagcgtggttgtaggagttcctccatcagccaagatgctcacctatgacccgatgttgctcttcactggacgcacatggaagggatgtgtctttggaggtttgaaaagcagagatgatgtcccaaaactagtgactgagttcctggcaaagaaatttgacctggaccagttgataactcatgttttaccatttaaaaaaatcagtgaaggatttgagctgctcaattcaggacaaagcattcgaacggtcctgacgttttgagatccaaagtggcaggaggtctgtgttgtcatggtgaactggagtttctcttgtgagagttccctcatctgaaatcatgtatctgtctcacaaatacaagcataagtagaagatttgttgaagacatagaacccttataaagaattattaacctttataaacatttaaagtcttgtgagcacctgggaattagtataataacaatgttaatatttttgatttacattttgtaaggctataattgtatcttttaagaaaacatacacttggatttctatgttgaaatggagatttttaagagttttaaccagctgctgcagatatataactcaaaacagatatagcgtataaagatatagtaaatgcatctcctagagtaatattcacttaacacattgaaactattattttttagatttgaatataaatgtattttttaaacacttgttatgagttaagttggattacattttgaaatcagttcattccatgatgcatattactggattagattaagaaagacagaaaagattaagggacgggcacatttttcaacgattaagaatcatcattacataacttggtgaaactgaaaaagtatatcatatgggtacacaaggctatttgccagcatatattaatattttagaaaatattccttttgtaatactgaatataaacatagagctagaatcatattatcatacttatcataatgttcaatttgatacagtagaattgcaagtccctaagtccctattcactgtgcttagtagtgactccatttaataaaaagtgtttttagtttttaacaactacactgatgtatctatatatatctataacatgttaaaaattcttaagaaaattaaaaattatataaaatg

SEQ ID NO: 14324 - DNA, 2516 bp, Artificial Sequence
  derived and/or modified sequence
ctgttttcatttatatttaattccagaaaccacatcaagtctttgcagaatgaagtagagcattaagaagtagagatgtacacacgcatctctaaaatcagccatgcctaggcaaagcagcttgcacttaaacacccaatacatttttcatgattgtgttgaagtgaagtaacctaacccgtttttatatccttcaaaataaggtggataggaatgctttcagcccttttcaatagctttgattatcttgtttttgttagatccctcctcttggtttgatcatagtagttactgtatttctttttataagttggtctgcaaagggtagggcttgcagaccattgcaaagttgtgacggctgtgagtcatattgctgaaggtggaactctgaagccagactatctatgtgaaggcacaagctgctgttatatacaacagagtgaactgagcatcagtcagaaaaagtctatgtttgcagaaatacagatccaagacaaagacaggatgggcactgctggaaaagttattaaatgcaaagcagctgtgctttgggagcagaagcaacccttctccattgaggaaatagaagttgccccaccaaagactaaagaagttcgcattaagattttggccacaggaatctgtcgcacagatgaccatgtgataaaaggaacaatggtgtccaagtttccagtgattgtgggacatgaggcaactgggattgtagagagcattggagaaggagtgactacagtgaaaccaggtgacaaagtcatccctctctttctgccacaatgtagagaatgcaatgcttgtcgcaacccagatggcaacctttgcattaggagcgatattactggtcgtggagtactggctgatggcaccaccagatttacatgcaagggcaaaccagtccaccacttcatgaacaccagtacatttaccgagtacacagtggtggatgaatcttctgttgctaagattgatgatgcagctcctcctgagaaagtctgtttaattggctgtgggttttccactggatatggcgctgctgttaaaactggcaaggtcaaacctggttccacttgcgtcgtctttggcctgggaggagttggcctgtcagtcatcatgggctgtaagtcagctggtgcatctaggatcattgggattgacctcaacaaagacaaatttgagaaggccatggctgtaggtgccactgagtgtatcagtcccaaggactctaccaaacccatcagtgaggtgctgtcagaaatgacaggcaacaacgtgggatacacctttgaagttattgggcatcttgaaaccatgattgatgccctggcatcctgccacatgaactatgggaccagcgtggttgtaggagttcctccatcagccaagatgctcacctatgacccgatgttgctcttcactggacgcacatggaagggatgtgtctttggaggtttgaaaagcagagatgatgtcccaaaactagtgactgagttcctggcaaagaaatttgacctggaccagttgataactcatgttttaccatttaaaaaaatcagtgaaggatttgagctgctcaattcaggacaaagcattcgaacggtcctgacgttttgagatccaaagtggcaggaggtctgtgttgtcatggtgaactggagtttctcttgtgagagttccctcatctgaaatcatgtatctgtctcacaaatacaagcataagtagaagatttgttgaagacatagaacccttataaagaattattaacctttataaacatttaaagtcttgtgagcacctgggaattagtataataacaatgttaatatttttgatttacattttgtaaggctataattgtatcttttaagaaaacatacacttggatttctatgttgaaatggagatttttaagagttttaaccagctgctgcagatatataactcaaaacagatatagcgtataaagatatagtaaatgcatctcctagagtaatattcacttaacacattgaaactattattttttagatttgaatataaatgtattttttaaacacttgttatgagttaagttggattacattttgaaatcagttcattccatgatgcatattactggattagattaagaaagacagaaaagattaagggacgggcacatttttcaacgattaagaatcatcattacataacttggtgaaactgaaaaagtatatcatatgggtacacaaggctatttgccagcatatattaatattttagaaaatattccttttgtaatactgaatataaacatagagctagaatcatattatcatacttatcataatgttcaatttgatacagtagaattgcaagtccctaagtccctattcactgtgcttagtagtgactccatttaataaaaagtgtttttagtttttaacaactacactgatgtatctatatatatctataacatgttaaaaattcttaagaaaattaaaaattatataaaatg

SEQ ID NO: 14325 - DNA, 1420 bp, Artificial Sequence
  derived and/or modified sequence
gtctatgtttgcagaaatacagatccaagacaaagacaggatgggcactgctggaaaattttttccataggtcctttgcctgctatgtatctcccaggatgtaagtgtggtatgtggaagtgggaaggagtgttaggagtgaagttgttaacacttcctctgtaaatttgagttattaaatgcaaagcagctgtgctttgggagcagaagcaacccttctccattgaggaaatagaagttgccccaccaaagactaaagaagttcgcattaagattttggccacaggaatctgtcgcacagatgaccatgtgataaaaggaacaatggtgtccaagtttccagtgattgtgggacatgaggcaactgggattgtagagagcattggagaaggagtgactacagtgaaaccaggtgacaaagtcatccctctctttctgccacaatgtagagaatgcaatgcttgtcgcaacccagatggcaacctttgcattaggagcgatattactggtcgtggagtactggctgatggcaccaccagatttacatgcaagggcaaaccagtccaccacttcatgaacaccagtacatttaccgagtacacagtggtggatgaatcttctgttgctaagattgatgatgcagctcctcctgagaaagtctgtttaattggctgtgggttttccactggatatggcgctgctgttaaaactggcaaggtcaaacctggttccacttgcgtcgtctttggcctgggaggagttggcctgtcagtcatcatgggctgtaagtcagctggtgcatctaggatcattgggattgacctcaacaaagacaaatttgagaaggccatggctgtaggtgccactgagtgtatcagtcccaaggactctaccaaacccatcagtgaggtgctgtcagaaatgacaggcaacaacgtgggatacacctttgaagttattgggcatcttgaaaccatgattgatgccctggcatcctgccacatgaactatgggaccagcgtggttgtaggagttcctccatcagccaagatgctcacctatgacccgatgttgctcttcactggacgcacatggaagggatgtgtctttggaggtttgaaaagcagagatgatgtcccaaaactagtgactgagttcctggcaaagaaatttgacctggaccagttgataactcatgttttaccatttaaaaaaatcagtgaaggatttgagctgctcaattcaggacaaagcattcgaacggtcctgacgttttgagatccaaagtggcaggaggtctgtgttgtcatggtgaactggagtttctcttgtgagagttccctcatctgaaatcatgtatctgtctcacaaatacaagcataagtagaagatttgttgaagacatagaacccttataaag

SEQ ID NO: 14326 - DNA, 1161 bp, Artificial Sequence
  derived and/or modified sequence
atgttcgccgagatccagatccaggacaaggaccggatgggcaccgccgggaaagtgatcaaatgtaaggccgctgtgctgtgggagcagaagcagcctttctcaattgaagaaatcgaggtggcgcctccgaaaacaaaagaggttcgaatcaaaatcctggctactggcatttgccgcaccgatgaccatgttatcaagggtaccatggtctccaagtttcctgttatcgtagggcatgaggctaccggcattgtagagagtatcggggaaggagtcactactgtaaagcccggagataaagtaataccactgttccttccacagtgtcgcgagtgtaacgcctgtagaaatccagacgggaacttatgcatcagaagtgacataactggcaggggagtcctcgctgacggtacaactaggtttacttgcaaaggcaagccggtgcatcactttatgaatacctctaccttcaccgaatacactgtggtggatgaatcttccgttgccaaaattgatgacgctgcgcctccagaaaaagtgtgcctgatcggctgtggcttttccaccggatatggggccgccgtaaaaacgggcaaagtgaaacccgggtcgacttgcgtcgtttttgggctcggcggtgtgggcctgtccgtgataatgggctgtaaatcagctggcgcgagtagaattatcggcatcgacctcaacaaagacaaatttgaaaaagcaatggcagtcggcgctacggagtgtatatctcccaaggattccacgaagcctatttccgaggtgctgagcgaaatgaccggcaacaacgtgggctacactttcgaggtcatcggacatttggaaacaatgatagacgccctagcgtcctgtcatatgaactatggcacatcagtcgtggtgggagtgcccccctctgccaagatgctcacgtacgatcctatgttgttattcactgggagaacttggaaaggatgtgtctttgggggcttgaagagtcgtgacgatgtgcccaagctcgtaaccgagttcctggctaagaaatttgacctcgaccagttgattacccacgtgttgccttttaagaaaatctcggaaggctttgagcttctcaactcaggtcagtccatccgaaccgtgcttactttttag

SEQ ID NO: 14327 - DNA, 1125 bp, Artificial Sequence
  derived and/or modified sequence
atgggcaccgccggcaaggtgatcaagtgcaaggccgccgtgctgtgggaacaaaagcagccattttccatcgaggagatcgaagtcgccccgcctaagactaaagaggtcaggatcaaaatcttagcaacaggaatttgcagaacagacgaccacgttatcaaaggcaccatggtcagtaagtttcctgtgattgtcgggcatgaagcaacaggcatcgttgagtccattggtgaaggcgtgaccaccgtgaaacccggcgataaggtgattccactcttcctgcctcagtgccgtgagtgtaacgcatgtagaaatcccgatggtaatttgtgtattcgctccgacataacaggcagaggcgttctcgccgacggtaccactcgcttcacctgcaaggggaagcccgtccaccactttatgaacacctccaccttcacggaatacactgtggtggacgagagtagcgttgctaaaatagatgacgccgcaccgcccgaaaaggtatgcctaattggatgcgggttcagcacaggatatggcgccgcagtaaaaacagggaaagtaaaacctggatccacgtgtgtggtcttcggtctgggtggcgtggggctgtcagtgataatggggtgcaagtccgccggggcaagtagaatcattggtattgacctaaataaagataagtttgagaaagctatggccgttggagctacagagtgcatatcccctaaagactcaacgaagcccatcagcgaggtactgtctgagatgacggggaacaatgtgggctatacttttgaagtgatcggtcacctggagactatgatcgatgccttggcctcctgccacatgaactatgggacatcggtggtggtcggagttccaccttcagcaaaaatgttaacttacgacccgatgctgttgtttacaggacggacgtggaaggggtgtgtcttcggaggtctgaagtcccgagatgatgtgcccaagctggtcacagaattcctggccaaaaaatttgacctcgaccagctgatcacacacgtgctgcctttcaagaagatctccgaaggctttgagctgctgaattcgggacagtcaattcgcacggttcttaccttctag

SEQ ID NO: 14328 - DNA, 954 bp, Artificial Sequence
  derived and/or modified sequence
atggtgagcaagttccccgtgatcgtgggccacgaggccaccggcattgttgaaagtatcggagagggggtaaccaccgttaagcctggggacaaggtgatccctctgtttctgccacagtgcagggagtgcaatgcctgtcggaaccccgacggaaatctctgtatccggtccgacattaccgggcggggcgtgttggctgacgggacgacgcggttcacatgcaaaggcaagccagtgcatcactttatgaatacctcgaccttcaccgaatatacagtggtggacgaatcatccgtcgccaagatagacgatgctgccccgcctgaaaaggtgtgcttgataggttgcgggttttcaaccggctacggagccgccgtcaagaccggaaaagttaaaccaggatcaacctgcgtagtttttggcctcggaggggtgggactgtccgtgattatggggtgcaagtctgcaggtgctagccgcataattggaatagatttaaacaaggacaagtttgaaaaggctatggctgtgggagcaactgagtgcatcagtcccaaagactccacaaaaccgatatcagaagttctctcagagatgaccgggaacaacgtcggctatactttcgaagtgatcggacacctggagaccatgatagacgcgctagctagctgtcacatgaactacgggaccagcgtggtagtcggtgtacctccttcggcaaaaatgcttacttacgatcccatgctcctcttcaccggccgcacgtggaaaggctgcgtttttggtggactgaagtctcgcgatgatgtccccaaacttgtgactgagtttctagccaagaaattcgacctagatcagctcattacgcacgttttgccattcaagaaaatatcagagggctttgagctccttaacagcgggcaaagcatcagaacagtgctgaccttttag

SEQ ID NO: 14329 - DNA, 1161 bp, Artificial Sequence
  derived and/or modified sequence
atgtttgccgagatccagatccaggacaaggacaggatgggcaccgctgggaaggtaataaagtgcaaggcagcggtcctgtgggagcaaaagcaacccttctccattgaggaaatcgaggttgctccaccaaagaccaaagaagtccgcatcaagatcctggccacggggatctgccgtaccgacgaccatgtcattaagggcactatggtgagcaagttccctgtgatcgttggacacgaggcgaccggcatagtagagagtatcggggagggggtaactacagtgaagcccggtgataaggtgatacccttgttcctacctcagtgtagagagtgtaatgcctgtcggaatccagacggcaacctatgcattcgatctgacatcaccgggcgtggcgtcctggccgatggaaccactaggttcacatgtaaaggaaaacctgttcaccactttatgaacacctccaccttcacagaatataccgtggtggatgagagtagcgtagcaaagatcgacgacgcagcccctcctgaaaaggtgtgtctgattggctgcggcttcagcacaggctatggcgctgcggtaaagacaggaaaagtgaagcctggatctacatgcgtagtttttggccttgggggagtcggcctcagtgtgatcatgggctgcaaatccgccggagcttctcgaattatcgggatagacttgaataaggacaagtttgagaaggccatggctgtgggggctaccgagtgtatatcaccaaaggacagtaccaagcccatttccgaggttctttcagaaatgaccgggaacaatgtgggctacacttttgaagttatcggccatctggaaacgatgatcgacgcattggcttcctgtcacatgaactatgggacatctgttgtggtaggggtgcccccttccgctaagatgctgacctatgaccccatgttgctgtttaccggcagaacttggaagggttgcgtgttcggtggactgaagtcacgagacgatgttcctaaactcgttacggaattcctggccaaaaagttcgatctggaccagctgataacccacgtgctgcccttcaagaaaattagcgaagggttcgaattgctgaacagtggacagtcgattaggacggttctgaccttttag

SEQ ID NO: 14330 - DNA, 1125 bp, Artificial Sequence
  derived and/or modified sequence
atgggcaccgcaggcaaggtaattaaatgcaaggccgctgtgttgtgggaacaaaaacagcccttttccatagaggaaattgaagtggcacctccaaagaccaaagaagtgcggattaaaatcctggctaccggaatttgccgcaccgatgaccacgttattaagggtaccatggtttcaaagtttccggtcattgtgggccatgaagccaccggcatagtggagagtatcggagaaggagtgacgacagtaaaacctggcgataaagtgatcccactgttcttacctcagtgtagagagtgcaatgcctgtcgtaacccagacgggaacctgtgtatcaggagcgacatcaccggaaggggagtgctggcggatggcacaactagattcacctgcaagggtaagccagtgcaccatttcatgaacactagcaccttcacagagtacactgtggtcgacgaatcgagtgtggccaagatcgacgatgcagctccacctgagaaggtctgcctgattgggtgtggcttctctaccggatatggggctgccgtgaaaaccggaaaggttaagcctggatctacttgcgtagttttcgggcttggtggcgtggggctgagcgttattatgggatgtaagtcggccggtgcctctcgtattataggaatagatctgaataaggacaagtttgagaaggctatggcagttggcgctacggagtgcatcagccctaaggattcaaccaagcccatttctgaggtcctgtcggaaatgacaggcaataacgtgggatacacctttgaggtaattggacacctcgagacaatgatagatgccctcgccagctgtcacatgaattacggcacttcggtggttgtgggggtccccccatccgcgaagatgctcacatatgaccctatgctgttgttcactggcagaacttggaagggctgtgtgttcgggggtctaaagagcagagatgatgtccctaaactggtaaccgagttcctggcgaagaaatttgatctagaccaacttatcactcacgtactgcccttcaagaagatctccgaaggctttgagctattaaacagcgggcagtccattcgcaccgtactaacattttag

SEQ ID NO: 14331 - DNA, 954 bp, Artificial Sequence
  derived and/or modified sequence
atggtgagtaagttcccagtgatagtggggcacgaagcaaccggtatcgtggaatcaataggcgagggagtgacaacagtgaagcctggggataaagtgatacctctgtttctgcctcaatgtcgggaatgcaacgcatgtcggaatccagatgggaacttgtgcatccgcagtgatataacggggaggggtgtgctggctgacggaactactcggtttacttgcaagggaaagcctgtgcatcacttcatgaataccagtacatttacagaatacaccgtagtcgacgaatctagtgtggctaagattgacgatgcagcgcctcccgagaaggtgtgtttaattggctgtggtttctccaccgggtacggcgcagctgtaaagactggcaaggtgaaacccggatctacctgcgttgtgttcggcctgggcggagtgggactgtcagtaataatgggatgtaagagcgcaggcgcttcccgcatcattggcatcgaccttaataaagataagttcgagaaggcaatggccgtgggcgctaccgagtgcatctctcctaaagattccactaaacctatttctgaagttctgagcgagatgacaggaaacaacgtaggttatacttttgaggtaatcggacatctggaaactatgatagatgcactcgcctcatgtcatatgaattatggcacctccgtagttgtgggggtgcctcctagcgcaaagatgctgacgtatgacccgatgctccttttcacaggacgaacatggaaaggatgcgtgtttggcggtctgaagtcgcgggatgacgtccccaaactcgtgaccgaattcttagctaagaagtttgatctcgaccaactcataacacacgtgcttcccttcaagaaaatttccgagggcttcgaattactgaactctgggcagtcaatccggacagtgctgaccttctag

SEQ ID NO: 14332 - DNA, 1161 bp, Artificial Sequence
  derived and/or modified sequence
atgttcgccgagatccagatccaggacaaggacagaatgggcaccgccggcaaggtgatcaagtgcaaggccgccgtgctgtgggagcagaagcagcccttcagcatcgaggagatcgaggtggccccccccaagaccaaggaggtgagaatcaagatcctggccaccggcatctgcagaaccgacgaccacgtgatcaagggcaccatggtgagcaagttccccgtgatcgtgggccacgaggccaccggcatcgtggagagcatcggcgagggcgtgaccaccgtgaagcccggcgacaaggtgatccccctgttcctgccccagtgcagagagtgcaacgcctgcagaaaccccgacggcaacctgtgcatcagaagcgacatcaccggcagaggcgtgctggccgacggcaccaccagattcacctgcaagggcaagcccgtgcaccacttcatgaacaccagcaccttcaccgagtacaccgtggtggacgagagcagcgtggccaagatcgacgacgccgccccccccgagaaggtgtgcctgatcggctgcggcttcagcaccggctacggcgccgccgtgaagaccggcaaggtgaagcccggcagcacctgcgtggtgttcggcctgggcggcgtgggcctgagcgtgatcatgggctgcaagagcgccggcgccagcagaatcatcggcatcgacctgaacaaggacaagttcgagaaggccatggccgtgggcgccaccgagtgcatcagccccaaggacagcaccaagcccatcagcgaggtgctgagcgagatgaccggcaacaacgtgggctacaccttcgaggtgatcggccacctggagaccatgatcgacgccctggccagctgccacatgaactacggcaccagcgtggtggtgggcgtgccccccagcgccaagatgctgacctacgaccccatgctgctgttcaccggcagaacctggaagggctgcgtgttcggcggcctgaagagcagagacgacgtgcccaagctggtgaccgagttcctggccaagaagttcgacctggaccagctgatcacccacgtgctgcccttcaagaagatcagcgagggcttcgagctgctgaacagcggccagagcatcagaaccgtgctgaccttctag

SEQ ID NO: 14333 - DNA, 1125 bp, Artificial Sequence
  derived and/or modified sequence
atgggcaccgccggcaaggtgatcaagtgcaaggccgccgtgctgtgggagcagaagcagcccttcagcatcgaggagatcgaggtggccccccccaagaccaaggaggtgagaatcaagatcctggccaccggcatctgcagaaccgacgaccacgtgatcaagggcaccatggtgagcaagttccccgtgatcgtgggccacgaggccaccggcatcgtggagagcatcggcgagggcgtgaccaccgtgaagcccggcgacaaggtgatccccctgttcctgccccagtgcagagagtgcaacgcctgcagaaaccccgacggcaacctgtgcatcagaagcgacatcaccggcagaggcgtgctggccgacggcaccaccagattcacctgcaagggcaagcccgtgcaccacttcatgaacaccagcaccttcaccgagtacaccgtggtggacgagagcagcgtggccaagatcgacgacgccgccccccccgagaaggtgtgcctgatcggctgcggcttcagcaccggctacggcgccgccgtgaagaccggcaaggtgaagcccggcagcacctgcgtggtgttcggcctgggcggcgtgggcctgagcgtgatcatgggctgcaagagcgccggcgccagcagaatcatcggcatcgacctgaacaaggacaagttcgagaaggccatggccgtgggcgccaccgagtgcatcagccccaaggacagcaccaagcccatcagcgaggtgctgagcgagatgaccggcaacaacgtgggctacaccttcgaggtgatcggccacctggagaccatgatcgacgccctggccagctgccacatgaactacggcaccagcgtggtggtgggcgtgccccccagcgccaagatgctgacctacgaccccatgctgctgttcaccggcagaacctggaagggctgcgtgttcggcggcctgaagagcagagacgacgtgcccaagctggtgaccgagttcctggccaagaagttcgacctggaccagctgatcacccacgtgctgcccttcaagaagatcagcgagggcttcgagctgctgaacagcggccagagcatcagaaccgtgctgaccttctag

SEQ ID NO: 14334 - DNA, 954 bp, Artificial Sequence
  derived and/or modified sequence
atggtgagcaagttccccgtgatcgtgggccacgaggccaccggcatcgtggagagcatcggcgagggcgtgaccaccgtgaagcccggcgacaaggtgatccccctgttcctgccccagtgcagagagtgcaacgcctgcagaaaccccgacggcaacctgtgcatcagaagcgacatcaccggcagaggcgtgctggccgacggcaccaccagattcacctgcaagggcaagcccgtgcaccacttcatgaacaccagcaccttcaccgagtacaccgtggtggacgagagcagcgtggccaagatcgacgacgccgccccccccgagaaggtgtgcctgatcggctgcggcttcagcaccggctacggcgccgccgtgaagaccggcaaggtgaagcccggcagcacctgcgtggtgttcggcctgggcggcgtgggcctgagcgtgatcatgggctgcaagagcgccggcgccagcagaatcatcggcatcgacctgaacaaggacaagttcgagaaggccatggccgtgggcgccaccgagtgcatcagccccaaggacagcaccaagcccatcagcgaggtgctgagcgagatgaccggcaacaacgtgggctacaccttcgaggtgatcggccacctggagaccatgatcgacgccctggccagctgccacatgaactacggcaccagcgtggtggtgggcgtgccccccagcgccaagatgctgacctacgaccccatgctgctgttcaccggcagaacctggaagggctgcgtgttcggcggcctgaagagcagagacgacgtgcccaagctggtgaccgagttcctggccaagaagttcgacctggaccagctgatcacccacgtgctgcccttcaagaagatcagcgagggcttcgagctgctgaacagcggccagagcatcagaaccgtgctgaccttctag

SEQ ID NO: 14335 - protein, 326 aa, Artificial Sequence
  derived and/or modified sequence
MPPSISAFQAAYIGIEVLIALVSVPGNVLVIWAVKVNQALRDATFCFIVSLAVADVAVGALVIPLAILINIGPQTYFHTCLMVACPVLILTQSSILALLAIAVDRYLRVKIPLRYKMVVTPRRAAVAIAGCWILSFVVGLTPMFGWNNLSAVERAWAANGSMGEPVIKCEFEKVISMEYMVYFNFFVWVLPPLLLMVLIYLEVFYLIRKQLNKKVSASSGDPQKYYGKELKIAKSLALILFLFALSWLPLHILNCITLFCPSCHKPSILTYIAIFLTHGNSAMNPIVYAFRIQKFRVTFLKIWNDHFRCQPAPPIDEDLPEERPDD

SEQ ID NO: 14336 - protein, 125 aa, Artificial Sequence
  derived and/or modified sequence
MPPSISAFQAAYIGIEVLIALVSVPGNVLVIWAVKVNQALRDATFCFIVSLAVADVAVGALVIPLAILINIGPQTYFHTCLMVACPVLILTQSSILALLAIAVDRYLRVKIPLRRISQCMASTKS

SEQ ID NO: 14337 - DNA, 981 bp, Artificial Sequence
  derived and/or modified sequence
atgccccccagcatttccgccttccaagccgcttacattggaatcgaggtgctgatcgccttggtgtcggtccccggtaatgttctggtaatttgggccgtgaaggtgaatcaggctttgcgcgacgcaaccttttgcttcattgtgagcttggcggtggctgatgtggcagttggggctcttgtgatccccctggcaattctcattaatattgggccacagacctacttccacacttgtctgatggttgcctgccctgtgctcatacttactcagtcatctatactggcactgcttgctattgctgtggaccgttacctgcgcgtcaagattccgctaaggtacaagatggtggtgacccctaggcgtgccgctgtagcgatagcgggctgttggattctgagctttgtggtggggctgacacccatgttcggatggaataaccttagcgctgtcgagagggcatgggcagcaaatggaagcatgggggagcccgttatcaaatgcgagtttgagaaagtcatcagcatggagtatatggtttacttcaattttttcgtgtgggtcctgccgcccctgctgctgatggttctcatctatctggaagtcttctacctcatacggaagcaactgaataaaaaagtgtctgcttcaagcggcgacccacagaaatactatgggaaggaactcaagattgcgaagagcttggcgctgatcctctttctgttcgcactcagttggcttccacttcacatccttaattgtattacactgttctgcccctcctgccacaaacctagtatcctcacatacatcgcgatatttctgacgcacggaaatagtgccatgaatcccattgtctacgccttccgaatccaaaagttcagagtcacattcttgaagatctggaacgatcattttcggtgccaaccagcgcctccgatagacgaagacttgcccgaagaaaggcccgatgactag

SEQ ID NO: 14338 - DNA, 981 bp, Artificial Sequence
  derived and/or modified sequence
atgccgccttctatcagcgcctttcaggccgcctatatcggcatcgaggtcctaattgcgctcgtcagcgtcccaggcaatgtcctcgtgatatgggcagtaaaagttaaccaggctctaagagatgcaacattctgtttcattgtctcccttgcagtcgctgatgtggcagttggtgcactcgtgattcctctggctatactgatcaacatcggccctcagacctacttccatacctgccttatggtggcatgcccggtgctcatattgacacagagcagcatcctcgcccttcttgcaattgccgtcgaccgctacctacgagtgaagattcctctgcgctacaagatggtggtgacgcccagaagggcagccgtcgcaatcgcaggatgctggattctgtccttcgttgtcggtttgactcccatgtttggctggaataacctgtctgccgttgaaagggcatgggcagccaatggctcaatgggagaaccagtaattaagtgcgaattcgagaaggtcatttctatggagtatatggtgtactttaacttttttgtatgggttctgcccccattgctgttaatggtgctcatctatctggaggtgttctacctcattagaaaacagcttaataaaaaagttagcgcaagcagcggggaccctcagaaatattatggtaaggaactcaagatcgcaaagtcactggcgttaattctgttcctatttgctttgtcatggctgcccttacacattctaaattgtattactctgttttgcccatcttgtcacaaaccaagcatattaacctacatagccatatttctgacgcatggcaattctgcgatgaacccaatcgtctacgccttcagaattcagaaatttagagtgaccttcctcaagatttggaacgatcatttccgatgtcagcctgcccctcccatcgacgaggatttacccgaagaaaggcccgatgattag

SEQ ID NO: 14339 - DNA, 378 bp, Artificial Sequence
  derived and/or modified sequence
atgcctcctagcatcagcgccttccaggctgcttacattggcatcgaggtgcttattgcactcgtgagcgtgccaggaaatgtgctcgtcatttgggccgtgaaagttaatcaggctctgcgggatgccactttttgcttcatcgtatccttggccgtcgctgacgtggcggtaggcgcccttgttattcccctggccatactgataaacattggtccacagacatacttccatacatgtcttatggttgcgtgcccagtcctaatcttaacacagagctccatcctcgccttacttgctatcgcagtggaccgctacctgcgggtgaagattccacttcgccgaattagccagtgtatggcttccactaagtcctag

SEQ ID NO: 14340 - DNA, 981 bp, Artificial Sequence
  derived and/or modified sequence
atgcctccctccattagtgcctttcaggctgcctacattggaatcgaggttcttattgccctggtgtctgtcccgggcaacgtgctggtcatttgggccgtcaaagtgaaccaggccctccgggatgccactttttgctttatcgttagcttggccgtggccgacgtggcagtgggcgctcttgtgattccgttggcaatactaataaacatcggaccccagacctactttcacacctgcctgatggtcgcttgcccagttctcatcctgacccaatcttccatccttgctctcttggccatcgccgtcgatcgatatctcagggttaaaatccctctgcgctataaaatggtggttactcctaggcgtgccgccgtggccattgcgggatgctggatcctgagctttgtagtagggctcactcccatgtttggctggaataatctgagtgctgtggagagggcctgggcagctaatgggtctatgggggaaccagtaattaagtgtgaattcgagaaagttatctctatggagtacatggtatattttaatttcttcgtctgggtgctgccgccgctgctactgatggtgctcatatacctggaggttttctaccttattcgcaagcagcttaataagaaagtgtcagcctcatctggcgatcctcagaaatattatgggaaggagctaaagattgccaagtctcttgccttaattctttttctgtttgcccttagctggctgccattgcatatccttaactgcattacgcttttttgcccatcctgccataagccaagcatccttacctatatcgccatattcctcacccacgggaattccgccatgaacccaatcgtgtacgcatttagaatccagaagttcagagtgactttcttgaagatctggaacgaccattttcggtgtcagcctgccccacccatcgatgaggatctgcccgaggagcgacccgacgactag

SEQ ID NO: 14341 - DNA, 2896 bp, Artificial Sequence
  derived and/or modified sequence
atgagtgtcagaagtgtgaagggtgcctgttctgaatcccagagcctcctctccctctgtgaggctggcaggtgaggaagggtttaacctcactggaaggaatccctggagctagcggctgctgaaggcgtcgaggtgtgggggcacttggacagaacagtcaggcagccgggagctctgccagctttggtgaccttgggccgggctgggagcgctgcggcgggagccggaggactatgagctgccgcgcgttgtccagagcccagcccagccctaccgcgcgcggcccggagctctgttccctggaactttgggcactgcctctgggacccctgccggccagcaggcaggatggtgcttgcctcgtgccccttggtgcccgtctgctgatgtgcccagcctgtgcccgccatgccgccctccatctcagctttccaggccgcctacatcggcatcgaggtgctcatcgccctggtctctgtgcccgggaacgtgctggtgatctgggcggtgaaggtgaaccaggcgctgcgggatgccaccttctgcttcatcgtgtcgctggcggtggctgatgtggccgtgggtgccctggtcatccccctcgccatcctcatcaacattgggccacagacctacttccacacctgcctcatggttgcctgtccggtcctcatcctcacccagagctccatcctggccctgctggcaattgctgtggaccgctacctccgggtcaagatccctctccggtacaagatggtggtgaccccccggagggcggcggtggccatagccggctgctggatcctctccttcgtggtgggactgacccctatgtttggctggaacaatctgagtgcggtggagcgggcctgggcagccaacggcagcatgggggagcccgtgatcaagtgcgagttcgagaaggtcatcagcatggagtacatggtctacttcaacttctttgtgtgggtgctgcccccgcttctcctcatggtcctcatctacctggaggtcttctacctaatccgcaagcagctcaacaagaaggtgtcggcctcctccggcgacccgcagaagtactatgggaaggagctgaagatcgccaagtcgctggccctcatcctcttcctctttgccctcagctggctgcctttgcacatcctcaactgcatcaccctcttctgcccgtcctgccacaagcccagcatccttacctacattgccatcttcctcacgcacggcaactcggccatgaaccccattgtctatgccttccgcatccagaagttccgcgtcaccttccttaagatttggaatgaccatttccgctgccagcctgcacctcccattgacgaggatctcccagaagagaggcctgatgactagaccccgccttccgctcccaccagcccacatccagtggggtctcagtccagtcctcacatgcccgctgtcccaggggtctccctgagcctgccccagctgggctgttggctgggggcatgggggaggctctgaagagatacccacagagtgtggtccctccactaggagttaactaccctacacctctgggccctgcaggaggcctgggagggcaagggtcctacggagggaccaggtgtctagaggcaacagtgttctgagcccccacctgcctgaccatcccatgagcagtccagagcttcagggctgggcaggtcctggggaggctgagactgcagaggagccacctgggctgggagaaggtgcttgggcttctgcggtgaggcaggggagtctgcttgtcttagatgttggtggtgcagccccaggaccaagcttaaggagaggagagcatctgctctgagacggatggaaggagagaggttgaggatgcactggcctgttctgtaggagagactggccagaggcagctaaggggcaggaatcaaggagcctccgttcccacctctgaggactctggaccccaggccataccaggtgctagggtgcctgctctccttgccctgggccagcccaggattgtacgtgggagaggcagaaagggtaggttcagtaatcatttctgatatttgctggagtgctggctccacgccctggggagtgagcttggtgcggtaggtgctggcctcaaacagccacgaggtggtagctctgagccctccttcttgccctgagctttccggggaggagccttggagtgtaattacctgtcatctgggccaccagctccactggcctgcccgttgccgggcctggactgtcctaggtgaccccatctctgctgcttctgggcctgatggagaggagaacactagacatgccaactcgggagcattctgcctgcctgggaacggggtggacgagggagtgtctgtaaggactcagtgttgactgtaggcgcccctggggtgggtttagcaggctgcagcaggcagaggagagtacccccctgagagcatgtgggggaaggccttgctgtcatgtgaatccctcaatacccctagtatctggctgggttttcaggggctttggaagctctgttgcaggtgtccgggggtctaggactttagggatctggggaaggaccaacccatgccctgccaagcctggagcccctgtgttggggggcaaggtgggggagcctggagcccctgtgtgggagggcgaggcgggggagcctggagcccctgtgtgggagggcgaggcgggggatcctggagcccctgtgtcggggggcgagggaggggaggtggccgtcgagttgaccttctgaacatgagtgtcaactccaggacttgcttccaagcccttccctctgttggaaattgggtgtgccctggctcccaagggaggcccatgtgactaataaaaaactgtgaaccct

SEQ ID NO: 14342 - DNA, 2919 bp, Artificial Sequence
  derived and/or modified sequence
gtgcggagcccgattgtcactcagctcctgcgccgggggcgacagagccgcaggcgcccgagtcgagtcccagccagctaccatccctctggagcttaccggccggccttggcttccccaggaatccctggagctagcggctgctgaaggcgtcgaggtgtgggggcacttggacagaacagtcaggcagccgggagctctgccagctttggtgaccttgggccgggctgggagcgctgcggcgggagccggaggactatgagctgccgcgcgttgtccagagcccagcccagccctaccgcgcgcggcccggagctctgttccctggaactttgggcactgcctctgggacccctgccggccagcaggcaggatggtgcttgcctcgtgccccttggtgcccgtctgctgatgtgcccagcctgtgcccgccatgccgccctccatctcagctttccaggccgcctacatcggcatcgaggtgctcatcgccctggtctctgtgcccgggaacgtgctggtgatctgggcggtgaaggtgaaccaggcgctgcgggatgccaccttctgcttcatcgtgtcgctggcggtggctgatgtggccgtgggtgccctggtcatccccctcgccatcctcatcaacattgggccacagacctacttccacacctgcctcatggttgcctgtccggtcctcatcctcacccagagctccatcctggccctgctggcaattgctgtggaccgctacctccgggtcaagatccctctccggtacaagatggtggtgaccccccggagggcggcggtggccatagccggctgctggatcctctccttcgtggtgggactgacccctatgtttggctggaacaatctgagtgcggtggagcgggcctgggcagccaacggcagcatgggggagcccgtgatcaagtgcgagttcgagaaggtcatcagcatggagtacatggtctacttcaacttctttgtgtgggtgctgcccccgcttctcctcatggtcctcatctacctggaggtcttctacctaatccgcaagcagctcaacaagaaggtgtcggcctcctccggcgacccgcagaagtactatgggaaggagctgaagatcgccaagtcgctggccctcatcctcttcctctttgccctcagctggctgcctttgcacatcctcaactgcatcaccctcttctgcccgtcctgccacaagcccagcatccttacctacattgccatcttcctcacgcacggcaactcggccatgaaccccattgtctatgccttccgcatccagaagttccgcgtcaccttccttaagatttggaatgaccatttccgctgccagcctgcacctcccattgacgaggatctcccagaagagaggcctgatgactagaccccgccttccgctcccaccagcccacatccagtggggtctcagtccagtcctcacatgcccgctgtcccaggggtctccctgagcctgccccagctgggctgttggctgggggcatgggggaggctctgaagagatacccacagagtgtggtccctccactaggagttaactaccctacacctctgggccctgcaggaggcctgggagggcaagggtcctacggagggaccaggtgtctagaggcaacagtgttctgagcccccacctgcctgaccatcccatgagcagtccagagcttcagggctgggcaggtcctggggaggctgagactgcagaggagccacctgggctgggagaaggtgcttgggcttctgcggtgaggcaggggagtctgcttgtcttagatgttggtggtgcagccccaggaccaagcttaaggagaggagagcatctgctctgagacggatggaaggagagaggttgaggatgcactggcctgttctgtaggagagactggccagaggcagctaaggggcaggaatcaaggagcctccgttcccacctctgaggactctggaccccaggccataccaggtgctagggtgcctgctctccttgccctgggccagcccaggattgtacgtgggagaggcagaaagggtaggttcagtaatcatttctgatatttgctggagtgctggctccacgccctggggagtgagcttggtgcggtaggtgctggcctcaaacagccacgaggtggtagctctgagccctccttcttgccctgagctttccggggaggagccttggagtgtaattacctgtcatctgggccaccagctccactggcctgcccgttgccgggcctggactgtcctaggtgaccccatctctgctgcttctgggcctgatggagaggagaacactagacatgccaactcgggagcattctgcctgcctgggaacggggtggacgagggagtgtctgtaaggactcagtgttgactgtaggcgcccctggggtgggtttagcaggctgcagcaggcagaggagagtacccccctgagagcatgtgggggaaggccttgctgtcatgtgaatccctcaatacccctagtatctggctgggttttcaggggctttggaagctctgttgcaggtgtccgggggtctaggactttagggatctggggaaggaccaacccatgccctgccaagcctggagcccctgtgttggggggcaaggtgggggagcctggagcccctgtgtgggagggcgaggcgggggagcctggagcccctgtgtgggagggcgaggcgggggatcctggagcccctgtgtcggggggcgagggaggggaggtggccgtcgagttgaccttctgaacatgagtgtcaactccaggacttgcttccaagcccttccctctgttggaaattgggtgtgccctggctcccaagggaggcccatgtgactaataaaaaactgtgaaccctg

SEQ ID NO: 14343 - DNA, 3407 bp, Artificial Sequence
  derived and/or modified sequence
aacatgaggggattggactggatgccttatggcttagcgctgtgctatgaagaggaagaaggaggaaggaaaaggagcgcagagcgggttacactgccaggagatcctgggaagctaggtcacttccctgagcctcagcatccttatctgcaaaatagaaattgctaatagactaaaaggcaattctgaaagatggatgagaaaggaatataatgactcagggtagagcctgcaaaacaatatgggatgagaagatgcagggactggtttcatggagagagcagggttttaggattgggggagggtgccagggctaccgactgctttgggagatcccagagggggcattctgaagtcctgcagaagagatgctgtgccgtgaggggtgaggggtcgctggaggccagaccagggctcccaggagtcctgcattgagaagggagagagtggacacaggaaggatgcgcctctgtccagtcctgaggctgggcgcacacaccaggcccttcgaaaagctcacattttttccagcttttctcacccagtatcacttcctttgttaagaggagggggtgggggaggagacggaggatgaggagggaggggctggcgggtgccgccgccgcccccgccccctcccggtgtgcggagcccgattgtcactcagctcctgcgccgggggcgacagagccgcaggcgcccgagtcgagtcccagccagctaccatccctctggagcttaccggccggccttggcttccccaggaatccctggagctagcggctgctgaaggcgtcgaggtgtgggggcacttggacagaacagtcaggcagccgggagctctgccagctttggtgaccttgggtgcttgcctcgtgccccttggtgcccgtctgctgatgtgcccagcctgtgcccgccatgccgccctccatctcagctttccaggccgcctacatcggcatcgaggtgctcatcgccctggtctctgtgcccgggaacgtgctggtgatctgggcggtgaaggtgaaccaggcgctgcgggatgccaccttctgcttcatcgtgtcgctggcggtggctgatgtggccgtgggtgccctggtcatccccctcgccatcctcatcaacattgggccacagacctacttccacacctgcctcatggttgcctgtccggtcctcatcctcacccagagctccatcctggccctgctggcaattgctgtggaccgctacctccgggtcaagatccctctccggtacaagatggtggtgaccccccggagggcggcggtggccatagccggctgctggatcctctccttcgtggtgggactgacccctatgtttggctggaacaatctgagtgcggtggagcgggcctgggcagccaacggcagcatgggggagcccgtgatcaagtgcgagttcgagaaggtcatcagcatggagtacatggtctacttcaacttctttgtgtgggtgctgcccccgcttctcctcatggtcctcatctacctggaggtcttctacctaatccgcaagcagctcaacaagaaggtgtcggcctcctccggcgacccgcagaagtactatgggaaggagctgaagatcgccaagtcgctggccctcatcctcttcctctttgccctcagctggctgcctttgcacatcctcaactgcatcaccctcttctgcccgtcctgccacaagcccagcatccttacctacattgccatcttcctcacgcacggcaactcggccatgaaccccattgtctatgccttccgcatccagaagttccgcgtcaccttccttaagatttggaatgaccatttccgctgccagcctgcacctcccattgacgaggatctcccagaagagaggcctgatgactagaccccgccttccgctcccaccagcccacatccagtggggtctcagtccagtcctcacatgcccgctgtcccaggggtctccctgagcctgccccagctgggctgttggctgggggcatgggggaggctctgaagagatacccacagagtgtggtccctccactaggagttaactaccctacacctctgggccctgcaggaggcctgggagggcaagggtcctacggagggaccaggtgtctagaggcaacagtgttctgagcccccacctgcctgaccatcccatgagcagtccagagcttcagggctgggcaggtcctggggaggctgagactgcagaggagccacctgggctgggagaaggtgcttgggcttctgcggtgaggcaggggagtctgcttgtcttagatgttggtggtgcagccccaggaccaagcttaaggagaggagagcatctgctctgagacggatggaaggagagaggttgaggatgcactggcctgttctgtaggagagactggccagaggcagctaaggggcaggaatcaaggagcctccgttcccacctctgaggactctggaccccaggccataccaggtgctagggtgcctgctctccttgccctgggccagcccaggattgtacgtgggagaggcagaaagggtaggttcagtaatcatttctgatatttgctggagtgctggctccacgccctggggagtgagcttggtgcggtaggtgctggcctcaaacagccacgaggtggtagctctgagccctccttcttgccctgagctttccggggaggagccttggagtgtaattacctgtcatctgggccaccagctccactggcctgcccgttgccgggcctggactgtcctaggtgaccccatctctgctgcttctgggcctgatggagaggagaacactagacatgccaactcgggagcattctgcctgcctgggaacggggtggacgagggagtgtctgtaaggactcagtgttgactgtaggcgcccctggggtgggtttagcaggctgcagcaggcagaggagagtacccccctgagagcatgtgggggaaggccttgctgtcatgtgaatccctcaatacccctagtatctggctgggttttcaggggctttggaagctctgttgcaggtgtccgggggtctaggactttagggatctggggaaggaccaacccatgccctgccaagcctggagcccctgtgttggggggcaaggtgggggagcctggagcccctgtgtgggagggcgaggcgggggagcctggagcccctgtgtgggagggcgaggcgggggatcctggagcccctgtgtcggggggcgagggaggggaggtggccgtcgagttgaccttctgaacatgagtgtcaactccaggacttgcttccaagcccttccctctgttggaaattgggtgtgccctggctcccaagggaggcccatgtgactaataaaaaactgtgaaccctg

SEQ ID NO: 14344 - DNA, 981 bp, Artificial Sequence
  derived and/or modified sequence
atgccacccagcatcagcgccttccaggccgcctacatcggcatcgaggtgctgattgccctggtgtctgtgcctggaaatgtgctggtgatctgggccgtgaaggtgaaccaggccctgagagatgccaccttctgcttcatcgtgtccctggccgtggctgatgtggccgtgggcgccctggtgatccccctggccatcctgatcaacatcggcccccagacctacttccacacctgcctgatggtggcctgccctgtgctgatcctgacccagagcagcatcctggccctgctggccatcgctgtggaccgctacctgcgggtgaagatccccctgcgctacaagatggtggtgaccccccggcgggctgctgtggccatcgccggctgctggatcctgagctttgtggtgggcctgacccccatgtttggctggaacaacctgtctgctgtggagcgggcctgggccgccaacggctccatgggagagcctgtgatcaagtgtgaatttgagaaggtgatctccatggagtacatggtgtacttcaacttctttgtgtgggtgctgccccccctgctgctgatggtgctgatctacctggaggtgttctacctgatcaggaagcagctgaacaagaaggtgtctgccagcagcggggacccccagaagtactacggcaaggagctgaagatcgccaagagcctggccctgatcctcttcctgtttgccctgtcctggctgcccctgcacatcctgaactgcatcaccctcttctgccccagctgccacaagcccagcatcctgacctacatcgccatcttcctgacccacggcaacagcgccatgaaccccatcgtgtatgccttccgcatccagaagttccgggtgaccttcctgaagatctggaatgaccacttccgctgccagcctgccccacccattgatgaggacctgcctgaggagaggccagatgactag

SEQ ID NO: 14345 - DNA, 378 bp, Artificial Sequence
  derived and/or modified sequence
atgccacccagcatcagcgccttccaggccgcctacatcggcatcgaggtgctgattgccctggtgtctgtgcctggaaatgtgctggtgatctgggccgtgaaggtgaaccaggccctgagagatgccaccttctgcttcatcgtgtccctggccgtggctgatgtggccgtgggcgccctggtgatccccctggccatcctgatcaacatcggcccccagacctacttccacacctgcctgatggtggcctgccctgtgctgatcctgacccagagcagcatcctggccctgctggccatcgctgtggaccgctacctgcgggtgaagatccccctgcggcgcatcagccagtgcatggccagcaccaagagctag

SEQ ID NO: 14346 - DNA, 981 bp, Artificial Sequence
  derived and/or modified sequence
atgccccccagcatcagcgccttccaggccgcctacatcggcatcgaggtcctgatagcgctggtaagtgttccagggaatgtgctagtgatatgggctgtgaaggtgaatcaggctctgcgggatgctaccttttgtttcattgtcagcttggcagtggctgatgttgcggtaggagccttggttattccactggcaatcctgataaatatcgggcctcagacgtacttccacacctgtctgatggtggcgtgccccgtgcttatcctgactcagtcatccatactggcgctgctggctatcgcagtggaccgctatcttagggtgaaaatcccgctgcgctataagatggtggtcacacctcggcgtgctgccgttgctatagctggttgctggatcctaagcttcgtcgtgggattaacgccaatgttcggatggaataatttaagtgcagtggagcgggcctgggccgccaacggatcaatgggcgagccagtgattaagtgcgagtttgagaaggtgatctccatggaatatatggtgtattttaactttttcgtttgggtgctgcctcccctgcttcttatggtgcttatctacttggaggttttctacttgattcgcaaacaacttaacaagaaggtgagtgcttcttccggcgatccccagaagtactacgggaaggagctcaagatcgctaagtcgttggctttgatactcttcctcttcgccctgagttggctccctctgcatatccttaactgtattaccctgttttgcccctcgtgccataagcctagcattctcacctacatcgccattttcctgacacacgggaattccgctatgaatccgatagtttacgcctttaggattcagaagttcagagtcactttcttgaaaatttggaatgaccactttcgctgccagcctgcacctcctattgatgaggatttaccagaagagcgccctgatgattag

SEQ ID NO: 14347 - DNA, 981 bp, Artificial Sequence
  derived and/or modified sequence
atgccccccagcatcagcgccttccaggccgcctacatcggcatcgaggttctgatcgcccttgtaagcgttcccggtaatgttctcgtgatctgggctgtcaaagtcaatcaagccctcagagacgccaccttttgtttcatcgtgtctctcgcagtagccgacgtcgccgtcggagctcttgtgatacccctcgccattctcataaatatcggcccccaaacatacttccacacatgcctcatggtggcttgccccgtgcttattctcacgcaatcctctattcttgcactgctcgccatcgctgtcgacaggtacctcagagtgaaaatcccactccgttataagatggttgtaaccccccgtagggctgccgtggcaattgcaggttgctggatcttgtctttcgtggttggattgacgcctatgtttggttggaataatctgagtgctgtagagagggcatgggccgccaatgggagcatgggcgagcctgtgataaaatgtgaattcgagaaagttatcagtatggagtacatggtgtacttcaactttttcgtgtgggtgttaccccccctcctcttgatggtgctgatttatcttgaggtgttttacctgattagaaagcagctgaataaaaaagtcagcgcctcatcaggcgatccccagaagtactatggaaaggaacttaaaatcgcgaaatccctggccttgatcctgtttttgtttgctctgagttggctgccattgcacatcctcaactgcattactctgttctgcccttcttgccacaagccaagtatcttgacatatattgccattttcctgacacacggaaactccgcgatgaacccaatagtctacgcctttcgcatccaaaagtttcgagtcacatttctgaagatttggaatgatcacttccgttgccagcccgccccaccaatcgacgaggacctgcccgaagagcgaccggatgactag

SEQ ID NO: 14348 - DNA, 378 bp, Artificial Sequence
  derived and/or modified sequence
atgccccccagcatcagcgccttccaggccgcctacatcggcatcgaggtgttgatcgccctggtttctgtgcccgggaacgtactcgtcatttgggccgtgaaggtgaaccaggccctacgcgacgccacattttgttttatcgtgtcacttgccgtcgctgacgttgccgtgggggcactcgtcattccactcgcaatcctcatcaacattggcccccagacttacttccacacctgcctcatggtcgcctgccccgtgttgatcctcactcagagcagtatcctggccctgctggcaatagctgtagaccgatacttaagagttaaaatcccactgcgtcggatatctcagtgcatggcgagcaccaagtcctag

SEQ ID NO: 14349 - DNA, 981 bp, Artificial Sequence
  derived and/or modified sequence
atgccccccagcatcagcgccttccaggccgcctacatcggcatcgaggtgctgattgcacttgtgtcggttccggggaacgtgttagtaatttgggctgtgaaggttaatcaggctctgcgggacgccaccttctgtttcatcgtgtctctagcagttgccgatgttgcagtaggcgcgttggtaatcccactcgctattctaataaatattggccctcagacttatttccacacgtgcctcatggtggcatgtccggtgttgatcctgacccagtctagcatcttggccctcctggcgatcgccgtagatcggtacttgcgcgtgaaaataccgctcagatataaaatggtcgtcaccccacggagagccgctgtggccatcgcagggtgctggatcctttcgtttgtggtgggactgacaccaatgttcggttggaacaatctctccgctgttgagcgggcatgggctgcgaacggtagcatgggcgagccagtgattaagtgtgagttcgaaaaggtaatctctatggaatacatggtttactttaattttttcgtatgggtgctgcctcccctgttgttgatggttctgatctatcttgaggtgttctatctcatccgcaaacaactcaacaaaaaagtatccgcctcatccggagatccgcagaagtattatgggaaggaattgaagattgccaaatcactggccctcatactatttctgttcgctctatcctggctcccactgcacatcttgaattgtatcacattgttctgcccatcatgccataaaccttcaatcctgacctacatcgccatatttctgacccacgggaactccgcaatgaacccgatagtgtacgcctttcgcatccagaagttccgcgtgacttttctcaagatctggaacgaccactttagatgccagcctgcccctcccatcgacgaagacctgcccgaggaacgtcccgatgattag

SEQ ID NO: 14350 - DNA, 981 bp, Artificial Sequence
  derived and/or modified sequence
atgccacctagcataagtgcgtttcaggctgcttacattggaatcgaagtactgatagctcttgtcagtgtgccagggaacgtgctcgttatttgggccgtcaaagtgaatcaggcgcttagagacgccacattctgctttatcgtctctctggccgttgccgatgtggccgttggcgcactcgttatccccctcgccatcttgattaacattggtcctcaaacctattttcacacgtgcttgatggtggcttgcccagtgttgatactgacacaatccagcatcctcgcgctgcttgctatagctgtcgacaggtacctgcgcgtgaagattccgctgaggtacaaaatggtcgtaacacctcgccgtgccgcagtcgctatcgcaggttgctggatcctcagttttgtggtggggctaacccctatgttcggttggaataacttgagtgccgtggagcgagcatgggccgctaatggatccatgggggagcccgtgatcaagtgtgagtttgagaaagttattagcatggagtacatggtgtactttaatttcttcgtgtgggtgctgccacctctgctgctgatggttctgatttatctcgaagtcttttacctgattcgaaagcaattaaataaaaaggtcagtgccagcagtggtgacccgcagaagtactatggtaaggagttaaagattgcgaaatcactggcactgatcttatttctgtttgcactttcttggctcccactccatattctgaattgtattaccttgttctgcccgtcctgccacaagccctccatcttaacttatatcgccatttttttgactcacggaaactccgctatgaatcccatagtttacgcgttcaggattcaaaagttccgggtgacttttcttaagatttggaacgaccactttcgctgtcaacctgccccacccattgacgaggacctgcctgaagaacggccagatgactag

SEQ ID NO: 14351 - DNA, 981 bp, Artificial Sequence
  derived and/or modified sequence
atgcctcccagcatctctgcttttcaagctgcatacattggcatcgaagtgctgatagctttagtaagcgtgcccggaaatgtgctggtcatctgggcggtgaaagttaatcaggcactgagagacgctacattctgcttcatcgtctcccttgcggtggccgatgtcgctgtgggtgcacttgtcatccctttggctattctcatcaatatcgggcctcagacctacttccatacgtgtctgatggtggcgtgcccggtgctgatcttaacccagtctagtattctggcattgctggcaattgcagtcgatagatacctgcgtgtcaaaattccactgcgctacaagatggtcgtcacgccgcgacgcgcagctgtggcaatcgccggatgttggatcctgtctttcgtagttggtctgacgccaatgttcggttggaacaacctgtcggcagttgagagagcttgggccgctaacggctccatgggcgagccagtgatcaagtgtgaattcgaaaaggttatatccatggagtatatggtctacttcaactttttcgtatgggtgctgcccccactcttgttgatggtgctgatctacctggaagtcttttacttaatcaggaagcagctgaataagaaagtatccgcttcctccggcgatccccagaagtactatgggaaggagttgaagatcgccaagtccctggctttaatcctgttcctcttcgccctaagttggttgcccttgcatattctcaattgcatcacactgttttgtccaagctgccataaaccttcaattcttacatacatcgctatcttccttacccacggaaacagcgctatgaatcccattgtttatgcattccgcatccagaaattccgggtgacatttctaaagatctggaacgatcacttcaggtgccagcctgctccccctatagatgaggacctccctgaagagcgcccagacgactag

SEQ ID NO: 14352 - DNA, 378 bp, Artificial Sequence
  derived and/or modified sequence
atgcccccttcaatatccgcgttccaggccgcttatataggtattgaagtgcttattgcactggtcagcgtccctggaaatgtgctcgtgatctgggccgttaaggtcaaccaggcattgagggacgctactttctgcttcatcgtttctctagccgtggcagacgtggcggtgggtgccctggtcataccacttgctattttgattaatatcggcccacagacatacttccacacctgcctcatggtggcgtgtcccgttcttattcttacacagagctccatattagcactgctggctatagctgtggaccgatacctgcgtgttaaaatccctttgcgtagaatcagccagtgcatggcttccactaagtcgtag

SEQ ID NO: 14353 - DNA, 981 bp, Artificial Sequence
  derived and/or modified sequence
atgcctccttccatctccgcattccaggccgcttacatcggtatcgaggtgctgatcgctctggtgagcgtcccaggaaatgtgctcgttatttgggcagtgaaggttaatcaggcactccgtgacgcaaccttctgtttcattgttagcctggctgtcgccgacgtggctgtgggagctttggtaattcctctggctatcctgatcaatatcggcccacagacctactttcacacttgcctcatggtggcatgcccagtgctgattcttactcagtcctccatcttagccctgctagccatagcagtggatagatatctgagagtcaaaatcccgctacgatacaagatggtagtgacacctagacgggcagcagtggcgatagccggatgctggatcctcagctttgtggttggcctgactccaatgttcggctggaacaatctgtccgccgtggagcgtgcctgggccgcaaatgggtccatgggggagcctgtcattaagtgtgaattcgagaaggtgatcagcatggagtacatggtttacttcaatttcttcgtatgggtgctacctccccttctcctcatggttctgatatatctggaggttttctatctgatccgcaagcagctgaacaagaaagtgtctgccagctctggggatcctcagaaatactacgggaaggaactgaagattgccaagtccttagctctgatcctctttctgttcgccttaagttggcttcctctccacatactaaattgcatcacactcttctgcccttcttgtcacaagccctcaatcttaacatatattgcgatatttcttacacatgggaatagcgctatgaatccaatagtatatgcttttcggattcagaaatttagagtgacttttttgaaaatctggaatgaccacttccgttgtcaacctgcgccacccatcgatgaggatctgccagaggaacggccagacgactag

SEQ ID NO: 14354 - DNA, 981 bp, Artificial Sequence
  derived and/or modified sequence
atgccccccagcatcagcgccttccaggccgcctacatcggcatcgaggtgctgatcgccctggtgagcgtgcccggcaacgtgctggtgatctgggccgtgaaggtgaaccaggccctgagagacgccaccttctgcttcatcgtgagcctggccgtggccgacgtggccgtgggcgccctggtgatccccctggccatcctgatcaacatcggcccccagacctacttccacacctgcctgatggtggcctgccccgtgctgatcctgacccagagcagcatcctggccctgctggccatcgccgtggacagatacctgagagtgaagatccccctgagatacaagatggtggtgacccccagaagagccgccgtggccatcgccggctgctggatcctgagcttcgtggtgggcctgacccccatgttcggctggaacaacctgagcgccgtggagagagcctgggccgccaacggcagcatgggcgagcccgtgatcaagtgcgagttcgagaaggtgatcagcatggagtacatggtgtacttcaacttcttcgtgtgggtgctgccccccctgctgctgatggtgctgatctacctggaggtgttctacctgatcagaaagcagctgaacaagaaggtgagcgccagcagcggcgacccccagaagtactacggcaaggagctgaagatcgccaagagcctggccctgatcctgttcctgttcgccctgagctggctgcccctgcacatcctgaactgcatcaccctgttctgccccagctgccacaagcccagcatcctgacctacatcgccatcttcctgacccacggcaacagcgccatgaaccccatcgtgtacgccttcagaatccagaagttcagagtgaccttcctgaagatctggaacgaccacttcagatgccagcccgccccccccatcgacgaggacctgcccgaggagagacccgacgactag

SEQ ID NO: 14355 - DNA, 378 bp, Artificial Sequence
  derived and/or modified sequence
atgccccccagcatcagcgccttccaggccgcctacatcggcatcgaggtgctgatcgccctggtgagcgtgcccggcaacgtgctggtgatctgggccgtgaaggtgaaccaggccctgagagacgccaccttctgcttcatcgtgagcctggccgtggccgacgtggccgtgggcgccctggtgatccccctggccatcctgatcaacatcggcccccagacctacttccacacctgcctgatggtggcctgccccgtgctgatcctgacccagagcagcatcctggccctgctggccatcgccgtggacagatacctgagagtgaagatccccctgagaagaatcagccagtgcatggccagcaccaagagctag

SEQ ID NO: 14356 - protein, 332 aa, Artificial Sequence
  derived and/or modified sequence
MLLETQDALYVALELVIAALSVAGNVLVCAAVGTANTLQTPTNYFLVSLAAADVAVGLFAIPFAITISLGFCTDFYGCLFLACFVLVLTQSSIFSLLAVAVDRYLAICVPLRYKSLVTGTRARGVIAVLWVLAFGIGLTPFLGWNSKDSATNNCTEPWDGTTNESCCLVKCLFENVVPMSYMVYFNFFGCVLPPLLIMLVIYIKIFLVACRQLQRTELMDHSRTTLQREIHAAKSLAMIVGIFALCWLPVHAVNCVTLFQPAQGKNKPKWAMNMAILLSHANSVVNPIVYAYRNRDFRYTFHKIISRYLLCQADVKSGNGQAGVQPALGVGL

SEQ ID NO: 14357 - DNA, 999 bp, Artificial Sequence
  derived and/or modified sequence
atgctgcttgagacacaagatgcattatacgtggccctcgagctggtgatagccgcactgagtgttgccggaaacgttctggtgtgcgcagcagtggggaccgccaatacgctccaaactccaacaaactactttctcgttagtttggccgcagccgatgtggcagttggtctcttcgctatcccgtttgctattacaatctctctgggattttgtacagacttttacggatgtttattccttgcatgtttcgtgctcgttctcacccagtcctccatcttctctcttctggctgtggctgtggaccgatacctagctatctgtgtgcccctgaggtataagagtttagtgactggaacgcgagccagaggtgttattgctgtgttgtgggtgttggcttttggcatcggcctcactcccttcttgggttggaattcgaaggatagcgctacgaataactgtactgaaccctgggacggaaccaccaatgagagttgctgtctggtgaaatgtttatttgaaaacgttgtccccatgtcttacatggtgtactttaacttcttcgggtgtgtgctgccccctctgctgatcatgctggtcatatacattaaaatcttcttagtcgcatgtagacagctacagcggactgagctcatggatcactctcgaaccacgttacaacgagaaatccacgccgctaagtcactggcgatgatcgttggcatctttgcactgtgttggctccccgtgcacgctgttaactgcgttaccctcttccagcctgctcaaggtaagaacaagccaaaatgggctatgaatatggctatattgctctcccatgctaattccgtcgtgaaccccatcgtttatgcgtatcgaaaccgcgactttagatatacctttcacaagatcatttcaagatatctgctttgtcaagccgacgtgaaatccggtaacggacaggccggcgtccagcctgctctcggagtgggactgtag

SEQ ID NO: 14358 - DNA, 1735 bp, Artificial Sequence
  derived and/or modified sequence
gggcaatttgttagttatccgccgccaccaagacgcggcacggcgcctggaccggaggggccccgcgcgggcgcgaactttgggctcgggcgagtgggtggtgctccgcccagcccgagacgggcgggcgcgcgggccaatgggtgccgcctcttggccgcggggggccccgacccgtgggtcccggccaccagcgccccagccccgaggctcagaagcggcaggcggaggcgcggtccgggcgctatggccatgcccggcgggtctcacgcggctgcccctcgcccggcgcgccttcggtagggggcgcccggggcccagctggcccggccatgctgctggagacacaggacgcgctgtacgtggcgctggagctggtcatcgccgcgctttcggtggcgggcaacgtgctggtgtgcgccgcggtgggcacggcgaacactctgcagacgcccaccaactacttcctggtgtccctggctgcggccgacgtggccgtggggctcttcgccatcccctttgccatcaccatcagcctgggcttctgcactgacttctacggctgcctcttcctcgcctgcttcgtgctggtgctcacgcagagctccatcttcagccttctggccgtggcagtcgacagatacctggccatctgtgtcccgctcaggtataaaagtttggtcacggggacccgagcaagaggggtcattgctgtcctctgggtccttgcctttggcatcggattgactccattcctggggtggaacagtaaagacagtgccaccaacaactgcacagaaccctgggatggaaccacgaatgaaagctgctgccttgtgaagtgtctctttgagaatgtggtccccatgagctacatggtatatttcaatttctttgggtgtgttctgcccccactgcttataatgctggtgatctacattaagatcttcctggtggcctgcaggcagcttcagcgcactgagctgatggaccactcgaggaccaccctccagcgggagatccatgcagccaagtcactggccatgattgtggggatttttgccctgtgctggttacctgtgcatgctgttaactgtgtcactcttttccagccagctcagggtaaaaataagcccaagtgggcaatgaatatggccattcttctgtcacatgccaattcagttgtcaatcccattgtctatgcttaccggaaccgagacttccgctacacttttcacaaaattatctccaggtatcttctctgccaagcagatgtcaagagtgggaatggtcaggctggggtacagcctgctctcggtgtgggcctatgatctaggctctcgcctcttccaggagaagatacaaatccacaagaaacaaagaggacacggctggttttcattgtgaaagatagctacacctcacaaggaaatggactgcctctcttgagcacttccctggagctaccacgtatctagctaatatgtatgtgtcagtagtaggctccaaggattgacaaatatatttatgatctattcagctgcttttactgtgtggattatgccaacagcttgaatggattctaacagactcttttgtttttaaaagtctgccttgtttatggtggaaaattactgaaactattttactgtgaaacagtgtgaactattataatgcaaatactttttaacttagaggcaatggaaaaataaaagttgactgtactaaaaatgta

SEQ ID NO: 14359 - DNA, 999 bp, Artificial Sequence
  derived and/or modified sequence
atgctgctggagacccaggatgccctgtatgtggccctggagctggtgattgctgccctgtctgtggccggaaatgtgctggtgtgtgccgctgtgggcacagccaacaccctgcagacccccaccaactacttcctggtgtccctggccgctgctgatgtggccgtgggcctgtttgccatcccctttgccatcaccatcagcctgggcttctgcacagacttctacggctgcctcttcctggcctgctttgtgctggtgctgacccagagcagcatcttcagcctgctggccgtggccgtggaccgctacctggccatctgtgtgcccctgcgctacaagagcctggtgacaggcacccgggcccggggcgtgattgctgtgctgtgggtgctggccttcggcatcggcctgacccccttcctgggctggaacagcaaggacagcgccaccaacaactgcacagagccctgggatggcaccaccaatgaaagctgctgcctggtgaagtgcctgtttgaaaatgtggtgcccatgagctacatggtgtacttcaacttcttcggctgtgtgctgccccccctgctgatcatgctggtgatctacatcaagatcttcctggtggcctgccggcagctgcagaggacagagctgatggaccacagcaggaccaccctgcagcgggagatccacgccgccaagagcctggccatgattgtgggcatctttgccctgtgctggctgcctgtgcatgctgtgaactgtgtgaccctcttccagcctgcccagggcaagaacaagcccaagtgggccatgaacatggccatcctgctgagccacgccaacagcgtggtgaaccccatcgtgtatgcctacagaaacagagacttccgctacaccttccacaagatcatcagccgctacctgctgtgccaggctgatgtgaagtctggaaatggccaggccggcgtgcagcctgccctgggcgtgggcctgtag

SEQ ID NO: 14360 - DNA, 999 bp, Artificial Sequence
  derived and/or modified sequence
atgctgctggagacccaggacgccctgtacgtggccctggagctggtcatcgcggcgctttctgttgcaggcaatgtcctggtttgcgctgccgtggggacagctaacaccctgcagacgcccaccaattatttcttggtttctttggcagcagccgacgtggccgttggcttattcgctatcccatttgctatcacgatttctttgggattctgtacagacttctacgggtgcctgttcctggcatgctttgttctcgtcctgacgcagagcagcatattctccctgctcgctgttgccgtggacaggtacttagccatttgcgtaccactgcggtacaaaagcctggtaacaggaactcgcgctagaggcgtgatcgcggtgctctgggtgctggcatttggcatcggactcacacccttcctcgggtggaacagtaaagactctgccaccaataactgcacagagccttgggatggtacgaccaacgagtcgtgctgcctagtcaagtgcctcttcgaaaacgtggtgccaatgagttatatggtatactttaatttttttggttgtgtgctacctcctctgctaataatgctagtgatttatatcaagattttcttagttgcctgtcgccaacttcagcgaactgagctgatggaccacagccggactaccctccagcgggagattcacgccgcgaagagcctggcaatgattgttggaatctttgctctgtgctggctccccgtgcacgcagttaactgtgtgacactgtttcaacccgcccaaggcaaaaacaaacccaagtgggctatgaatatggctattttgttaagtcacgctaactccgtggtgaacccaatcgtttacgcttacagaaacagagactttaggtacaccttccacaagatcatatcaaggtacctgctgtgccaggctgacgtgaaaagtggaaatggccaggccggcgtgcagccagcactcggtgttgggctgtag

SEQ ID NO: 14361 - DNA, 999 bp, Artificial Sequence
  derived and/or modified sequence
atgctgctggaaacccaagacgctctgtacgtcgcactcgagctggttattgcagccctcagcgtggcaggaaatgtccttgtgtgcgccgcagtgggaactgccaacactctccagactccaactaactacttcctcgtatctctggccgctgccgacgtggcggttggactctttgcgattcctttcgcgatcactatctcgctggggttctgcaccgatttctacggttgtctctttctggcctgcttcgtactggttctgactcagagctcaatattctctcttctagcagtagccgtggacagatacctagccatctgtgtgcccttgaggtataaatctctggtgaccggtacccgcgctcgcggagtaatagcagtgctatgggtgttagcatttgggatcggactaacaccattccttgggtggaactccaaggactccgccacaaacaactgtacagaaccttgggacgggacaactaatgagagttgttgccttgtcaagtgcttattcgaaaatgttgtgccaatgtcatatatggtatatttcaatttcttcggctgtgtgctaccaccacttttgattatgctggttatctatattaaaatattccttgtcgcttgtagacagctgcagaggaccgagctgatggaccatagtcgaactacgcttcagcgtgaaattcatgccgctaagagtttagcgatgatcgtgggcattttcgctctctgctggctgccggtccacgccgtgaactgtgtgaccctatttcagcccgctcagggaaagaataaacccaagtgggcaatgaatatggccatcttgctaagccatgccaacagcgttgtgaaccctatcgtgtatgcctacagaaatcgggacttccgctatacttttcacaagattataagtaggtatctgctctgtcaggcagatgtgaagtcggggaacggtcaggccggtgtgcagccagcactaggagtggggctgtag

SEQ ID NO: 14362 - DNA, 999 bp, Artificial Sequence
  derived and/or modified sequence
atgctgctggagacccaggacgccctgtacgtggccctggagctggtgatcgccgccctgagcgtggccggcaacgtgctggtgtgcgccgccgtgggcaccgccaacaccctgcagacccccaccaactacttcctggtgagcctggccgccgccgacgtggccgtgggcctgttcgccatccccttcgccatcaccatcagcctgggcttctgcaccgacttctacggctgcctgttcctggcctgcttcgtgctggtgctgacccagagcagcatcttcagcctgctggccgtggccgtggacagatacctggccatctgcgtgcccctgagatacaagagcctggtgaccggcaccagagccagaggcgtgatcgccgtgctgtgggtgctggccttcggcatcggcctgacccccttcctgggctggaacagcaaggacagcgccaccaacaactgcaccgagccctgggacggcaccaccaacgagagctgctgcctggtgaagtgcctgttcgagaacgtggtgcccatgagctacatggtgtacttcaacttcttcggctgcgtgctgccccccctgctgatcatgctggtgatctacatcaagatcttcctggtggcctgcagacagctgcagagaaccgagctgatggaccacagcagaaccaccctgcagagagagatccacgccgccaagagcctggccatgatcgtgggcatcttcgccctgtgctggctgcccgtgcacgccgtgaactgcgtgaccctgttccagcccgcccagggcaagaacaagcccaagtgggccatgaacatggccatcctgctgagccacgccaacagcgtggtgaaccccatcgtgtacgcctacagaaacagagacttcagatacaccttccacaagatcatcagcagatacctgctgtgccaggccgacgtgaagagcggcaacggccaggccggcgtgcagcccgccctgggcgtgggcctgtag

SEQ ID NO: 14363 - protein, 572 aa, Artificial Sequence
  derived and/or modified sequence
MTFRDLLSVSFEGPRPDSSAGGSSAGGGGGSAGGAAPSEGPAVGGVPGGAGGGGGVVGAGSGEDNRSSAGEPGSAGAGGDVNGTAAVGGLVVSAQGVGVGVFLAAFILMAVAGNLLVILSVACNRHLQTVTNYFIVNLAVADLLLSATVLPFSATMEVLGFWAFGRAFCDVWAAVDVLCCTASILSLCTISVDRYVGVRHSLKYPAIMTERKAAAILALLWVVALVVSVGPLLGWKEPVPPDERFCGITEEAGYAVFSSVCSFYLPMAVIVVMYCRVYVVARSTTRSLEAGVKRERGKASEVVLRIHCRGAATGADGAHGMRSAKGHTFRSSLSVRLLKFSREKKAAKTLAIVVGVFVLCWFPFFFVLPLGSLFPQLKPSEGVFKVIFWLGYFNSCVNPLIYPCSSREFKRAFLRLLRCQCRRRRRRRPLWRVYGHHWRASTSGLRQDCAPSSGDAPPGAPLALTALPDPDPEPPGTPEMQAPVASRRKPPSAFREWRLLGPFRRPTTQLRAKVSSLSHKIRAGGAQRAEAACAQRSEVEAVSLGVPHEVAEGATCQAYELADYSNLRETDI

SEQ ID NO: 14364 - DNA, 1719 bp, Artificial Sequence
  derived and/or modified sequence
atgactttccgcgacctactcagcgtctccttcgagggccccagacccgactcctctgctgggggctctagtgcaggggggggcggagggtccgctggcggagctgcgccatcagaagggccagccgtcggtggagtccctggcggcgccggcggtggaggaggtgtggtgggggcaggaagtggagaagacaaccggtcttccgccggtgagccagggtccgctggggcagggggagatgtgaatgggactgctgcggtcggggggctggtcgtaagtgcccagggggtgggcgttggggtcttcctggctgcatttatcttgatggctgtggctgggaatctcctcgtgatcctcagtgttgcatgcaatagacatctgcagactgtcactaactatttcatagtgaacctggcggtggctgatttgctgctgtctgcaacagtgctccccttctccgccaccatggaggtgctggggttttgggcttttggacgagcattctgcgatgtttgggcagcagtggacgtgctctgctgcaccgcgtccatcttgagtctgtgtactatatcagtggaccgttacgtaggagtcaggcacagcctcaaatacccagccataatgacagaaagaaaggcggcggccatcctggccttactttgggtcgtcgctcttgtggtctccgtgggcccactcctgggctggaaggaacccgtccctccagacgaacggttttgtgggataactgaggaagctggatatgcggttttttcaagcgtttgcagcttttacttgcccatggcggtgattgtggtgatgtactgccgcgtgtacgtggtcgcgagatctaccacgcgtagcctggaagctggtgttaagcgcgaacgcggcaaagcatcagaggtagtgctgcgtattcactgtagaggagctgccacaggggcagacggcgctcacgggatgaggagcgccaagggtcatacatttcggtccagtctgtctgtacgcctgttaaagttttcgcgcgagaaaaaggcagccaagacactagccattgtagtgggcgtgtttgtgctttgctggttcccattcttttttgtgttgcccctgggatcgctatttccccaactgaaaccaagtgaaggggtgttcaaggtaattttttggctcggctatttcaactcctgcgtgaatccgttgatatatccgtgtagtagccgcgaattcaagagagcttttctgaggttgctcaggtgccagtgccggaggaggcgtcgccgtaggccactgtggagggtttacggacatcactggcgggcctctacctcaggtttacggcaggattgtgcaccgtcgtcaggtgacgcacccccgggagctccactggcattgacagccctgccagatccagatcctgaaccacctggtactcctgagatgcaggctccggtggcctctagacgaaagccaccaagtgcattccgtgagtggcgcctgctgggcccttttaggcgcccaaccacccagctgcgggcgaaggtaagctcactgtcacacaaaatacgcgccggtggcgctcagagggcagaagccgcgtgcgcacaaagaagtgaagttgaggctgtctcactcggtgtgccccatgaggtggctgaaggcgcgacctgtcaagcttatgaattggcggactatagcaacctcagagagaccgacatctag

SEQ ID NO: 14365 - DNA, 2677 bp, Artificial Sequence
  derived and/or modified sequence
ccgacgggacccgtgcgcggagctgcatctggagccccgcggctatgccctgtgctcccctccctgccggccgctcgttctgtgccccggcccggccaccgacggccgcgcgttgagatgactttccgcgatctcctgagcgtcagtttcgagggaccccgcccggacagcagcgcagggggctccagcgcgggcggcggcgggggcagcgcgggcggcgcggccccctcggagggcccggcggtgggcggcgtgccggggggcgcgggcggcggcggcggcgtggtgggcgcaggcagcggcgaggacaaccggagctccgcgggggagccggggagcgcgggcgcgggcggcgacgtgaatggcacggcggccgtcgggggactggtggtgagcgcgcagggcgtgggcgtgggcgtcttcctggcagccttcatccttatggccgtggcaggtaacctgcttgtcatcctctcagtggcctgcaaccgccacctgcagaccgtcaccaactatttcatcgtgaacctggccgtggccgacctgctgctgagcgccaccgtactgcccttctcggccaccatggaggttctgggcttctgggcctttggccgcgccttctgcgacgtatgggccgccgtggacgtgctgtgctgcacggcctccatcctcagcctctgcaccatctccgtggaccggtacgtgggcgtgcgccactcactcaagtacccagccatcatgaccgagcgcaaggcggccgccatcctggccctgctctgggtcgtagccctggtggtgtccgtagggcccctgctgggctggaaggagcccgtgccccctgacgagcgcttctgcggtatcaccgaggaggcgggctacgctgtcttctcctccgtgtgctccttctacctgcccatggcggtcatcgtggtcatgtactgccgcgtgtacgtggtcgcgcgcagcaccacgcgcagcctcgaggcgggcgtcaagcgcgagcgaggcaaggcctccgaggtggtgctgcgcatccactgtcgcggcgcggccacgggcgccgacggggcgcacggcatgcgcagcgccaagggccacaccttccgcagctcgctctccgtgcgcctgctcaagttctcccgtgagaagaaagcggccaagactctggccatcgtcgtgggtgtcttcgtgctctgctggttccctttcttctttgtcctgccgctcggctccttgttcccgcagctgaagccatcggagggcgtcttcaaggtcatcttctggctcggctacttcaacagctgcgtgaacccgctcatctacccctgttccagccgcgagttcaagcgcgccttcctccgtctcctgcgctgccagtgccgtcgtcgccggcgccgccgccctctctggcgtgtctacggccaccactggcgggcctccaccagcggcctgcgccaggactgcgccccgagttcgggcgacgcgccccccggagcgccgctggccctcaccgcgctccccgaccccgaccccgaacccccaggcacgcccgagatgcaggctccggtcgccagccgtcgaaagccacccagcgccttccgcgagtggaggctgctggggccgttccggagacccacgacccagctgcgcgccaaagtctccagcctgtcgcacaagatccgcgccgggggcgcgcagcgcgcagaggcagcgtgcgcccagcgctcagaggtggaggctgtgtccctaggcgtcccacacgaggtggccgagggcgccacctgccaggcctacgaattggccgactacagcaacctacgggagaccgatatttaaggaccccagagctaggccgcggagtgtgctgggcttgggggtaagggggaccagagaggcgggctggtgttctaagagcccccgtgcaaatcggagacccggaaactgatcagggcagctgctctgtgacatccctgaggaactgggcagagcttgaggctggagcccttgaaaggtgaaaagtagtggggccccctgctggactcaggtgcccagaactcttttcttagaagggagaggctgcgggctccgtggggccttttgctcccaatccctatttgagaaacactgccccatcctccatgccctgaaccctgagtagacagccccaagcatggccaggaaggcctgcccctcctcttctgggaaataggcacagaagctttggccggctaccccagtgcctcccttagggaaaaagtcagtgggaccagggctcctcagtggacaaatttctccttcttactgccaactggaggaacccagtggacctaccaccacccacaagctttggtggcagattgtatagccgtcatacaagcctgctgtatttatccatgggcccgctgtccgccacccaggctcctccgtgcacaccccatcacctggcccctaccccttattacttcccctcaagggccttactgtttacactctgtacatagctcatcgtgcctgtgcccatcacttcttgctgggattccaagccaccaattggagagctttatttgtcattttgagacatatttattggtaagagtacttctattttgtccaagctgtgcaaactgtccctctttagcccataacccattaaaaaaaaaatactttttcccctaaa

SEQ ID NO: 14366 - DNA, 1719 bp, Artificial Sequence
  derived and/or modified sequence
atgaccttccgggacctgctgtctgtgtcctttgagggccccaggccagacagcagcgctgggggcagcagcgctgggggcggcggcggcagcgctgggggcgccgcccccagcgagggccctgctgtgggcggcgtgcctggaggagctgggggcggcggcggcgtggtgggcgccggcagcggggaggacaacagaagcagcgctggggagcccggcagcgctggagctggaggagatgtgaatggaacagctgctgtgggcggcctggtggtgtctgcccagggcgtgggcgtgggcgtcttcctggccgccttcatcctgatggctgtggccggcaacctgctggtgatcctgtctgtggcctgcaacagacacctgcagacagtgaccaactacttcatcgtgaacctggccgtggccgacctgctgctgagcgccaccgtgctgcccttcagcgccaccatggaggtgctgggcttctgggccttcggccgggccttctgtgatgtgtgggccgctgtggatgtgctgtgctgcacagccagcatcctgagcctgtgcaccatctctgtggacagatatgtgggcgtgcgccacagcctgaagtacccagccatcatgacagagaggaaggccgccgccatcctggccctgctgtgggtggtggccctggtggtgtctgtgggccccctgctgggctggaaggagcctgtgcccccagatgagcgcttctgtggcatcacagaggaggccggctatgctgtgttcagctctgtgtgcagcttctacctgcccatggccgtcatcgtggtgatgtactgccgggtgtatgtggtggcccggagcaccaccaggagcctggaggccggcgtgaagcgggagcggggcaaggccagcgaggtggtgctgcgcatccactgcagaggagctgccactggagcagatggagcccacggcatgaggtctgccaagggccacaccttccgcagcagcctgtctgtgcggctgctgaagttcagccgggagaagaaggccgccaagaccctggccatcgtggtgggcgtgtttgtgctgtgctggttccccttcttctttgtgctgcccctgggcagcctcttcccccagctgaagcccagcgagggcgtcttcaaggtgatcttctggctgggctacttcaacagctgtgtgaaccccctcatctacccctgcagcagccgggagttcaagagggccttcctgcggctgctgcgctgccagtgcagaagaagaagaagaagaagacccctgtggagggtgtatggccaccactggagggccagcaccagcggcctgcggcaggactgtgcccccagcagtggagatgcccctcctggggcccccctggccctgacagccctgcctgaccctgaccctgagcccccaggcaccccagagatgcaggcccctgtggccagcaggaggaagccacccagcgccttccgggagtggaggctgctgggccccttccggcggcccaccacccagctgcgggccaaggtgagcagcctgagccacaagatccgggccggcggggcccagagagctgaggccgcctgtgcccagaggtctgaggtggaggccgtgtccctgggcgtgccccatgaggtggccgagggcgccacctgccaggcctatgagctggccgactacagcaacctgcgggagacagacatctag

SEQ ID NO: 14367 - DNA, 1719 bp, Artificial Sequence
  derived and/or modified sequence
atgaccttccgggacctgctgagcgtgagcttcgagggcccccggcccgatagcagtgccggtggttcttcggctggcggggggggcgggagcgctggaggggcagcaccttccgagggcccagccgtcggcggagtgcctgggggcgccggggggggcgggggcgtcgtgggggccggaagcggcgaggacaatagatcttcagccggggagccagggtcagcgggcgcagggggcgatgttaatggaacagccgctgtgggtggtttggtggtaagtgcccagggggtgggggtgggcgtattcttagccgcgttcattctaatggcggtggcggggaacctcttggttatattgagcgtggcctgcaataggcatctccagaccgtgaccaattactttattgtcaacctggctgtcgccgatctcttgctctccgccaccgttcttcccttttctgcgacgatggaggtgctcggtttttgggcatttgggcgggctttttgtgatgtttgggccgccgttgatgttctgtgctgtacagcaagcattcttagcctctgcaccatatcggttgatcggtacgtcggtgtgcggcatagcctcaagtatccggctattatgaccgaaagaaaggccgcagccatccttgccctcctttgggtcgtggctctggtggtgtccgtagggcccctgctgggctggaaggagcccgtgccccccgatgagaggttttgtggaataaccgaggaggccggctacgcggttttcagttcggtttgtagcttttatcttccaatggctgtgattgtggtgatgtactgtcgcgtttatgtggtggctcgctcaactacccgttccttggaagctggggtgaagagggaacgcggcaaggcctccgaggtggtgttgaggatccattgccgaggcgctgcgaccggggccgatggtgctcacggtatgcgctcagccaaaggccataccttcaggtctagtctttccgtccgcctgctgaagttcagtcgcgaaaagaaggcagctaagacattggctatcgtcgtgggagtgttcgtcctgtgttggttccccttcttcttcgtgctcccactgggctcactcttcccacagttgaagccttctgagggcgtgttcaaagtgatcttctggctcggctacttcaactcctgcgtgaacccgctgatctacccctgttcatcacgtgaattcaaacgggcctttctacgccttcttcgatgtcaatgtcggagacgcaggcggcgccgacccctttggcgggtgtatggacaccactggcgggcgagcacaagcggtctccgtcaggactgtgcccccagctcaggagatgcgccaccaggagctcccctggccctcacagctctgccagatcccgaccccgagcccccaggaacacctgagatgcaagcccccgtcgcatcccgccgaaagccgccttcagcattccgagagtggcgcctattagggccgtttcggagacctacgacccagctgcgtgctaaggtatcctcgctaagccataaaattcgggcaggaggcgcacagcgggctgaagcagcttgtgcccagagaagcgaggtggaggctgtgtccctgggggtacctcacgaggtagctgagggtgcaacgtgccaggcctacgagcttgcggactattcgaacctccgcgaaacagatatctag

SEQ ID NO: 14368 - DNA, 1719 bp, Artificial Sequence
  derived and/or modified sequence
atgacgttcagggatcttctctcagtttcatttgagggcccacgtccagactctagcgcaggaggcagtagcgcagggggtgggggagggtccgcgggtggagcagccccaagcgaggggccagcggtcgggggtgtccccggtggtgcagggggtggcggtggcgtggtgggagcaggaagcggggaagacaatcgatcctctgccggagagcccggaagcgccggtgccggaggtgacgttaatgggaccgccgcagttggcggactcgttgtgagtgcccagggcgttggcgtgggcgtgttcctcgccgcatttatactgatggccgtcgcaggtaatcttctggtcatcctttcagtggcctgcaacaggcatctgcagacggtcaccaactattttatagtgaatctcgccgtggcagatctgttgttgtcagctactgtactgccattttccgccactatggaggtactgggcttttgggccttcggccgtgcattctgtgacgtgtgggccgctgtggatgtactgtgctgcactgcatcgattctctctctttgcaccatttctgtcgacaggtacgtcggcgtccggcacagtctcaagtaccctgctataatgacggaacgcaaagctgcagccatcctcgcccttctgtgggtagtcgcattggtggtatctgtgggcccactgctggggtggaaagagcccgtgccacctgacgagcgattttgtggaatcacagaggaggctgggtatgcggtcttttccagcgtttgtagtttttatctgcccatggccgtgatagtggtgatgtattgccgcgtgtatgttgtggcacggtctaccacaaggtccctcgaagcaggagtgaaacgggagcggggaaaagctagcgaagtggtgctcagaatccactgtcggggagccgctaccggagcagatggcgcacacgggatgagaagcgcaaaagggcataccttcaggtcgtctttgtcagtacggctgctcaaattttccagggaaaaaaaggctgcgaaaactttggccatagtggtcggcgtgtttgtgctgtgttggtttcctttcttttttgtgctgcctctcggatcactgttcccccagcttaaaccttccgaaggcgtttttaaagtgattttctggcttggctactttaattcctgtgtaaacccgctcatctacccttgctcaagcagagaattcaagagggcatttttacgactcctgcggtgtcagtgccggcgtaggaggaggcgcagaccattgtggcgggtttatggacaccactggcgcgcatctacatccggccttaggcaggactgcgctccttcgtctggcgatgcccctcctggcgctccattagcgttgacagccctcccagacccagatccagaaccacctggcacacctgaaatgcaggccccagtggctagcaggagaaagcctccgtccgcatttcgggagtggaggctgcttggtccttttcgtcggccaacgactcagttacgggctaaagtcagcagtctgtctcataagatacgcgcaggcggtgcccagcgcgctgaggccgcttgtgctcagcgatcagaagttgaagccgtttctctgggagtcccacacgaggtcgctgagggcgctacctgccaggcttatgaactggcagattattccaatctgcgtgaaacggatatttag

SEQ ID NO: 14369 - DNA, 1719 bp, Artificial Sequence
  derived and/or modified sequence
atgaccttcagagacctgctgagcgtgagcttcgagggccccagacccgacagcagcgccggcggcagcagcgccggcggcggcggcggcagcgccggcggcgccgcccccagcgagggccccgccgtgggcggcgtgcccggcggcgccggcggcggcggcggcgtggtgggcgccggcagcggcgaggacaacagaagcagcgccggcgagcccggcagcgccggcgccggcggcgacgtgaacggcaccgccgccgtgggcggcctggtggtgagcgcccagggcgtgggcgtgggcgtgttcctggccgccttcatcctgatggccgtggccggcaacctgctggtgatcctgagcgtggcctgcaacagacacctgcagaccgtgaccaactacttcatcgtgaacctggccgtggccgacctgctgctgagcgccaccgtgctgcccttcagcgccaccatggaggtgctgggcttctgggccttcggcagagccttctgcgacgtgtgggccgccgtggacgtgctgtgctgcaccgccagcatcctgagcctgtgcaccatcagcgtggacagatacgtgggcgtgagacacagcctgaagtaccccgccatcatgaccgagagaaaggccgccgccatcctggccctgctgtgggtggtggccctggtggtgagcgtgggccccctgctgggctggaaggagcccgtgccccccgacgagagattctgcggcatcaccgaggaggccggctacgccgtgttcagcagcgtgtgcagcttctacctgcccatggccgtgatcgtggtgatgtactgcagagtgtacgtggtggccagaagcaccaccagaagcctggaggccggcgtgaagagagagagaggcaaggccagcgaggtggtgctgagaatccactgcagaggcgccgccaccggcgccgacggcgcccacggcatgagaagcgccaagggccacaccttcagaagcagcctgagcgtgagactgctgaagttcagcagagagaagaaggccgccaagaccctggccatcgtggtgggcgtgttcgtgctgtgctggttccccttcttcttcgtgctgcccctgggcagcctgttcccccagctgaagcccagcgagggcgtgttcaaggtgatcttctggctgggctacttcaacagctgcgtgaaccccctgatctacccctgcagcagcagagagttcaagagagccttcctgagactgctgagatgccagtgcagaagaagaagaagaagaagacccctgtggagagtgtacggccaccactggagagccagcaccagcggcctgagacaggactgcgcccccagcagcggcgacgccccccccggcgcccccctggccctgaccgccctgcccgaccccgaccccgagccccccggcacccccgagatgcaggcccccgtggccagcagaagaaagccccccagcgccttcagagagtggagactgctgggccccttcagaagacccaccacccagctgagagccaaggtgagcagcctgagccacaagatcagagccggcggcgcccagagagccgaggccgcctgcgcccagagaagcgaggtggaggccgtgagcctgggcgtgccccacgaggtggccgagggcgccacctgccaggcctacgagctggccgactacagcaacctgagagagaccgacatctag

SEQ ID NO: 14370 - protein, 520 aa, Artificial Sequence
  derived and/or modified sequence
MNPDLDTGHNTSAPAHWGELKNANFTGPNQTSSNSTLPQLDITRAISVGLVLGAFILFAIVGNILVILSVACNRHLRTPTNYFIVNLAMADLLLSFTVLPFSAALEVLGYWVLGRIFCDIWAAVDVLCCTASILSLCAISIDRYIGVRYSLQYPTLVTRRKAILALLSVWVLSTVISIGPLLGWKEPAPNDDKECGVTEEPFYALFSSLGSFYIPLAVILVMYCRVYIVAKRTTKNLEAGVMKEMSNSKELTLRIHSKNFHEDTLSSTKAKGHNPRSSIAVKLFKFSREKKAAKTLGIVVGMFILCWLPFFIALPLGSLFSTLKPPDAVFKVVFWLGYFNSCLNPIIYPCSSKEFKRAFVRILGCQCRGRGRRRRRRRRRLGGCAYTYRPWTRGGSLERSQSRKDSLDDSGSCLSGSQRTLPSASPSPGYLGRGAPPPVELCAFPEWKAPGALLSLPAPEPPGRRGRHDSGPLFTFKLLTEPESPGTDGGASNGGCEAAADVANGQPGFKSNMPLAPGQF

SEQ ID NO: 14371 - DNA, 1563 bp, Artificial Sequence
  derived and/or modified sequence
atgaatcccgacctcgacacaggacacaatacatctgcaccagcccactggggtgagcttaagaacgcaaattttaccgggcccaaccagacttcatcaaactccacgctgccacagctcgatattaccagggctatcagcgtgggtcttgtgcttggcgctttcatactgttcgccatagtaggcaatatactcgtgatcctgagtgttgcctgcaaccgacatcttcgtactcccaccaactacttcattgtgaacctcgccatggctgatttactgctttctttcacagtcctgccattcagcgcagccttagaggttctcgggtattgggtgctcggtcgcattttctgcgacatttgggccgccgtggacgtgttgtgctgtactgcttctatcctgagcctgtgcgctatctcaatcgaccgctacataggagtcagatactccctgcagtatccgactctggtcacaaggcgcaaggccatcctagctttgctcagtgtgtgggtgttgtccacagttatttctatcggtccactacttgggtggaaggagccggccccaaacgatgataaagaatgtggcgtcacagaagagcccttttacgctctcttcagcagtctgggctccttttatatccctctcgccgtaattcttgtaatgtactgcagagtgtacatcgtggccaaacggacaacaaagaatttagaagcaggggttatgaaggagatgtctaacagcaaggagctcacacttaggatccactctaaaaacttccacgaggacacgcttagcagtacgaaagcaaagggccacaaccctagaagctctatcgccgtgaagctctttaagtttagtcgagagaagaaggctgccaagaccctgggtattgtcgttggcatgtttatcctgtgttggctgcctttttttattgctctgcctttgggttctctgttctccactttgaagcctccagatgcggtatttaaggtcgtcttttggttgggatacttcaattcctgccttaatccaatcatttatccttgcagttcaaaagaattcaaaagggcctttgtccggattctcggatgtcagtgtcgtggaagaggaagacgccgccggcgcaggaggaggaggctaggcggctgtgcatatacctatagaccttggacgcgagggggatctctggagcggtcccagtcacgtaaagactctctggacgacagcggctcctgcctatccgggtcccagcgaacattgccatcagccagccctagccctggctacctggggaggggcgccccaccaccggtcgagctctgtgcctttccagaatggaaagcccctggggccctgttgtcgctccccgcacccgagcctcctgggagacggggccggcatgacagtgggccactgtttaccttcaaattattgaccgaacctgagagtccagggaccgacgggggggcttctaatggagggtgcgaagctgctgctgatgtcgctaatggacagcccgggtttaagtccaatatgcccttggcgccaggccagttttag

SEQ ID NO: 14372 - DNA, 1738 bp, Artificial Sequence
  derived and/or modified sequence
gccaggagggcgcctctgggaagaagaccacgggggaagcaaagtttcagggcagctgaggagccttcgccgcagcccttccgagcccaatcatccccctggctatggagggcggactctaagatgaatcccgacctggacaccggccacaacacatcagcacctgcccactggggagagttgaaaaatgccaacttcactggccccaaccagacctcgagcaactccacactgccccagctggacatcaccagggccatctctgtgggcctggtgctgggcgccttcatcctctttgccatcgtgggcaacatcctagtcatcttgtctgtggcctgcaaccggcacctgcggacgcccaccaactacttcattgtcaacctggccatggccgacctgctgttgagcttcaccgtcctgcccttctcagcggccctagaggtgctcggctactgggtgctggggcggatcttctgtgacatctgggcagccgtggatgtcctgtgctgcacagcgtccattctgagcctgtgcgccatctccatcgatcgctacatcggggtgcgctactctctgcagtatcccacgctggtcacccggaggaaggccatcttggcgctgctcagtgtctgggtcttgtccaccgtcatctccatcgggcctctccttgggtggaaggagccggcacccaacgatgacaaggagtgcggggtcaccgaagaacccttctatgccctcttctcctctctgggctccttctacatccctctggcggtcattctagtcatgtactgccgtgtctatatagtggccaagagaaccaccaagaacctagaggcaggagtcatgaaggagatgtccaactccaaggagctgaccctgaggatccattccaagaactttcacgaggacacccttagcagtaccaaggccaagggccacaaccccaggagttccatagctgtcaaactttttaagttctccagggaaaagaaagcagctaagacgttgggcattgtggtcggtatgttcatcttgtgctggctacccttcttcatcgctctaccgcttggctccttgttctccaccctgaagccccccgacgccgtgttcaaggtggtgttctggctgggctacttcaacagctgcctcaaccccatcatctacccatgctccagcaaggagttcaagcgcgctttcgtgcgcatcctcgggtgccagtgccgcggccgcggccgccgccgacgccgccgccgccgtcgcctgggcggctgcgcctacacctaccggccgtggacgcgcggcggctcgctggagcgctcgcagtcgcgcaaggactcgctggacgacagcggcagctgcctgagcggcagccagcggaccctgccctcggcctcgccgagcccgggctacctgggccgcggcgcgccaccgccagtcgagctgtgcgccttccccgagtggaaggcgcccggcgccctcctgagcctgcccgcgcctgagccccccggccgccgcggccgccacgactcgggcccgctcttcaccttcaagctcctgaccgagcccgagagccccgggaccgacggcggcgccagcaacggaggctgcgaggccgcggccgacgtggccaacgggcagccgggcttcaaaagcaacatgcccctggcgcccgggcagttttagggcccccgtgcgcagctttctttccctggggaggaaaacatcgtggggggga

SEQ ID NO: 14373 - DNA, 1563 bp, Artificial Sequence
  derived and/or modified sequence
atgaacccagacctggacaccggccacaacaccagcgccccagcccactggggcgagctgaagaatgccaacttcaccggccccaaccagaccagcagcaacagcaccctgccccagctggacatcacccgggccatctctgtgggcctggtgctgggcgccttcatcctgtttgccatcgtgggcaacatcctggtgatcctgtctgtggcctgcaacagacacctgcggacccccaccaactacttcatcgtgaacctggccatggctgacctgctgctgtccttcaccgtgctgcccttctctgctgccctggaggtgctgggctactgggtgctgggccgcatcttctgtgacatctgggccgctgtggatgtgctgtgctgcacagccagcatcctgagcctgtgtgccatcagcattgaccgctacatcggcgtgcgctacagcctgcagtaccccaccctggtgaccaggaggaaggccatcctggccctgctgtctgtgtgggtgctgagcaccgtcatcagcatcggccccctgctgggctggaaggagcccgccccaaatgatgacaaggaatgtggggtgacagaggagcccttctacgccctcttcagcagcctgggcagcttctacatccccctggccgtcatcctggtgatgtactgccgggtgtacatcgtggccaagaggaccaccaagaacctggaggccggcgtgatgaaggagatgagcaacagcaaggagctgaccctgcgcatccacagcaagaacttccacgaggacaccctgagcagcaccaaggccaagggccacaaccccaggagcagcattgctgtgaagctgttcaagttcagccgggagaagaaggccgccaagaccctgggcatcgtggtgggcatgttcatcctgtgctggctgcccttcttcatcgccctgcccctgggcagcctcttcagcaccctgaagcccccagatgctgtgttcaaggtggtgttctggctgggctacttcaacagctgcctgaaccccatcatctacccctgcagcagcaaggagttcaagagggcctttgtgcgcatcctgggctgccagtgccggggccggggcagaagaagaagaagaagaagaagaaggctgggcggctgtgcctacacctaccggccctggacccggggcggcagcctggagaggagccagagcaggaaggacagcctggatgacagcggcagctgcctgagcggcagccagaggaccctgcccagcgccagccccagccctggctacctgggccgcggggcccctcctcctgtggagctgtgtgccttccctgagtggaaggcccctggggccctgctgagcctgcctgcccctgagcccccaggccggcggggcagacatgacagcggccccctcttcaccttcaagctgctgacagagcctgagagccctggaacagatggaggagccagcaatggaggctgtgaggccgctgctgatgtggccaacggccagcccggcttcaagagcaacatgcccctggcccctggccagttctag

SEQ ID NO: 14374 - DNA, 1563 bp, Artificial Sequence
  derived and/or modified sequence
atgaaccccgacctggacaccggccacaacaccagcgcccccgcccattggggtgagctgaagaatgctaacttcacagggcctaaccagacctcctcgaactccactctgccccagctcgatataacccgtgcaatcagtgtggggctggttttgggcgccttcatcctgtttgccatcgtggggaatatactggtgatcctgtccgtagcttgtaataggcatctgcggaccccaaccaattacttcatcgtgaacctcgcaatggccgatttgctgctctcctttaccgttctgcccttttccgccgcgttggaagtgctcggatactgggtcctcggcagaatcttttgcgatatttgggccgctgtcgacgttctgtgttgtactgcctcaatcctttccctgtgtgctatttccatcgatcgatatataggggtccggtatagcctccaataccccacgctcgtaactagacggaaagctattctggcccttctgagcgtctgggtactgtctaccgtgatttccatcggacccctcttgggctggaaagagcctgcccccaacgatgataaagagtgtggggtcacggaagagcctttttacgcactgttctcctctctcggaagcttctacattcccctggccgtgatcttagtgatgtattgcagagtgtacattgtggccaagcggaccaccaagaatcttgaggccggcgtcatgaaggagatgtccaacagcaaagaactgacactgcgcatacacagtaaaaattttcacgaagacactcttagctccacaaaagccaaagggcacaacccacgttcctcaatagccgtcaaactgtttaaattttcacgagagaaaaaggctgcgaaaactcttggaattgtcgttggaatgtttatactctgttggttgcccttttttatcgcactgcctcttggttctctgttcagcactttgaaaccacccgacgcagtgttcaaggtagttttttggctggggtatttcaattcctgtctaaaccccatcatctacccctgttcgtcgaaagagtttaaacgtgccttcgtacggatcttgggctgtcagtgccgcgggcgcgggcgaagaagacgcagacgaaggagaaggctgggggggtgcgcttacacgtatagaccctggacgcgcggcggtagcctcgagaggtcacagtccagaaaagacagtttagatgactccggaagttgtttaagcggctcccaacggaccctaccatcagcaagccctagcccggggtatttaggaagaggcgctccaccacccgttgagttatgcgccttccctgaatggaaggcccccggcgccctgctgtctctgccggcccccgagccacctggaagacggggccggcatgatagcggcccccttttcacctttaagcttctaacggaacccgagtcccctgggacggacggtggtgctagtaacggagggtgtgaggcggctgccgacgtcgcaaatggccagcccgggtttaagtctaacatgcctctggctccaggacagttctag

SEQ ID NO: 14375 - DNA, 1563 bp, Artificial Sequence
  derived and/or modified sequence
atgaacccagacctggataccggacacaacacgagcgcaccagcacattggggtgagctcaaaaatgccaatttcaccgggcctaatcaaacaagtagtaacagcacccttccccagctggacatcacccgggcaatcagtgtagggttagtactgggagcatttatcctgtttgctatcgtgggtaatatactagtaatcctgagtgttgcatgcaaccgccacctacgcaccccaaccaactattttattgtaaatttggccatggcagacctgctgttatcttttaccgtgctgccctttagcgccgctctggaagtgctcggatactgggtattgggacggatcttttgcgacatttgggctgccgtggatgtactgtgctgtaccgcatcaatcttaagtctctgtgccatctctatcgatagatatattggtgttcgctacagtctccagtatccaaccctcgttacgaggagaaaagcaatcctcgcactcctgagtgtgtgggtgctgtccactgtaataagtatcggcccactgctaggatggaaagagccagctccaaatgatgataaagaatgtggggtcaccgaagagccattttacgcattgttctcttcattaggttccttttacatccctttggcagtgatcttggtcatgtactgcagagtgtatatcgtggcgaagaggactactaaaaatttagaggcaggagtaatgaaagaaatgtctaattctaaagagcttactctcaggattcacagcaagaacttccatgaggatactctgtcttccacaaaggccaaaggccacaatccgcgttctagcatcgccgtgaagctctttaagttttctagggaaaagaaagcagctaagacgctcggcattgtagtcgggatgtttatactgtgctggctgccgtttttcattgcattacccctgggctctttgtttagtaccctgaagccccctgacgccgtgttcaaagtcgtgttctggctcggctacttcaattcttgcctgaatcccataatatacccctgcagctcgaaggagttcaaacgagctttcgtgcgcattttgggctgccagtgtaggggcagaggccgaaggaggagacggagaaggagacggctgggtggctgtgcttatacttatcgcccatggacccgagggggaagcctggagcgatcccaatcccgcaaagactccctggatgacagtggatcctgcctctccggaagccaacgcaccttgccttccgcatcaccctctcctggctatctggggcgaggggcaccccctcctgtggagctatgtgccttccccgagtggaaggcccctggagctcttctgagcctccctgctcctgagccccctggaagacggggacgacatgatagcggcccactcttcacattcaagcttttgacagaaccggaatctccaggaaccgatggaggcgcaagcaatggcggttgtgaagccgcagctgatgtcgctaatggtcagcctggcttcaagagcaatatgcccctggctcccggtcagttctag

SEQ ID NO: 14376 - DNA, 1563 bp, Artificial Sequence
  derived and/or modified sequence
atgaaccccgacctggacaccggccacaacaccagcgcccccgcccactggggcgagctgaagaacgccaacttcaccggccccaaccagaccagcagcaacagcaccctgccccagctggacatcaccagagccatcagcgtgggcctggtgctgggcgccttcatcctgttcgccatcgtgggcaacatcctggtgatcctgagcgtggcctgcaacagacacctgagaacccccaccaactacttcatcgtgaacctggccatggccgacctgctgctgagcttcaccgtgctgcccttcagcgccgccctggaggtgctgggctactgggtgctgggcagaatcttctgcgacatctgggccgccgtggacgtgctgtgctgcaccgccagcatcctgagcctgtgcgccatcagcatcgacagatacatcggcgtgagatacagcctgcagtaccccaccctggtgaccagaagaaaggccatcctggccctgctgagcgtgtgggtgctgagcaccgtgatcagcatcggccccctgctgggctggaaggagcccgcccccaacgacgacaaggagtgcggcgtgaccgaggagcccttctacgccctgttcagcagcctgggcagcttctacatccccctggccgtgatcctggtgatgtactgcagagtgtacatcgtggccaagagaaccaccaagaacctggaggccggcgtgatgaaggagatgagcaacagcaaggagctgaccctgagaatccacagcaagaacttccacgaggacaccctgagcagcaccaaggccaagggccacaaccccagaagcagcatcgccgtgaagctgttcaagttcagcagagagaagaaggccgccaagaccctgggcatcgtggtgggcatgttcatcctgtgctggctgcccttcttcatcgccctgcccctgggcagcctgttcagcaccctgaagccccccgacgccgtgttcaaggtggtgttctggctgggctacttcaacagctgcctgaaccccatcatctacccctgcagcagcaaggagttcaagagagccttcgtgagaatcctgggctgccagtgcagaggcagaggcagaagaagaagaagaagaagaagaagactgggcggctgcgcctacacctacagaccctggaccagaggcggcagcctggagagaagccagagcagaaaggacagcctggacgacagcggcagctgcctgagcggcagccagagaaccctgcccagcgccagccccagccccggctacctgggcagaggcgcccccccccccgtggagctgtgcgccttccccgagtggaaggcccccggcgccctgctgagcctgcccgcccccgagccccccggcagaagaggcagacacgacagcggccccctgttcaccttcaagctgctgaccgagcccgagagccccggcaccgacggcggcgccagcaacggcggctgcgaggccgccgccgacgtggccaacggccagcccggcttcaagagcaacatgcccctggcccccggccagttctag

SEQ ID NO: 14377 - protein, 466 aa, Artificial Sequence
  derived and/or modified sequence
MVFLSGNASDSSNCTQPPAPVNISKAILLGVILGGLILFGVLGNILVILSVACHRHLHSVTHYYIVNLAVADLLLTSTVLPFSAIFEVLGYWAFGRVFCNIWAAVDVLCCTASIMGLCIISIDRYIGVSYPLRYPTIVTQRRGLMALLCVWALSLVISIGPLFGWRQPAPEDETICQINEEPGYVLFSALGSFYLPLAIILVMYCRVYVVAKRESRGLKSGLKTDKSDSEQVTLRIHRKNAPAGGSGMASAKTKTHFSVRLLKFSREKKAAKTLGIVVGCFVLCWLPFFLVMPIGSFFPDFKPSETVFKIVFWLGYLNSCINPIIYPCSSQEFKKAFQNVLRIQCLCRKQSSKHALGYTLHPPSQAVEGQHKDMVRIPVGSRETFYRISKTDGVCEWKFFSSMPRGSARITVSKDQSSCTTARVRSKSFLQVCCCVGPSTPSLDKNHQVPTIKVHTISLSENGEEV

SEQ ID NO: 14378 - DNA, 1401 bp, Artificial Sequence
  derived and/or modified sequence
atggtgtttctttctggaaatgctagtgatagcagtaactgcacacagcccccggcacccgtgaatatcagcaaagcaatcctgctaggggtcatattgggaggacttattctgtttggcgtgcttggcaacattctagtaattctgtcagtcgcctgccatcgtcatctgcactccgtgacccactattatatcgttaatctcgccgtggctgacctgctcttaactagcaccgtccttcctttcagcgctatcttcgaggtgctgggctactgggcatttgggcgcgtgttctgcaatatctgggccgccgtagatgtgctttgctgcacagcatctatcatgggtctgtgcatcatctccattgaccggtacatcggggtttcttatcctctccgctacccaaccatcgtcactcagcgacggggcttgatggcgctgctctgcgtgtgggcattatcactggtgattagtattgggcccctgttcgggtggcgccagcccgcaccagaggatgaaacgatatgccagataaacgaggagcctggatatgtgttgttttcagccctgggctccttttaccttcccctggcgatcatactggtgatgtactgccgggtatatgtagtagccaagcgtgaaagtcggggcttgaaaagcggcctcaaaactgataagagcgactctgaacaggtaactcttcgtattcatcgtaaaaacgctccagctggcggttcagggatggctagcgcgaaaactaagacacatttcagcgttcgcctactgaagtttagtcgcgaaaagaaggctgctaagaccctgggaattgtggtcgggtgcttcgtgctgtgctggctcccattttttttagtgatgccaatcggttcgttcttcccagacttcaaaccctccgaaacggtctttaagattgtcttttggctcggatatcttaatagttgtataaaccctatcatttacccgtgctcgagtcaggagttcaagaaagcattccagaacgtgctgcggattcaatgtttgtgccgtaagcagtcctctaagcatgccttgggctacacactgcaccccccttcgcaggcagttgaaggacagcataaagacatggtacggatacccgttggatcaagagagaccttttaccgtatttctaaaactgacggagtttgtgaatggaaattcttttctagtatgccaaggggctcagcaaggataactgtgagcaaggaccagtcctcctgtaccaccgcccgcgtaaggtcgaagtccttcctgcaggtctgctgctgcgtggggccttccaccccctctcttgataagaaccatcaagtgccgaccattaaagtgcacactatcagcctctctgagaacggagaagaggtgtag

SEQ ID NO: 14379 - DNA, 1401 bp, Artificial Sequence
  derived and/or modified sequence
atggtgttcctttctggaaatgcctctgatagttccaattgtacccaacctcccgcgccagtcaacataagtaaggccatactcctgggagtgatcttaggaggcctgatcctcttcggcgtgcttggaaatatcttggtaatcctgagcgtcgcttgccatcggcacctgcattctgtaacccattattacatcgttaatctggccgtggctgacttactgctgacttcaaccgtccttcccttcagcgcaattttcgaggttttgggctattgggccttcggacgtgtgttctgtaatatctgggccgccgtggacgtgttatgttgtactgcatcgatcatgggtttatgcattatctccattgacaggtacatcggcgtcagctatcccttgcgatacccaactattgtcacccagaggcgcggattaatggctctcctctgtgtgtgggctttaagcctcgtcatttctattggtcctttgtttggatggcgccagccagctcccgaggacgaaaccatttgccagattaacgaagaaccgggatacgtattgttttccgctctcggttccttctacctgcctctcgccataatcttggtgatgtattgtagagtgtacgtggttgctaagcgggaatccagaggccttaagagcgggctaaagacggacaaatccgacagcgaacaggtcacactcagaatccatcggaagaatgcccctgccgggggaagtggaatggcttccgccaagacaaagacacacttcagcgtcagacttctcaagttctctcgcgagaaaaaagctgctaaaacactgggcattgtggtcggatgttttgttctatgttggctgcctttttttttagtaatgcccattggttcctttttccccgatttcaaacccagcgaaacagtcttcaaaatcgtattttggctaggctacctcaattcctgtatcaaccccattatttatccatgctctagtcaggagtttaagaaagcgttccagaacgtgctgagaatccagtgtctttgtagaaagcagagctcaaagcatgcacttggttacacattgcatcctcccagccaggctgtggaagggcagcacaaagatatggtgagaattcctgtggggagccgtgagaccttctatcgcatcagtaagactgacggggtctgcgagtggaaattcttctcatctatgccacggggctcggccaggataactgtgagtaaggaccagagtagctgcaccaccgcgcgggtgagaagtaaatcatttctccaggtgtgctgttgtgttggtccctctacgcctagtttggacaaaaatcatcaagtcccaactatcaaggtgcacactatcagcttgagtgagaacggagaagaggtgtag

SEQ ID NO: 14380 - DNA, 2281 bp, Artificial Sequence
  derived and/or modified sequence
gaattccgaatcatgtgcagaatgctgaatcttcccccagccaggacgaataagacagcgcggaaaagcagattctcgtaattctggaattgcatgttgcaaggagtctcctggatcttcgcacccagcttcgggtagggagggagtccgggtcccgggctaggccagcccggcaggtggagagggtccccggcagccccgcgcgcccctggccatgtctttaatgccctgccccttcatgtggccttctgagggttcccagggctggccagggttgtttcccacccgcgcgcgcgctctcacccccagccaaacccacctggcagggctccctccagccgagaccttttgattcccggctcccgcgctcccgcctccgcgccagcccgggaggtggccctggacagccggacctcgcccggccccggctgggaccatggtgtttctctcgggaaatgcttccgacagctccaactgcacccaaccgccggcaccggtgaacatttccaaggccattctgctcggggtgatcttggggggcctcattcttttcggggtgctgggtaacatcctagtgatcctctccgtagcctgtcaccgacacctgcactcagtcacgcactactacatcgtcaacctggcggtggccgacctcctgctcacctccacggtgctgcccttctccgccatcttcgaggtcctaggctactgggccttcggcagggtcttctgcaacatctgggcggcagtggatgtgctgtgctgcaccgcgtccatcatgggcctctgcatcatctccatcgaccgctacatcggcgtgagctacccgctgcgctacccaaccatcgtcacccagaggaggggtctcatggctctgctctgcgtctgggcactctccctggtcatatccattggacccctgttcggctggaggcagccggcccccgaggacgagaccatctgccagatcaacgaggagccgggctacgtgctcttctcagcgctgggctccttctacctgcctctggccatcatcctggtcatgtactgccgcgtctacgtggtggccaagagggagagccggggcctcaagtctggcctcaagaccgacaagtcggactcggagcaagtgacgctccgcatccatcggaaaaacgccccggcaggaggcagcgggatggccagcgccaagaccaagacgcacttctcagtgaggctcctcaagttctcccgggagaagaaagcggccaaaacgctgggcatcgtggtcggctgcttcgtcctctgctggctgccttttttcttagtcatgcccattgggtctttcttccctgatttcaagccctctgaaacagtttttaaaatagtattttggctcggatatctaaacagctgcatcaaccccatcatatacccatgctccagccaagagttcaaaaaggcctttcagaatgtcttgagaatccagtgtctctgcagaaagcagtcttccaaacatgccctgggctacaccctgcacccgcccagccaggccgtggaagggcaacacaaggacatggtgcgcatccccgtgggatcaagagagaccttctacaggatctccaagacggatggcgtttgtgaatggaaatttttctcttccatgccccgtggatctgccaggattacagtgtccaaagaccaatcctcctgtaccacagcccgggtgagaagtaaaagctttttgcaggtctgctgctgtgtagggccctcaacccccagccttgacaagaaccatcaagttccaaccattaaggtccacaccatctccctcagtgagaacggggaggaagtctaggacaggaaagatgcagaggaaaggggaataatcttaggtacccaccccacttccttctcggaaggccagctcttcttggaggacaagacaggaccaatcaaagaggggacctgctgggaatggggtgggtggtagacccaactcatcaggcagcgggtagggcacagggaagagggagggtgtctcacaaccaaccagttcagaatgatacggaacagcatttccctgcagctaatgctttcttggtcactctgtgcccacttcaacgaaaaccaccatgggaaacagaatttcatgcacaatccaaaagactataaatataggattatgatttcatcatgaatattttgagcacacactctaagtttggagctatttcttgatggaagtgaggggattttattttcaggctcaacctactgacagccacatttgacatttatg

SEQ ID NO: 14381 - DNA, 2548 bp, Artificial Sequence
  derived and/or modified sequence
acgtcagcgagagctgcaaagttccttgctattcttttctggtgtcggggagctgaatattaaaagggtgattgtggagttaccggttatctgcatttttttttcttttcttattttgactctttttaaaaaatgcaggtaaagtgacagcggttcaggagcttaaagacatcagtggtggaggggtgagtcagcgggtgcaaaaggacaaggatttggtgcctcggagacacggtcccctctccgcctccagagaagagcaggcaggcagctcccgggaccgaagccgggtccacatcccccgcgcgcgagctggtggctcagcagcggcgcttcaggtggacgcggtcaaacgatgccccgcagcctcctgggtctcagcacatattccacacctacgtcccctgacctgtgctcctagaagctggagagagcaggagccttcggtggggcagctcaaaatgtaggtaactgcgggccaggagcagcgcccaacctgtagcgctgcgctacccaaccatcggtccctgcctttgagcgtcgacggctgatcttttggtttgagggagagactggcgctggagttttgaattccgaatcatgtgcagaatgctgaatcttcccccagccaggacgaataagacagcgcggaaaagcagattctcgtaattctggaattgcatgttgcaaggagtctcctggatcttcgcacccagcttcgggtagggagggagtccgggtcccgggctaggccagcccggcaggtggagagggtccccggcagccccgcgcgcccctggccatgtctttaatgccctgccccttcatgtggccttctgagggttcccagggctggccagggttgtttcccacccgcgcgcgcgctctcacccccagccaaacccacctggcagggctccctccagccgagaccttttgattcccggctcccgcgctcccgcctccgcgccagcccgggaggtggccctggacagccggacctcgcccggccccggctgggaccatggtgtttctctcgggaaatgcttccgacagctccaactgcacccaaccgccggcaccggtgaacatttccaaggccattctgctcggggtgatcttggggggcctcattcttttcggggtgctgggtaacatcctagtgatcctctccgtagcctgtcaccgacacctgcactcagtcacgcactactacatcgtcaacctggcggtggccgacctcctgctcacctccacggtgctgcccttctccgccatcttcgaggtcctaggctactgggccttcggcagggtcttctgcaacatctgggcggcagtggatgtgctgtgctgcaccgcgtccatcatgggcctctgcatcatctccatcgaccgctacatcggcgtgagctacccgctgcgctacccaaccatcgtcacccagaggaggggtctcatggctctgctctgcgtctgggcactctccctggtcatatccattggacccctgttcggctggaggcagccggcccccgaggacgagaccatctgccagatcaacgaggagccgggctacgtgctcttctcagcgctgggctccttctacctgcctctggccatcatcctggtcatgtactgccgcgtctacgtggtggccaagagggagagccggggcctcaagtctggcctcaagaccgacaagtcggactcggagcaagtgacgctccgcatccatcggaaaaacgccccggcaggaggcagcgggatggccagcgccaagaccaagacgcacttctcagtgaggctcctcaagttctcccgggagaagaaagcggccaaaacgctgggcatcgtggtcggctgcttcgtcctctgctggctgccttttttcttagtcatgcccattgggtctttcttccctgatttcaagccctctgaaacagtttttaaaatagtattttggctcggatatctaaacagctgcatcaaccccatcatatacccatgctccagccaagagttcaaaaaggcctttcagaatgtcttgagaatccagtgtctctgcagaaagcagtcttccaaacatgccctgggctacaccctgcacccgcccagccaggccgtggaagggcaacacaaggacatggtgcgcatccccgtgggatcaagagagaccttctacaggatctccaagacggatggcgtttgtgaatggaaatttttctcttccatgccccgtggatctgccaggattacagtgtccaaagaccaatcctcctgtaccacagcccgggtgagaagtaaaagctttttgcaggtctgctgctgtgtagggccctcaacccccagccttgacaagaaccatcaagttccaaccattaaggtccacaccatctccctcagtgagaacggggaggaagtctaggacaggaaagatgcagaggaaaggggaataatcttaggtacccaccccacttccttctcggaaggccagctcttcttggaggacaagacaggaccaatcaaagaggggacctgctgggaatgg

SEQ ID NO: 14382 - DNA, 1401 bp, Artificial Sequence
  derived and/or modified sequence
atggtgttcctgtctggaaatgccagtgacagcagcaactgcacccagcccccagcccctgtgaacatcagcaaggccatcctgctgggcgtcatcctgggcggcctcatcctgtttggagtgctgggcaacatcctggtgatcctgtctgtggcctgccaccgccacctgcacagcgtgacccactactacatcgtgaacctggccgtggccgacctgctgctgaccagcacagtgctgcccttcagcgccatctttgaggtgctgggctactgggccttcggccgggtcttctgcaacatctgggccgctgtggatgtgctgtgctgcacagccagcatcatgggcctgtgcatcatcagcattgaccgctacatcggcgtgtcctaccccctgcgctaccccaccatcgtgacccagaggcggggcctgatggccctgctgtgtgtgtgggccctgagcctggtgatcagcatcggccccctgtttggctggaggcagcctgccccagaagatgagaccatctgccagatcaatgaggagcccggctacgtgctcttcagcgccctgggcagcttctacctgcccctggccatcatcctggtgatgtactgccgggtgtatgtggtggccaagcgggagagccggggcctgaagagcggcctgaagacagacaagagtgacagcgagcaggtgaccctgcgcatccacaggaagaatgccccagctgggggcagcggcatggccagcgccaagaccaagacccacttctctgtgcggctgctgaagttcagccgggagaagaaggccgccaagaccctgggcatcgtggtgggctgctttgtgctgtgctggctgcccttcttcctggtgatgcccatcggcagcttcttcccagacttcaagcccagcgagaccgtcttcaagatcgtgttctggctgggctacctgaacagctgcatcaaccccatcatctacccctgcagcagccaggagttcaagaaggccttccagaatgtgctgcgcatccagtgcctgtgcaggaagcagagcagcaagcacgccctgggctacaccctgcacccccccagccaggccgtggagggccagcacaaggacatggtgcgcatccctgtgggcagccgggagaccttctaccgcatcagcaagacagatggagtgtgtgagtggaagttcttcagctccatgccccggggcagcgcccgcatcaccgtgtccaaggaccagagcagctgcaccacagcccgggtgcgcagcaagagcttcctgcaggtgtgctgctgcgtgggccccagcacccccagcctggacaagaaccaccaggtgcccaccatcaaggtgcacaccatcagcctgtctgaaaatggagaggaggtgtag

SEQ ID NO: 14383 - DNA, 1401 bp, Artificial Sequence
  derived and/or modified sequence
atggtgttcctgagcggcaacgccagcgacagcagcaactgcacccagccaccagcgcctgtcaatattagcaaggccatcttgcttggcgttatcctagggggcttaattttattcggcgtgcttgggaatatcttagtaatcctctccgtggcttgccaccgtcaccttcacagcgtaacccactattacatcgtgaacctggccgtggctgatctgttactgacaagcaccgtgcttcccttctctgctattttcgaagttctgggttattgggcatttggcagggtgttctgcaacatctgggctgcagtggatgtcctgtgttgcactgcttcaattatgggcctgtgcatcatttcgatagacagatatatcggagtgagttaccccctcagatatcctaccattgtgacccagagacggggtttgatggctcttttatgcgtttgggcactttctctagtcatcagcattggcccgctgtttggatggcgccagcctgcccctgaggacgaaacaatctgccagatcaacgaggagcccggatacgttctgtttagtgcccttggaagcttttacctacctctggctataatcctggtaatgtactgccgggtctatgtcgtagccaaaagggaatcccggggactaaagagtggtctgaaaactgacaagagcgactccgagcaagtaacccttcgtattcacaggaaaaatgcccccgctggtggcagcggtatggcctctgctaagactaaaactcatttttctgtgaggctgcttaaattctccagagaaaagaaagccgccaagactctgggaatagtagtcggctgtttcgttctatgttggttgccgttctttttggtgatgccgatcgggtcctttttccccgattttaagccgagcgaaacagtcttcaagattgtattttggttaggctacttgaactcatgtattaaccccatcatttacccctgtagttcccaggaattcaagaaggcatttcagaatgttttgaggatacaatgcctgtgtaggaagcagtcatccaagcatgctttgggctataccctccatcccccttcacaggcggtggaaggacagcacaaggatatggttcgcatcccggtagggtcgcgcgagaccttctaccggatttccaagacagacggggtgtgcgaatggaagttcttctctagcatgccgcgcggatccgcccggatcacagtgtccaaggaccagagcagttgcacgacagccagagtgaggtctaagtctttccttcaggtctgctgttgcgtaggccctagcacgcctagtcttgataaaaaccaccaggtgcccactatcaaggtccatactatttccctgtccgaaaatggcgaagaggtgtag

SEQ ID NO: 14384 - DNA, 1401 bp, Artificial Sequence
  derived and/or modified sequence
atggtgttcctgagcggcaacgccagcgacagcagcaactgcacccagccacctgcacctgtcaatattagtaaggccattttactcggcgtcatcctgggaggcctgatcctgttcggagtcttaggaaacattttggtaattctcagcgttgcctgccataggcatctccattcggtgacccactattacatcgttaacctcgccgtggccgatctgctgctgacgagcaccgtcctacccttctctgccatcttcgaagtgctgggctattgggcctttggtagggtgttctgcaacatttgggcagccgtggacgttctgtgctgcactgcatctattatgggcctttgtattatttcaatcgataggtacatcggagtgtcctatcctctcagatacccgacaatcgtgacccaaagacgcggcctgatggctttactatgcgtatgggcgttgagcctggtcatcagcataggacctctgtttggttggagacagcccgccccagaagatgagactatttgtcagatcaatgaggaacccgggtacgtcctgttcagcgcactgggatccttctacctgcccttagccatcattctggtgatgtactgccgtgtttatgttgtcgctaagagggagtcccgtggattaaagagtggcctgaaaaccgacaagtctgatagcgagcaggttacgttaaggatccatcgcaaaaacgctcctgctggcgggagtggaatggctagtgccaaaaccaagactcatttttctgtgaggctcctgaagttctcccgagaaaagaaggctgccaagacattgggcattgtggtgggctgtttcgttctctgttggcttccctttttcctggtcatgcctatcggatcgttttttccggacttcaagccttcagagacggtgttcaaaattgtgttttggctggggtacctaaactcctgcatcaatcccatcatctatccttgttcttcacaggagtttaaaaaggcctttcaaaatgtgttgagaatccagtgcctgtgtcgaaagcagagtagcaagcatgccttgggatacacgctccacccccccagccaggctgtggagggccagcataaggatatggtacgcattcccgttggcagccgggaaacattctacaggataagtaagaccgatggggtgtgtgaatggaagtttttcagctccatgccaagaggctctgctcgtattaccgtcagcaaggaccaaagcagttgtacaacagcccgcgtgcgctcaaaatctttcctccaggtctgttgttgtgtcgggccctcaacccccagcctcgataaaaatcaccaagtccccaccattaaggttcacacgatcagcctttccgagaatggcgaagaagtgtag

SEQ ID NO: 14385 - DNA, 1401 bp, Artificial Sequence
  derived and/or modified sequence
atggtgtttctctctggtaacgcgtctgattccagcaattgcacccagccgccagcacccgtcaacatatcaaaggctatcctcttgggagtcattttagggggtcttattctttttggagtcctgggtaacatcctggtgatcctgagcgttgcatgccataggcacttgcactctgtaacccactattacattgttaatctagcagtagctgacttgctgctgacaagcacggttctaccattttctgctattttcgaagtgttgggctactgggcattcgggagagtcttctgcaatatatgggccgctgtggacgtattgtgctgtaccgctagtattatgggtctgtgcattattagtatcgatcgatatatcggggtgagctaccccctcagatacccgactatcgtgacccagcggcgtgggttgatggcacttctgtgcgtgtgggccttatctctggttatcagcatcggacctctgtttggttggagacagcctgcccctgaggatgagactatctgtcaaataaatgaggaacccggatatgttctgtttagcgccttgggctccttttaccttccactggccattatcttggtgatgtattgccgtgtgtacgtggtggccaagcgagaatctcgtggcctcaaatccggcttgaagacagataagtccgattccgagcaggtgaccttaaggattcaccgcaaaaatgctccagcaggaggctctggaatggccagcgccaagaccaagacacatttctcagtgagacttttgaagtttagcagagagaaaaaggccgctaaaacgttgggaatagtagtaggttgcttcgtgctctgctggctgcccttcttccttgtgatgcccatcggcagtttctttcctgactttaaaccttctgaaactgtgtttaagatcgttttctggcttgggtacctgaactcttgcatcaaccctataatttatccatgttccagccaagaatttaaaaaggcctttcagaatgtgttaaggatacagtgtctgtgccgcaagcagagctccaagcacgccctcggatacacattacacccaccaagccaggcagtcgaagggcagcacaaagatatggtccggatccctgtgggaagtcgggagacattttaccggatcagcaagaccgacggggtttgcgagtggaagttcttctctagcatgccaagggggagtgcacgtattactgtgtccaaagaccaatcttcgtgcactacggcgagggttaggagcaagtcctttttgcaagtgtgttgttgcgtagggccaagcacgcctagcctcgataagaaccatcaggtgcccacaatcaaggtgcacacaatctcgctttcggaaaatggtgaagaggtctag

SEQ ID NO: 14386 - DNA, 1401 bp, Artificial Sequence
  derived and/or modified sequence
atggtcttcttgagtggcaacgcctcagattcaagcaactgtacccaacctcccgctccggtcaatatctccaaggcaatactgctcggagtcattctgggaggattgatcttatttggggttctgggcaacatcttggtgattctgtccgtggcttgccaccgccatctacacagcgtgactcattactacattgtgaatctggctgtggcagacctacttcttacatccactgtccttcctttctctgctatctttgaggtgcttgggtattgggctttcggcagagtcttttgcaacatttgggccgctgtcgacgtgctgtgttgcacagcttctatcatggggctgtgtattatcagtatagaccgctacattggcgtctcgtatccgcttcgctaccccactatcgtgacacagcgcagggggttaatggctctcctctgtgtatgggcactttcactcgtcatcagcataggtcccttgttcggctggagacagccagcacccgaggacgaaacaatttgccagattaacgaggagccgggatatgttctattcagcgcattgggcagcttttatctacccctcgccattatcctggtgatgtattgtagggtctacgtggttgcgaaacgggagtcaaggggtctcaaaagcggtctgaagactgacaaatccgattctgaacaagtgaccctgaggatacatagaaaaaacgctccagccggtggaagcggcatggcctcggccaagacaaaaacgcactttagcgttagactgctaaagttttcccgagaaaaaaaggctgccaaaaccctgggcattgtcgttggttgtttcgtcttgtgttggctccctttcttcttagtgatgcctatcggtagtttctttcccgacttcaagccctccgagacggtgttcaaaattgtcttttggctcggctacttaaactcctgcattaatcctatcatctacccatgttcctctcaggagttcaagaaagcctttcagaacgtgcttagaatccagtgtctttgtagaaagcagagctctaaacacgcactggggtacactttacatcccccaagtcaggcagtggagggccagcacaaggatatggtgcgcatccctgtaggctcaagagagacattctatcggatctcgaagaccgacggtgtgtgtgagtggaagttcttctcctcaatgccacggggatctgcgagaataaccgtgtccaaggaccaatctagctgtacaaccgctcgtgtcagatctaagagttttctccaggtgtgctgctgtgttggaccatcgaccccttctctggataaaaaccaccaggtgcctaccatcaaggtgcacaccatctcactcagcgaaaatggagaggaagtgtag

SEQ ID NO: 14387 - DNA, 1401 bp, Artificial Sequence
  derived and/or modified sequence
atggtgttcctgagcggcaacgccagcgacagcagcaactgcacccagccccccgcccccgtgaacatcagcaaggccatcctgctgggcgtgatcctgggcggcctgatcctgttcggcgtgctgggcaacatcctggtgatcctgagcgtggcctgccacagacacctgcacagcgtgacccactactacatcgtgaacctggccgtggccgacctgctgctgaccagcaccgtgctgcccttcagcgccatcttcgaggtgctgggctactgggccttcggcagagtgttctgcaacatctgggccgccgtggacgtgctgtgctgcaccgccagcatcatgggcctgtgcatcatcagcatcgacagatacatcggcgtgagctaccccctgagataccccaccatcgtgacccagagaagaggcctgatggccctgctgtgcgtgtgggccctgagcctggtgatcagcatcggccccctgttcggctggagacagcccgcccccgaggacgagaccatctgccagatcaacgaggagcccggctacgtgctgttcagcgccctgggcagcttctacctgcccctggccatcatcctggtgatgtactgcagagtgtacgtggtggccaagagagagagcagaggcctgaagagcggcctgaagaccgacaagagcgacagcgagcaggtgaccctgagaatccacagaaagaacgcccccgccggcggcagcggcatggccagcgccaagaccaagacccacttcagcgtgagactgctgaagttcagcagagagaagaaggccgccaagaccctgggcatcgtggtgggctgcttcgtgctgtgctggctgcccttcttcctggtgatgcccatcggcagcttcttccccgacttcaagcccagcgagaccgtgttcaagatcgtgttctggctgggctacctgaacagctgcatcaaccccatcatctacccctgcagcagccaggagttcaagaaggccttccagaacgtgctgagaatccagtgcctgtgcagaaagcagagcagcaagcacgccctgggctacaccctgcacccccccagccaggccgtggagggccagcacaaggacatggtgagaatccccgtgggcagcagagagaccttctacagaatcagcaagaccgacggcgtgtgcgagtggaagttcttcagcagcatgcccagaggcagcgccagaatcaccgtgagcaaggaccagagcagctgcaccaccgccagagtgagaagcaagagcttcctgcaggtgtgctgctgcgtgggccccagcacccccagcctggacaagaaccaccaggtgcccaccatcaaggtgcacaccatcagcctgagcgagaacggcgaggaggtgtag

SEQ ID NO: 14388 - protein, 465 aa, Artificial Sequence
  derived and/or modified sequence
MFRQEQPLAEGSFAPMGSLQPDAGNASWNGTEAPGGGARATPYSLQVTLTLVCLAGLLMLLTVFGNVLVIIAVFTSRALKAPQNLFLVSLASADILVATLVIPFSLANEVMGYWYFGKAWCEIYLALDVLFCTSSIVHLCAISLDRYWSITQAIEYNLKRTPRRIKAIIITVWVISAVISFPPLISIEKKGGGGGPQPAEPRCEINDQKWYVISSCIGSFFAPCLIMILVYVRIYQIAKRRTRVPPSRRGPDAVAAPPGGTERRPNGLGPERSAGPGGAEAEPLPTQLNGAPGEPAPAGPRDTDALDLEESSSSDHAERPPGPRRPERGPRGKGKARASQVKPGDSLPRRGPGATGIGTPAAGPGEERVGAAKASRWRGRQNREKRFTFVLAVVIGVFVVCWFPFFFTYTLTAVGCSVPRTLFKFFFWFGYCNSSLNPVIYTIFNHDFRRAFKKILCRGDRKRIV

SEQ ID NO: 14389 - DNA, 1398 bp, Artificial Sequence
  derived and/or modified sequence
atgttcagacaagaacagccgttggctgaagggtcctttgcgccaatgggcagcctccagccggacgccggtaatgcatcctggaatggaaccgaggcccctggcggcggcgcccgggccacgccatatagcctacaagtcactttaaccctggtctgcctggccgggttgctgatgttgcttaccgtgtttgggaacgttttagttatcatcgccgtctttaccagccgtgccctcaaagccccacaaaatttatttctggtctctctggccagcgccgatatattggtagcaacgcttgtcattcccttctccctcgcaaatgaggtgatggggtactggtattttggcaaagcgtggtgcgaaatctaccttgcccttgacgttctgttctgcacatcatcaatcgtccacctgtgcgccatcagcctcgaccggtactggagcattacccaggcaatcgagtataacctgaagcgaaccccacgacgaattaaagcaattattatcactgtctgggtgatcagtgccgttattagtttcccccctcttataagtattgagaaaaaggggggcgggggcggtccacagccagctgaaccacgttgcgagatcaacgaccaaaaatggtatgtgatctcctcctgtatcggatccttcttcgctccatgcctcatcatgattttggtgtacgtgagaatttaccagattgctaagagaagaactagggtgccaccgtccagacgcggcccagacgccgtagccgctcctccgggcgggacagaacgtaggccaaatggtctgggtcccgaacgaagtgctggccccgggggcgctgaagccgagcccctcccaacccagcttaatggggcacccggagaaccggcacccgccggaccacgagacaccgacgctctcgacctggaggaaagcagttcatccgatcacgctgaacggcctccagggccacggcggcctgagcgtggcccccgtggcaaaggcaaagccagagcaagccaggttaagcccggcgattctcttcccagaaggggcccaggggctacagggattgggacgcccgccgcggggccaggggaggagcgcgtgggggcagcgaaggcgagccggtggaggggccgccagaacagggaaaagcgcttcactttcgtcctggccgtggtaataggggtgttcgtggtgtgttggtttccattcttttttacctacacgcttacagccgtcggctgtagcgtccctagaaccctatttaagtttttcttttggttcggttactgtaatagctctctgaaccctgtcatatacaccatttttaatcatgacttccggcgcgcttttaagaaaatcttgtgtcgaggggatcggaaacgtattgtgtag

SEQ ID NO: 14390 - DNA, 1398 bp, Artificial Sequence
  derived and/or modified sequence
atgttccggcaggagcagcccctggccgagggcagctttgcccccatgggcagcctgcagccagatgctggaaatgcctcctggaatggaacagaggcccctgggggcggggcccgggccaccccctacagcctgcaggtgaccctgaccctggtgtgcctggccggcctgctgatgctgctgactgtgtttggaaatgtgctggtgatcatcgctgtgttcaccagccgggccctgaaggccccccagaacctcttcctggtgtccctggccagcgctgacatcctggtggccaccctggtgatccccttcagcctggccaatgaggtgatgggctactggtactttgggaaggcctggtgtgagatctacctggccctggatgtgctcttctgcaccagcagcatcgtgcacctgtgtgccatcagcctggaccgctactggagcatcacccaggccatcgagtacaacctgaagaggaccccccggcgcatcaaggccatcatcatcaccgtgtgggtgatctctgctgtgatctccttccccccactcatcagcattgagaagaagggcggcggcggcggcccccagcctgctgagccccgctgtgagatcaatgaccagaagtggtacgtgatcagcagctgcatcggcagcttctttgccccctgcctgatcatgatcctggtgtatgtgcgcatctaccagatcgccaagaggaggaccagggtgccccccagccggcggggcccagatgctgtggccgcccctcctgggggcacagaaagaagacccaacggcctgggccctgagaggtctgctggccctgggggcgctgaggccgagcccctgcccacccagctgaatggagcccctggagagcccgccccagctggcccccgggacacagatgccctggacctggaggagagcagcagcagtgaccatgctgagcggcccccaggcccccggcggcctgagcggggcccccggggcaagggcaaggcccgggccagccaggtgaagccaggggacagcctgccccggcggggccctggggccactggaattggcaccccagctgctggccctggagaggagcgggtgggcgccgccaaggccagccgctggaggggccggcagaaccgggagaagcgcttcacctttgtgctggccgtggtgattggagtgtttgtggtgtgctggttccccttcttcttcacctacaccctgacagctgtgggctgcagcgtgcccaggaccctcttcaagttcttcttctggtttggctactgcaacagcagcctgaaccctgtgatctacaccatcttcaaccacgacttcagaagagccttcaagaagatcctgtgccgcggggacaggaagagaattgtgtag

SEQ ID NO: 14391 - DNA, 1398 bp, Artificial Sequence
  derived and/or modified sequence
atgttccggcaggagcagcccctggccgagggcagcttcgcccccatgggctccctgcaacccgatgcgggtaacgctagttggaatggcactgaagctcccggtggcggcgcaagggctaccccctattccttgcaggtaaccttaaccctggtgtgtctcgctggtcttttgatgctgcttaccgtgtttggcaatgttctggtcatcatcgctgtctttacttcccgggcgcttaaggcaccccagaacctgttcctggtgtccctggcgtccgccgacattttagtcgccacattagtgatccccttctcattagcaaatgaggttatggggtattggtatttcgggaaagcctggtgtgagatttatctggctttagacgtattattttgtacttcttcaattgtccacttgtgcgcgatctcattggaccggtattggtctattactcaggctattgagtataacctcaagcgcactccacgccggattaaagccatcatcattacggtctgggtcatctctgcggtcatcagttttcccccattgatcagtatcgagaagaagggcggaggcggtggtccgcaaccggctgagcctaggtgcgaaatcaacgatcagaagtggtacgtcatttcctcttgcatcggctctttcttcgccccctgcctgatcatgatccttgtatatgtccgaatctatcaaattgccaaacggcggacgcgcgtccctccttcaaggcgcggacctgacgcagtcgctgccccaccaggcgggactgaacgacggcctaatggactgggccccgagcgaagcgcaggcccaggaggagctgaagcagagccactgccgacgcagttaaatggcgctcctggggaacccgctccggccggcccacgcgacacagacgccctggatctggaggagtcttcaagttctgatcatgctgagcgaccgccaggccctaggcggccagagagagggccaaggggcaaaggcaaggctcgggcgagccaagtgaaaccgggcgactctcttccacgcaggggtcctggcgctacgggcataggaacgcctgccgcaggccctggcgaggagagggtgggggctgccaaagcctcaagatggaggggcagacagaacagagaaaaacgcttcacattcgtactcgctgtggtgattggtgtattcgtggtgtgctggttccccttcttttttacctacaccctaacagccgttggctgcagcgttccacgtacgctgttcaagttcttcttttggttcggatattgcaatagctcactcaaccccgttatttatactattttcaaccatgacttcaggcgtgccttcaagaagattctgtgcagaggggaccggaaacgtatagtgtag

SEQ ID NO: 14392 - DNA, 3869 bp, Artificial Sequence
  derived and/or modified sequence
cagcagcagctccagctcggtgcagaagcccagcagccggcgtgccgccgcccggccactccagcgccttcttccccgccttgcgctcctgccccaactcgcgctgtcgtcggaccccggcccatccagcagcgctcggcgcccaccaggcggacgcccaggagaacccctgcctccgtcgcggctcctggagagctgatcgttcacctgccccggcccgcctgaggacgggggtgccttcatgcggcccccacactcctcaccccgccgccgccgccgtcccggagctccgcacagtgtgccccagccccagcagggcgcacaactttggaagtctcgcggcgctccgagaggcggcagagtccgcgccccagccccgggccgggccgggccagaaccgcagcgtctgggggaagccagagagtcggtaatcgcttcggggatgtaaggcgacagacataggacccccgagctcgcatcagcacccttcggctgcctcccggggtgggggcgggccccgcacacggtaagacctcttgctttcgctcaggctcaagattcaagatacagatattgatatgtatatatatatttaatttcctgtcatccttccaagttatcaggccaccgatgatttttgttctcccttcttgaagaataaatctctctttacccatcggctctccctactctctcccgccgcttagaaataaaacttggctgtattaggagctcggagcaagaaggcgcccaccgagagcgtctgaagcgcgagccaggcgcagttcgcgggacccgggccatgggccgctagcggtcctccagttcgggcccggcctccctgcggccccctccctatgtgagccgcagccaggcgagcggggcgccggaggaagaggaggacccacgggcgccgggccggaaggcagctggcagcaggcccaggccagcgggcgcccgcgttcatgttccgccaggagcagccgttggccgagggcagctttgcgcccatgggctccctgcagccggacgcgggcaacgcgagctggaacgggaccgaggcgccggggggcggcgcccgggccaccccttactccctgcaggtgacgctgacgctggtgtgcctggccggcctgctcatgctgctcaccgtgttcggcaacgtgctcgtcatcatcgccgtgttcacgagccgcgcgctcaaggcgccccaaaacctcttcctggtgtctctggcctcggccgacatcctggtggccacgctcgtcatccctttctcgctggccaacgaggtcatgggctactggtacttcggcaaggcttggtgcgagatctacctggcgctcgacgtgctcttctgcacgtcgtccatcgtgcacctgtgcgccatcagcctggaccgctactggtccatcacacaggccatcgagtacaacctgaagcgcacgccgcgccgcatcaaggccatcatcatcaccgtgtgggtcatctcggccgtcatctccttcccgccgctcatctccatcgagaagaagggcggcggcggcggcccgcagccggccgagccgcgctgcgagatcaacgaccagaagtggtacgtcatctcgtcgtgcatcggctccttcttcgctccctgcctcatcatgatcctggtctacgtgcgcatctaccagatcgccaagcgtcgcacccgcgtgccacccagccgccggggtccggacgccgtcgccgcgccgccggggggcaccgagcgcaggcccaacggtctgggccccgagcgcagcgcgggcccggggggcgcagaggccgaaccgctgcccacccagctcaacggcgcccctggcgagcccgcgccggccgggccgcgcgacaccgacgcgctggacctggaggagagctcgtcttccgaccacgccgagcggcctccagggccccgcagacccgagcgcggtccccggggcaaaggcaaggcccgagcgagccaggtgaagccgggcgacagcctgccgcggcgcgggccgggggcgacggggatcgggacgccggctgcagggccgggggaggagcgcgtcggggctgccaaggcgtcgcgctggcgcgggcggcagaaccgcgagaagcgcttcacgttcgtgctggccgtggtcatcggagtgttcgtggtgtgctggttccccttcttcttcacctacacgctcacggccgtcgggtgctccgtgccacgcacgctcttcaaattcttcttctggttcggctactgcaacagctcgttgaacccggtcatctacaccatcttcaaccacgatttccgccgcgccttcaagaagatcctctgtcggggggacaggaagcggatcgtgtgaggtttccgctggcgcccgcgtagactcacgctgactgcaggcagcggggggcatcgaggggtgcttagccccagggcactcagaaacccgggcgctgcctgctctgcgtttcctcgtctggggtggctctgcagcctcctgcgggcgggcgtctgctgctcctacaagggaagcttcttgctgccaggcccacacatccccagttgttggtttggccactcttgacctggagccatcttcctagtgggccacccctaatcactattgcttcctaaaggtattttcaccctcttcgcctggtacagccctcacagctcttcagagcaagcactggactacaagggcatggctcacaaaaggttaatggatgggggttacctagccctggctaattccccttccattcccaactctctctctctttttaaagaaaaatgctaagggcagccctgcctgccctccccatcccccgctgtaaatatacactatttttgatagcacacatggggcccccatatctcttggccttggttttgatgttgaaatcctggccttgggagagatgccttccaggcagacacagctgtctggttcaggccaagcccctttgcaatgcaagccctttctggtgttatgaagtccctctatgtcgtcgttttcaccagcaactggtgactgtcccttcgacacggacctgctttgagatttcctgacagggaaaagatttctgtccatttttttcctgtgcctaacagcataattgccttttcctatgtaaatattatgatggtggatcaagacataagtaaatgagcctttctgcctcacatcagccctgtgtataaagccattattctctgatgcactgtttgccccagtaactcactttaaaacctctctttccagtgttccctctctccctccagggccactgcttgaagaagaatatgtatgtttctatcttgtatgtctgtgtgcccctcctgccccgaaagtgctgactatggggaaatcttttagctgctgtttttagactccaaggagtggaaattatgtggaagaagcaaacctgatacaatttgcccaaggtaaacagtttgaaaagacaaatgggcctgccaaactgtacagtttcttccccaagagctgttaggtatcaaaatgttgtcctttcccccctccgtgcttttctggttgagatcatgtcattgatgaactgccaaagtcaggggaggagggcagagactttgtgtttacatctgcatttctacatgttttagacagagacaatttaaggcctgcactcttatttcactaaagaaaaactaatgtcagcacatgttgctaatgacagtggatttttttttaaataaaaaagtttacagatcaaatgtgaaataaatatgaatggagtggtcctcttgtctgttatctgagttttcaaaagctttaagactctgggaacatctgattttatggattttttaaaaataaaaaatgtacatt

SEQ ID NO: 14393 - DNA, 1398 bp, Artificial Sequence
  derived and/or modified sequence
atgtttaggcaagagcagccactggcggagggctcttttgctccaatgggaagcctacaaccggacgccggtaacgcctcatggaacggcactgaagcccctgggggaggagcccgtgccaccccttacagtctacaggtgactctcacccttgtctgtctcgctggcctgctcatgttgctaacagtgtttggcaacgttttagtcataatcgccgtatttacctctcgggctcttaaagcgccacagaacttatttttggtatccctcgcctccgctgacattctagttgctacactggtaatcccttttagtctcgctaatgaggtgatgggatattggtactttggtaaggcttggtgtgagatctaccttgctctagatgtgctcttttgtacgtcatctatcgtacacctatgcgccatttcactagataggtattggtcaatcacacaggccattgagtacaacctgaagagaaccccccgtaggataaaggctataatcataacggtttgggttatctctgctgtcatcagttttccaccactcattagcatcgaaaagaagggtgggggtggcggaccccagcctgctgagcctcgttgcgaaatcaacgaccagaagtggtacgtgatctcatcctgtataggatccttcttcgccccatgcctgatcatgatcctggtctacgtgcggatctaccaaatcgctaaacggcgtacaagggtgccgcctagtcgcagaggaccagacgctgtggcggcacctccaggtggcacagagaggagacccaatggcctgggccctgaaagatcggccggacccggtggagccgaggcagaacccctgcccacccaactcaacggggctcctggagaacccgctcctgcaggccctcgtgatacagatgcccttgatctcgaagagtcctctagttccgaccacgccgaacggcctcctggaccacggaggcctgagcgaggccctcgagggaagggtaaagcacgggctagccaggtgaagccgggagactctctgccacgcagaggaccaggagcgaccggaattggaacacccgctgctggaccaggggaggagcgagtgggcgctgcaaaggctagtaggtggcgaggcaggcagaacagggaaaagcgattcacatttgtgttggccgtggtgattggtgtcttcgtcgtctgctggtttccttttttcttcacatacaccctcacagccgtcgggtgtagtgtaccccgtaccctttttaagttctttttctggtttggttactgtaacagcagcctgaatccagtgatctacaccattttcaatcacgattttagacgtgcctttaaaaagattctttgccggggagaccgcaagcgcattgtttag

SEQ ID NO: 14394 - DNA, 1398 bp, Artificial Sequence
  derived and/or modified sequence
atgttcagacaggagcagcccctggccgagggcagcttcgcccccatgggcagcctgcagcccgacgccggcaacgccagctggaacggcaccgaggcccccggcggcggcgccagagccaccccctacagcctgcaggtgaccctgaccctggtgtgcctggccggcctgctgatgctgctgaccgtgttcggcaacgtgctggtgatcatcgccgtgttcaccagcagagccctgaaggccccccagaacctgttcctggtgagcctggccagcgccgacatcctggtggccaccctggtgatccccttcagcctggccaacgaggtgatgggctactggtacttcggcaaggcctggtgcgagatctacctggccctggacgtgctgttctgcaccagcagcatcgtgcacctgtgcgccatcagcctggacagatactggagcatcacccaggccatcgagtacaacctgaagagaacccccagaagaatcaaggccatcatcatcaccgtgtgggtgatcagcgccgtgatcagcttcccccccctgatcagcatcgagaagaagggcggcggcggcggcccccagcccgccgagcccagatgcgagatcaacgaccagaagtggtacgtgatcagcagctgcatcggcagcttcttcgccccctgcctgatcatgatcctggtgtacgtgagaatctaccagatcgccaagagaagaaccagagtgccccccagcagaagaggccccgacgccgtggccgccccccccggcggcaccgagagaagacccaacggcctgggccccgagagaagcgccggccccggcggcgccgaggccgagcccctgcccacccagctgaacggcgcccccggcgagcccgcccccgccggccccagagacaccgacgccctggacctggaggagagcagcagcagcgaccacgccgagagaccccccggccccagaagacccgagagaggccccagaggcaagggcaaggccagagccagccaggtgaagcccggcgacagcctgcccagaagaggccccggcgccaccggcatcggcacccccgccgccggccccggcgaggagagagtgggcgccgccaaggccagcagatggagaggcagacagaacagagagaagagattcaccttcgtgctggccgtggtgatcggcgtgttcgtggtgtgctggttccccttcttcttcacctacaccctgaccgccgtgggctgcagcgtgcccagaaccctgttcaagttcttcttctggttcggctactgcaacagcagcctgaaccccgtgatctacaccatcttcaaccacgacttcagaagagccttcaagaagatcctgtgcagaggcgacagaaagagaatcgtgtag

SEQ ID NO: 14395 - protein, 447 aa, Artificial Sequence
  derived and/or modified sequence
MDHQDPYSVQATAAIAAAITFLILFTIFGNALVILAVLTSRSLRAPQNLFLVSLAAADILVATLIIPFSLANELLGYWYFRRTWCEVYLALDVLFCTSSIVHLCAISLDRYWAVSRALEYNSKRTPRRIKCIILTVWLIAAVISLPPLIYKGDQGPQPRGRPQCKLNQEAWYILASSIGSFFAPCLIMILVYLRIYLIAKRSNRRGPRAKGGPGQGESKQPRPDHGGALASAKLPALASVASAREVNGHSKSTGEKEEGETPEDTGTRALPPSWAALPNSGQGQKEGVCGASPEDEAEEEEEEEEECEPQAVPVSPASACSPPLQQPQGSRVLATLRGQVLLGRGVGAIGGQWWRRRAQLTREKRFTFVLAVVIGVFVLCWFPFFFSYSLGAICPKHCKVPHGLFQFFFWIGYCNSSLNPVIYTIFNQDFRRAFRRILCRPWTQTAW

SEQ ID NO: 14396 - DNA, 1344 bp, Artificial Sequence
  derived and/or modified sequence
atggaccatcaggatccctatagcgttcaggccaccgccgctatcgctgcagccattacattcctgattctgttcaccatcttcggcaatgccctggtaatcctcgcagtgctgacttcacgcagcttgcgcgctccacagaatttgttcctcgtgagtttggcagccgccgacattctagtagccaccctgataatccctttcagcctggccaatgaattgttaggatactggtactttaggcggacatggtgtgaagtgtacctcgccttggatgtactcttctgcacttcttctattgttcatctttgcgccattagtttggatcgctactgggccgtctcccgagccctggagtacaatagcaagcgtacccctcggcggattaaatgtatcatcctgaccgtgtggcttatcgccgcagtgatctctctccctcctttaatttataaaggtgatcaggggccgcaacccagggggagacctcaatgtaaactgaaccaagaggcatggtatatcctcgcctcttccatcggtagcttctttgccccctgtctgatcatgattctagtgtacctgaggatttacctgattgcaaagcgatcaaacaggaggggtccccgtgctaagggcggccccggccagggggaatccaagcagccaaggcccgaccatggtggggcactggcatctgctaagctccccgcgctcgcaagcgtggcatccgcccgggaggtgaacggccattctaagtctacaggggaaaaagaagagggcgagacacccgaagatacgggcaccagagccctgccgccatcctgggccgccctccctaatagcggccaaggccagaaggagggggtgtgcggagcctcccccgaagatgaggccgaggaggaggaagaagaggaggaggagtgtgagcctcaggccgtccccgtgagcccggcttcagcctgctcccctccattgcagcagcctcagggctctcgcgttctagctaccctgagagggcaagttcttctggggaggggggtgggcgcaattggggggcagtggtggcggcgcagagcgcagttaacacgagagaagcggtttacttttgtgctggctgttgtgattggagtgttcgtactatgttggtttcccttcttctttagctacagcttgggcgccatctgccccaaacattgcaaggtgccacacggcctgtttcagtttttcttctggattggttactgcaattcctctctgaatcctgtgatctacaccatctttaatcaagactttcgtcgggcctttaggagaattctctgccggccctggacccaaaccgcgtggtag

SEQ ID NO: 14397 - DNA, 3278 bp, Artificial Sequence
  derived and/or modified sequence
aggggcgacgctcttgtctagccgagccgggcagcgctgtcgtccacggtgcgcactgggcgggcagcgctccctctgcccacctcccgccccgtcatggaccaccaggacccctactccgtgcaggccacagcggccatagcggcggccatcaccttcctcattctctttaccatcttcggcaacgctctggtcatcctggctgtgttgaccagccgctcgctgcgcgcccctcagaacctgttcctggtgtcgctggccgccgccgacatcctggtggccacgctcatcatccctttctcgctggccaacgagctgctgggctactggtacttccggcgcacgtggtgcgaggtgtacctggcgctcgacgtgctcttctgcacctcgtccatcgtgcacctgtgcgccatcagcctggaccgctactgggccgtgagccgcgcgctggagtacaactccaagcgcaccccgcgccgcatcaagtgcatcatcctcactgtgtggctcatcgccgccgtcatctcgctgccgcccctcatctacaagggcgaccagggcccccagccgcgcgggcgcccccagtgcaagctcaaccaggaggcctggtacatcctggcctccagcatcggatctttctttgctccttgcctcatcatgatccttgtctacctgcgcatctacctgatcgccaaacgcagcaaccgcagaggtcccagggccaagggggggcctgggcagggtgagtccaagcagccccgacccgaccatggtggggctttggcctcagccaaactgccagccctggcctctgtggcttctgccagagaggtcaacggacactcgaagtccactggggagaaggaggagggggagacccctgaagatactgggacccgggccttgccacccagttgggctgcccttcccaactcaggccagggccagaaggagggtgtttgtggggcatctccagaggatgaagctgaagaggaggaggaggaggaggaagagtgtgaaccccaggcagtgccagtgtctccggcctcagcttgcagccccccgctgcagcagccacagggctcccgggtgctggccaccctacgtggccaggtgctcctgggcaggggcgtgggtgctataggtgggcagtggtggcgtcgacgggcgcagctgacccgggagaagcgcttcaccttcgtgctggctgtggtcattggcgtttttgtgctctgctggttccccttcttcttcagctacagcctgggagccatctgcccgaagcactgcaaggtgccccatggcctcttccagttcttcttctggatcggctactgcaacagctcactgaaccctgttatctacaccatcttcaaccaggacttccgccgtgccttccggaggatcctgtgccgcccgtggacccagacggcctggtgagcccgcctgcgctgcccctgtggggttggtgcggtggcgccggggtcaccctgcttcttgccctgctgtgtgtggctgcctcccctgggctttctgctccctgcccagatcctgtaggcctcatcttaggaaccccttgggaggggtgggcaggggggctgctagcaagggtcccagtgaagcttccccttgccggcttagctgtgggggaccccttctccaccctctccctgagcacaggccgatggaggtggttcaaatcctctggaacatagccaagaccaggagaagagagagcactttcttcccagagccccatgctctccagaccaatgtctgggcttccctttcttgaggaccttgtgttcctggcaggtcacttgcttgtggtgttttcgtttctttttcatctcccccccacccacaaagagcacggagccagccttccacttttcccagtggggcctgctgctgagggggaggaagaaacgaagactgatcacccacgctaggcactcgcggtccctggcaggcgctgggatgggggcttatggggtggcatcgtctctgggccctcctttccccctttgcctgttttcggatctgtggttcctttgaaagccagaacaatggatcggcttccttacccagcacccctccggtaggtgggtggccacgtggatgcctcgctggggcggtcttggaggcctggtctctgcctcgacgggagatccccgatcactggcattcaccccctgcaaaaatcggggcgacaatagctcactgcctacttgctgcagggagatgaaaggctttgcagaaagctttgagctctgtgggggaacacactagagaaccaaaaatgtgattatatggtgatataaaaatccctttcctctgtgtttaccaccacctgtcttcctgtagacttttgttctgtccctggggtgtgtgaattcctaccccgaactggaagccgggagtggcagacagaatcactatttcaagttaaaggatctctttgagaatgtgttcttctggctgcaaaggtctgagttattacgctacatgacaacgtttcgacatttcaccggcaacaccaagagggtttttagtggcttgggtctccccagtgggggataagtcttttgtcatcaaggaggcaaattgtctccccaagacagctcaaaatatccacacctcggcaacagtctaagatgagagcctgtgacaggtggcagcgcccccaggtggggtactggcatcagagcctggtgcgcccctaggggagcctcccactggagtgcccggccaggtctccaagccccaaatgagtccttgtgaaccacaactgatccccccaggtgggtgcttgtggactgcctcggacccagccacgctgctccccgcaatgctgatggggctgtgcattgaggacccctgcttcctggttctcagtcccaccccaaaacctggcacccagaacagttggaagtgtggaaaggaggtttatcggccttcccttggagagggcctggcttcaacattgggccagtaggcatcttagcttggcaggtgtcgggggaatgggccagatggacctgctagatttggaagggcaccgagggagttttctgggtgtagagagaatggaggggaccaaaaagagtccttcctggggtgtgggaggcttcccagcttggtcctcagtgggttgttgaggccagagtatcgccctgggatgtggtggggagctgggccaggagagggactgactgtgaccctctgctggccggtcttgtgtgcgccccatgggacccccagtgttcttgcctgtg

SEQ ID NO: 14398 - DNA, 1344 bp, Artificial Sequence
  derived and/or modified sequence
atggaccaccaggacccctacagcgtgcaggccacagctgccatcgctgctgccatcaccttcctgatcctcttcaccatctttggaaatgccctggtgatcctggccgtgctgaccagccgcagcctgcgggccccccagaacctcttcctggtgtccctggccgctgctgacatcctggtggccaccctcatcatccccttcagcctggccaatgagctgctgggctactggtacttccggaggacctggtgtgaggtgtacctggccctggatgtgctcttctgcaccagcagcatcgtgcacctgtgtgccatcagcctggaccgctactgggccgtgtcccgggccctggagtacaacagcaagaggaccccccggcgcatcaagtgcatcatcctgactgtgtggctgattgctgctgtgatcagcctgcccccactcatctacaagggggaccagggcccccagccccggggccggccccagtgcaagctgaaccaggaggcctggtacatcctggccagcagcatcggcagcttctttgccccctgcctgatcatgatcctggtgtacctgcgcatctacctgattgccaagaggagcaacagaagaggcccccgggccaagggcggccctggccagggcgagagcaagcagcccaggccagaccatggaggagccctggccagcgccaagctgcctgccctggcctctgtggccagcgcccgggaggtgaatggccacagcaagagcactggagagaaggaggagggggagaccccagaggacaccggcacccgggccctgcccccatcctgggccgccctgcccaacagcggccagggccagaaggagggcgtgtgtggggccagcccagaagatgaagctgaggaggaggaggaggaggaggaggagtgtgagccccaggccgtgcctgtgtccccagccagcgcctgcagcccccccctgcagcagccccagggcagccgggtgctggccaccctgcggggccaggtgctgctgggccggggcgtgggcgccatcggcggccagtggtggaggcggcgggcccagctgacccgggagaagcgcttcacctttgtgctggccgtggtgattggagtgtttgtgctgtgctggttccccttcttcttctcctacagcctgggcgccatctgccccaagcactgcaaggtgccccacggcctcttccagttcttcttctggattggctactgcaacagcagcctgaaccctgtgatctacaccatcttcaaccaggacttcagaagagccttccgccgcatcctgtgccggccctggacccagacagcctggtag

SEQ ID NO: 14399 - DNA, 1344 bp, Artificial Sequence
  derived and/or modified sequence
atggaccaccaggacccctacagcgtgcaggccaccgccgccatcgccgccgcgatcacattcctgattctgttcacaatttttggtaatgccctcgtgatactggcggtgctgacaagcaggagtctgcgagcgccccaaaatctattcttggtgagtctggcggccgcagacatcctggtcgcaaccctgattataccgtttagtctcgcaaatgagctgctgggctactggtactttcggagaacatggtgcgaggtttacctagctctggacgtacttttctgtaccagcagtattgtccacttgtgtgccatctctctcgacaggtactgggccgtgagtcgcgccctcgaatataactcgaagaggacacctcggcggataaaatgcattatcttgacagtgtggctgattgccgcagtgataagtctcccaccccttatctataagggggaccagggccctcagcccagagggaggccgcaatgcaaactgaaccaggaggcttggtacatcctcgctagcagcatcgggagcttcttcgccccctgcctgattatgattctggtgtatctcaggatttacctgatcgctaagagatctaaccggcggggcccccgggctaaggggggacccggtcagggcgaaagtaagcagccacggccagatcatggcggggcactggcctcggccaaactacccgcactggcttccgtcgcgagcgcacgagaggtcaacgggcatagcaaatccactggagaaaaggaagagggcgaaacacccgaagatacaggaacccgagcactgcctccttcttgggctgctttgcccaattcggggcaaggccagaaggaaggggtgtgtggtgccagccccgaagacgaggccgaagaggaggaagaagaggaagaggaatgcgagcctcaggccgttcccgtgagtccagcttccgcatgttcgccccccttacaacagccacaaggcagcagagtgcttgccaccctgagaggccaggttcttctaggccgaggtgtgggggcaattgggggccagtggtggagaagaagggcgcagcttaccagagaaaaacgtttcacgtttgtgttagccgtagtaatcggggttttcgtgctctgctggttccccttttttttcagctatagtctgggggcaatttgtccgaagcattgtaaggtgccccacgggctgtttcagttcttcttctggatcgggtactgcaatagttccctcaaccctgtcatttacaccatctttaaccaggactttaggcgggccttcagaaggattctgtgcagaccctggacccagacagcctggtag

SEQ ID NO: 14400 - DNA, 1344 bp, Artificial Sequence
  derived and/or modified sequence
atggatcaccaagacccttacagcgtgcaggccacagcagccatagccgctgctatcacgtttttgatcctgttcaccattttcggaaatgcactggtaatcctagccgtgctgacgtcccggtctctaagagcgccacagaatctgttcctggtgagcctagccgctgcagatatcctggtggccacattgatcatccctttttccttagccaacgagctcttgggttactggtattttcgtaggacctggtgcgaggtgtacttggcgttggatgttctgttctgcacatcatccattgtccacctatgcgctatcagcctcgatcgctattgggcagtgtcaagggcgttggagtataattctaaaaggaccccgcgtagaattaagtgcattatcctgactgtttggttgattgcagcggtgatatctcttccacctctaatctacaagggagaccaagggcctcagccccgtggcagacctcaatgcaagttgaaccaggaggcctggtatattctcgccagctcgattggttccttttttgccccttgcctcattatgatcctggtgtatttacgcatttacctcattgcaaaacggtccaaccgtcgcggtccaagagccaaaggtgggccaggacagggtgaatcaaaacagccccgacccgatcacggtggagccctcgccagtgccaaactacccgcactggcttcagtggcctccgcacgtgaggtgaatggccactccaagtccactggcgagaaggaggaaggggaaactccagaggataccggaactagagccctccctccctcatgggccgctttacctaactccggccaaggtcaaaaggaaggggtgtgcggagcctcgccggaggatgaggccgaggaagaggaggaagaagaggaagagtgcgagccccaagccgtgcctgtgtccccagctagtgcatgtagcccccctcttcagcagccccagggcagtcgcgtgctggctaccttgagaggccaagtgctgctgggcagaggcgttggcgctatcgggggtcagtggtggcgcaggcgggcacagcttacacgagagaagaggtttacctttgtgcttgcagtggtgattggcgtatttgtgctctgttggttccctttctttttctcttattccctgggagcaatttgccccaaacattgcaaagtaccacatggactgtttcagtttttcttctggataggctactgtaattcatcgcttaaccccgtaatctatacaatattcaatcaggacttccgtcgcgctttccgacgaatcttgtgtcggccttggacacagactgcatggtag

SEQ ID NO: 14401 - DNA, 1344 bp, Artificial Sequence
  derived and/or modified sequence
atggaccaccaggacccctacagcgtgcaggccaccgccgccatcgccgccgccatcaccttcctgatcctgttcaccatcttcggcaacgccctggtgatcctggccgtgctgaccagcagaagcctgagagccccccagaacctgttcctggtgagcctggccgccgccgacatcctggtggccaccctgatcatccccttcagcctggccaacgagctgctgggctactggtacttcagaagaacctggtgcgaggtgtacctggccctggacgtgctgttctgcaccagcagcatcgtgcacctgtgcgccatcagcctggacagatactgggccgtgagcagagccctggagtacaacagcaagagaacccccagaagaatcaagtgcatcatcctgaccgtgtggctgatcgccgccgtgatcagcctgccccccctgatctacaagggcgaccagggcccccagcccagaggcagaccccagtgcaagctgaaccaggaggcctggtacatcctggccagcagcatcggcagcttcttcgccccctgcctgatcatgatcctggtgtacctgagaatctacctgatcgccaagagaagcaacagaagaggccccagagccaagggcggccccggccagggcgagagcaagcagcccagacccgaccacggcggcgccctggccagcgccaagctgcccgccctggccagcgtggccagcgccagagaggtgaacggccacagcaagagcaccggcgagaaggaggagggcgagacccccgaggacaccggcaccagagccctgccccccagctgggccgccctgcccaacagcggccagggccagaaggagggcgtgtgcggcgccagccccgaggacgaggccgaggaggaggaggaggaggaggaggagtgcgagccccaggccgtgcccgtgagccccgccagcgcctgcagcccccccctgcagcagccccagggcagcagagtgctggccaccctgagaggccaggtgctgctgggcagaggcgtgggcgccatcggcggccagtggtggagaagaagagcccagctgaccagagagaagagattcaccttcgtgctggccgtggtgatcggcgtgttcgtgctgtgctggttccccttcttcttcagctacagcctgggcgccatctgccccaagcactgcaaggtgccccacggcctgttccagttcttcttctggatcggctactgcaacagcagcctgaaccccgtgatctacaccatcttcaaccaggacttcagaagagccttcagaagaatcctgtgcagaccctggacccagaccgcctggtag

SEQ ID NO: 14402 - protein, 462 aa, Artificial Sequence
  derived and/or modified sequence
MASPALAAALAVAAAAGPNASGAGERGSGGVANASGASWGPPRGQYSAGAVAGLAAVVGFLIVFTVVGNVLVVIAVLTSRALRAPQNLFLVSLASADILVATLVMPFSLANELMAYWYFGQVWCGVYLALDVLFCTSSIVHLCAISLDRYWSVTQAVEYNLKRTPRRVKATIVAVWLISAVISFPPLVSLYRQPDGAAYPQCGLNDETWYILSSCIGSFFAPCLIMGLVYARIYRVAKLRTRTLSEKRAPVGPDGASPTTENGLGAAAGAGENGHCAPPPADVEPDESSAAAERRRRRGALRRGGRRRAGAEGGAGGADGQGAGPGAAESGALTASRSPGPGGRLSRASSRSVEFFLSRRRRARSSVCRRKVAQAREKRFTFVLAVVMGVFVLCWFPFFFSYSLYGICREACQVPGPLFKFFFWIGYCNSSLNPVIYTVFNQDFRRSFKHILFRRRRRGFRQ

SEQ ID NO: 14403 - DNA, 1389 bp, Artificial Sequence
  derived and/or modified sequence
atggcctcccctgccctagcagccgccttagctgttgctgccgcagccgggcccaatgccagcggcgccggggaaagggggagcggtggtgttgcaaatgcgagcggagcctcatggggcccaccgcgaggccaatactcagctggagcggtcgccggtcttgctgcggtggtgggcttcctgattgtgttcaccgtcgtgggaaatgtgctggtggtgattgctgttctgacttccagggccctgcgcgccccccagaatctctttctggtgagtttggcatccgccgatattctagtggccacgcttgtgatgccctttagcctggcgaacgagttgatggcatactggtatttcggtcaggtgtggtgcggagtgtatcttgccctggatgtgctgttctgtacctcctctatcgtgcacttgtgtgctatatcattggacagatactggtccgtcacacaagcggtcgaatacaatctgaagcggacacccaggcgcgtgaaggccaccattgtcgccgtgtggctgatttccgccgtgattagtttccctcctttggtgtccctttacagacagcctgacggcgccgcttacccacagtgtggattgaacgatgagacatggtacatactaagcagttgcataggatcattcttcgcaccctgcctgattatgggcctggtttacgctcggatataccgcgtggctaagctgagaacacggacactctccgaaaagcgcgctcctgtgggacccgacggcgcttctcctactaccgagaatgggctgggggctgcagccggagcaggggagaacgggcattgcgccccaccaccggctgacgtcgagccagacgagtcctcagccgccgctgagagacggcgacgacggggcgctctcaggagggggggccggcgccgggccggtgcagagggcggtgcggggggcgctgatggacaaggcgcaggaccaggggcagcagaaagcggagcactgacagctagtaggtcaccaggcccaggggggaggctgagcagggcttcttcacggtctgtcgaattttttctgtccagacggaggcgggcccgttctagtgtgtgccggcgtaaagtggcgcaagcaagggaaaagcgtttcacctttgtgcttgccgtggtgatgggcgtgtttgtgctgtgttggtttccatttttttttagttattctctatatgggatttgtagggaagcctgtcaggtgcccggtccactgtttaaatttttcttctggatcgggtattgtaatagctcactcaatcctgtaatatacactgtgttcaaccaggatttccggcgtagtttcaaacatatcctgtttcgcaggaggaggcggggattcaggcagtag

SEQ ID NO: 14404 - DNA, 2127 bp, Artificial Sequence
  derived and/or modified sequence
gcagctgcggggagcccggcagccacgctctccggcgcgccgcccgcggagccaccacggccgagggccggctgctgggcgccgcggtccccggcgggcgcgcccgagcagcaggcggcgatgcgggcgccgaccccggctggggggcgcccgagctgccgcggctgcgccccggctccaggagggacggcgtagctcgcgggaggaccatggcgtccccggcgctggcggcggcgctggcggtggcggcagcggcgggccccaatgcgagcggcgcgggcgagaggggcagcggcggggttgccaatgcctcgggggcttcctgggggccgccgcgcggccagtactcggcgggcgcggtggcagggctggctgccgtggtgggcttcctcatcgtcttcaccgtggtgggcaacgtgctggtggtgatcgccgtgctgaccagccgggcgctgcgcgcgccacagaacctcttcctggtgtcgctggcctcggccgacatcctggtggccacgctggtcatgcccttctcgttggccaacgagctcatggcctactggtacttcgggcaggtgtggtgcggcgtgtacctggcgctcgatgtgctgttttgcacctcgtcgatcgtgcatctgtgtgccatcagcctggaccgctactggtcggtgacgcaggccgtcgagtacaacctgaagcgcacaccacgccgcgtcaaggccaccatcgtggccgtgtggctcatctcggccgtcatctccttcccgccgctggtctcgctctaccgccagcccgacggcgccgcctacccgcagtgcggcctcaacgacgagacctggtacatcctgtcctcctgcatcggctccttcttcgcgccctgcctcatcatgggcctggtctacgcgcgcatctaccgagtggccaagctgcgcacgcgcacgctcagcgagaagcgcgcccccgtgggccccgacggtgcgtccccgactaccgaaaacgggctgggcgcggcggcaggcgcaggcgagaacgggcactgcgcgcccccgcccgccgacgtggagccggacgagagcagcgcagcggccgagaggcggcggcgccggggcgcgttgcggcggggcgggcggcggcgagcgggcgcggaggggggcgcgggcggtgcggacgggcagggggcggggccgggggcggctgagtcgggggcgctgaccgcctccaggtccccggggcccggtggccgcctgtcgcgcgccagctcgcgctccgtcgagttcttcctgtcgcgccggcgccgggcgcgcagcagcgtgtgccgccgcaaggtggcccaggcgcgcgagaagcgcttcacctttgtgctggctgtggtcatgggcgtgttcgtgctctgctggttccccttcttcttcagctacagcctgtacggcatctgccgcgaggcctgccaggtgcccggcccgctcttcaagttcttcttctggatcggctactgcaacagctcgctcaacccggtcatctacacggtcttcaaccaggatttccggcgatcctttaagcacatcctcttccgacggaggagaaggggcttcaggcagtgactcgcacccgtctgggaatcctggacagctccgcgctcggggctgggcagaaggggcggcccggacgggggagctttcccagagacccggggatggattggcctccagggcgcaggggagggtgcggcagggcaggagcttggcagagagatagccgggctccagggagtggggaggagagagggggagacccctttgccttcccccctcagcaaggggctgcttctggggctccctgcctggatccagctctgggagccctgccgaggtgtggctgtgaggtcagggttttagagagcagtggcagaggtagccccctaaatgggcaagcaaggagccccccaaagacactaccactccccatccccgtctgaccaagggctgacttctccaggacctagtcggggggtggctgccagggggcaaggagaaagcaccgacaatctttgattactgaaagtatttaaatgtttgccaaaaacaacagccaaaacaaccaaactattttctaaataaacctttgtaatct

SEQ ID NO: 14405 - DNA, 1389 bp, Artificial Sequence
  derived and/or modified sequence
atggccagccctgccctggccgccgccctggccgtggccgctgctgctggccccaatgccagcggggccggggagcggggcagcggcggcgtggccaatgccagcggggcctcctggggccccccccggggccagtacagcgctggagctgtggccggcctggccgctgtggtgggcttcctgattgtgttcaccgtggtgggcaatgtgctggtggtgattgctgtgctgaccagccgggccctgcgggccccccagaacctcttcctggtgtccctggccagcgctgacatcctggtggccaccctggtgatgcccttcagcctggccaatgagctgatggcctactggtacttcggccaggtgtggtgtggggtgtacctggccctggatgtgctcttctgcaccagcagcatcgtgcacctgtgtgccatcagcctggaccgctactggagcgtgacccaggccgtggagtacaacctgaagaggaccccccggcgggtgaaggccaccatcgtggccgtgtggctgatctctgctgtgatctccttcccccccctggtgtccctgtaccggcagccagatggagctgcctacccccagtgtggcctgaatgatgagacctggtacatcctgagcagctgcatcggcagcttctttgccccctgcctgatcatgggcctggtgtatgcccgcatctacagagtggccaagctgcggaccaggaccctgtctgagaagagggcccctgtgggcccagatggagccagccccaccacagaaaatggcctgggcgctgctgctggggccggggagaatggccactgtgcccctcctccagcagatgtggagccagatgagagcagcgctgctgctgagaggagaagaagaagaggagccctgcggcggggcggcagaagaagagctggagctgagggcggggccggcggcgcagatggccagggcgccggccctggagctgctgagagcggggccctgacagccagccgcagccctggccctgggggccgcctgagccgggccagcagccgctctgtggagttcttcctgagcagaagaagaagagcccggagctctgtgtgcaggaggaaggtggcccaggcccgggagaagcgcttcacctttgtgctggccgtggtgatgggcgtgtttgtgctgtgctggttccccttcttcttctcctacagcctgtatggcatctgccgggaggcctgccaggtgcccggccccctcttcaagttcttcttctggattggctactgcaacagcagcctgaaccctgtgatctacaccgtcttcaaccaggacttcagaagaagcttcaagcacatcctcttcagaagaagaagaagaggcttccggcagtag

SEQ ID NO: 14406 - DNA, 1389 bp, Artificial Sequence
  derived and/or modified sequence
atggccagccccgccctggccgccgccctggccgtggccgccgccgccggacctaatgcatctggggcaggggagcggggctcaggtggggttgctaatgcttctggagcgtcgtggggccctccaagaggacaatactctgccggcgcagtcgccgggctggccgccgtagtggggttcctgattgtctttacggttgtgggaaatgttctggtggtaatcgctgtactgacttctcgggctctgagagcacctcagaatctgttccttgtcagccttgcctccgctgatattcttgtcgctacactggtgatgcctttctccctggctaatgaattgatggcctattggtattttgggcaagtgtggtgcggcgtgtatctggccttggacgtgctgttttgcacctcctccattgtgcatttgtgtgctattagtctggacaggtattggagtgtgacccaggcagttgagtataatctcaaacgcacaccacggagagtaaaggcaacgatcgttgccgtgtggctcatctctgccgtgatctctttccctcctctggtgagtctgtatcgacaacccgacggcgccgcatacccccagtgtggacttaacgatgagacctggtatatattaagcagttgcattggaagcttttttgccccttgcctgataatgggcctggtatatgcccgcatctatcgggtggctaagctgcgaacacgtacactctccgaaaagcgagcccctgtcgggccagatggagctagtcccacgactgagaacggtctgggggccgccgcgggcgccggggagaacggccactgcgctcctccccccgccgatgtcgaaccggatgaatcctccgcagcggccgagaggcgacgccggcgcggcgctctccggcggggcggcaggagaagagcaggtgcagaaggcggtgcgggtggggcggatgggcagggtgctggaccaggagctgccgagtctggagcactcactgccagccgctccccgggccctggcggaaggttatctagagcgtcatcccgctcggtggaattcttccttagcaggcggagacgcgccagatcctctgtctgtaggcggaaggtggcccaggcaagggaaaaacgcttcacatttgtgttagcagtagtaatgggtgtctttgtgctctgctggttccccttttttttttcttattccctttatggcatctgcagagaggcttgtcaggttcccggcccgttattcaagtttttcttctggataggttactgcaacagctctcttaaccctgtgatttacactgtgttcaatcaggatttccgaaggtcctttaaacatatcctgtttcggcgccggcgtagaggctttcgccagtag

SEQ ID NO: 14407 - DNA, 1389 bp, Artificial Sequence
  derived and/or modified sequence
atggcatccccagctctagctgctgcactggcagtggccgcagccgctggccctaatgcctctggcgcaggtgagagaggatccgggggtgtggctaacgcatcaggggcaagctggggcccaccgagagggcagtactcagctggggctgtagccggacttgccgcagtggttgggtttcttatcgttttcaccgtagtgggcaatgtgttggtcgtgatcgccgttctgacctctagagctttgcgagcacctcagaacctgttcctggtgtctctggctagtgcagacatcctcgttgccactctggtgatgccattctccctcgccaatgaattaatggcatactggtacttcgggcaggtctggtgcggcgtttacctcgcgcttgatgtcttattctgcacaagctctatagtgcatctgtgtgcgatatctctcgataggtactggtctgtgacacaggctgtggaatacaatttaaagagaactcccaggcgcgttaaggccactattgtcgcagtgtggcttatctccgcggtaatctctttccctcctcttgtttctctgtacaggcagcctgacggagccgcttacccacagtgcggactcaacgacgagacatggtatatcttgtctagttgtattggctcattcttcgccccttgtctgatcatggggttggtatatgctcggatttatagagtggccaagcttcgtaccagaaccctgtcggaaaagcgggcacctgttggcccagacggagcctcacctactaccgagaacggattgggggctgctgccggagccggtgaaaatggacattgcgcaccacctcctgccgacgttgaacctgatgagagttctgccgcagccgaacgacgcagaagacgcggtgctttgcggcgagggggaaggcgacgcgctggggcagagggaggtgcgggaggggctgatgggcaaggtgccggacccggagccgctgaaagcggggcactgactgcatcgaggagtcctggtccagggggacgcctttccagagccagctctcgcagtgttgaattttttttgagcagacggaggcgagcgaggagtagcgtgtgtcgccgtaaggtggctcaagccagggaaaagcgttttacttttgtgctggctgtcgtgatgggagtctttgtgctgtgctggtttccattctttttcagctactcgctttatggtatttgtagggaggcctgtcaggttccaggccctctgttcaaattcttcttttggatcggctattgcaactcttctctaaacccggttatctacaccgtatttaatcaggattttcggaggtccttcaagcatatccttttccgccgacgcaggagagggttcagacagtag

SEQ ID NO: 14408 - DNA, 1389 bp, Artificial Sequence
  derived and/or modified sequence
atggccagccccgccctggccgccgccctggccgtggccgccgccgccggccccaacgccagcggcgccggcgagagaggcagcggcggcgtggccaacgccagcggcgccagctggggcccccccagaggccagtacagcgccggcgccgtggccggcctggccgccgtggtgggcttcctgatcgtgttcaccgtggtgggcaacgtgctggtggtgatcgccgtgctgaccagcagagccctgagagccccccagaacctgttcctggtgagcctggccagcgccgacatcctggtggccaccctggtgatgcccttcagcctggccaacgagctgatggcctactggtacttcggccaggtgtggtgcggcgtgtacctggccctggacgtgctgttctgcaccagcagcatcgtgcacctgtgcgccatcagcctggacagatactggagcgtgacccaggccgtggagtacaacctgaagagaacccccagaagagtgaaggccaccatcgtggccgtgtggctgatcagcgccgtgatcagcttcccccccctggtgagcctgtacagacagcccgacggcgccgcctacccccagtgcggcctgaacgacgagacctggtacatcctgagcagctgcatcggcagcttcttcgccccctgcctgatcatgggcctggtgtacgccagaatctacagagtggccaagctgagaaccagaaccctgagcgagaagagagcccccgtgggccccgacggcgccagccccaccaccgagaacggcctgggcgccgccgccggcgccggcgagaacggccactgcgcccccccccccgccgacgtggagcccgacgagagcagcgccgccgccgagagaagaagaagaagaggcgccctgagaagaggcggcagaagaagagccggcgccgagggcggcgccggcggcgccgacggccagggcgccggccccggcgccgccgagagcggcgccctgaccgccagcagaagccccggccccggcggcagactgagcagagccagcagcagaagcgtggagttcttcctgagcagaagaagaagagccagaagcagcgtgtgcagaagaaaggtggcccaggccagagagaagagattcaccttcgtgctggccgtggtgatgggcgtgttcgtgctgtgctggttccccttcttcttcagctacagcctgtacggcatctgcagagaggcctgccaggtgcccggccccctgttcaagttcttcttctggatcggctactgcaacagcagcctgaaccccgtgatctacaccgtgttcaaccaggacttcagaagaagcttcaagcacatcctgttcagaagaagaagaagaggcttcagacagtag

SEQ ID NO: 14409 - protein, 477 aa, Artificial Sequence
  derived and/or modified sequence
MGAGVLVLGASEPGNLSSAAPLPDGAATAARLLVPASPPASLLPPASESPEPLSQQWTAGMGLLMALIVLLIVAGNVLVIVAIAKTPRLQTLTNLFIMSLASADLVMGLLVVPFGATIVVWGRWEYGSFFCELWTSVDVLCVTASIETLCVIALDRYLAITSPFRYQSLLTRARARGLVCTVWAISALVSFLPILMHWWRAESDEARRCYNDPKCCDFVTNRAYAIASSVVSFYVPLCIMAFVYLRVFREAQKQVKKIDSCERRFLGGPARPPSPSPSPVPAPAPPPGPPRPAAAAATAPLANGRAGKRRPSRLVALREQKALKTLGIIMGVFTLCWLPFFLANVVKAFHRELVPDRLFVFFNWLGYANSAFNPIIYCRSPDFRKAFQGLLCCARRAARRRHATHGDRPRASGCLARPGPPPSPGAASDDDDDDVVGATPPARLLEPWAGCNGGAAADSDSSLDEPCRPGFASESKV

SEQ ID NO: 14410 - DNA, 2862 bp, Artificial Sequence
  derived and/or modified sequence
gcaccacgccgcccgggcttctggggtgttccccaaccacggcccagccctgccacaccccccgcccccggcctccgcagctcggcatgggcgcgggggtgctcgtcctgggcgcctccgagcccggtaacctgtcgtcggccgcaccgctccccgacggcgcggccaccgcggcgcggctgctggtgcccgcgtcgccgcccgcctcgttgctgcctcccgccagcgaaagccccgagccgctgtctcagcagtggacagcgggcatgggtctgctgatggcgctcatcgtgctgctcatcgtggcgggcaatgtgctggtgatcgtggccatcgccaagacgccgcggctgcagacgctcaccaacctcttcatcatgtccctggccagcgccgacctggtcatggggctgctggtggtgccgttcggggccaccatcgtggtgtggggccgctgggagtacggctccttcttctgcgagctgtggacctcagtggacgtgctgtgcgtgacggccagcatcgagaccctgtgtgtcattgccctggaccgctacctcgccatcacctcgcccttccgctaccagagcctgctgacgcgcgcgcgggcgcggggcctcgtgtgcaccgtgtgggccatctcggccctggtgtccttcctgcccatcctcatgcactggtggcgggcggagagcgacgaggcgcgccgctgctacaacgaccccaagtgctgcgacttcgtcaccaaccgggcctacgccatcgcctcgtccgtagtctccttctacgtgcccctgtgcatcatggccttcgtgtacctgcgggtgttccgcgaggcccagaagcaggtgaagaagatcgacagctgcgagcgccgtttcctcggcggcccagcgcggccgccctcgccctcgccctcgcccgtccccgcgcccgcgccgccgcccggacccccgcgccccgccgccgccgccgccaccgccccgctggccaacgggcgtgcgggtaagcggcggccctcgcgcctcgtggccctgcgcgagcagaaggcgctcaagacgctgggcatcatcatgggcgtcttcacgctctgctggctgcccttcttcctggccaacgtggtgaaggccttccaccgcgagctggtgcccgaccgcctcttcgtcttcttcaactggctgggctacgccaactcggccttcaaccccatcatctactgccgcagccccgacttccgcaaggccttccagggactgctctgctgcgcgcgcagggctgcccgccggcgccacgcgacccacggagaccggccgcgcgcctcgggctgtctggcccggcccggacccccgccatcgcccggggccgcctcggacgacgacgacgacgatgtcgtcggggccacgccgcccgcgcgcctgctggagccctgggccggctgcaacggcggggcggcggcggacagcgactcgagcctggacgagccgtgccgccccggcttcgcctcggaatccaaggtgtagggcccggcgcggggcgcggactccgggcacggcttcccaggggaacgaggagatctgtgtttacttaagaccgatagcaggtgaactcgaagcccacaatcctcgtctgaatcatccgaggcaaagagaaaagccacggaccgttgcacaaaaaggaaagtttgggaagggatgggagagtggcttgctgatgttccttgttgttttttttttcttttcttttctttcttcttcttttttttttttttttttttttctgtttgtggtccggccttcttttgtgtgtgcgtgtgatgcatctttagatttttttcccccaccaggtggtttttgacactctctgagaggaccggagtggaagatgggtgggttaggggaagggagaagcattaggaggggattaaaatcgatcatcgtggctcccatccctttcccgggaacaggaacacactaccagccagagagaggagaatgacagtttgtcaagacatatttccttttgctttccagagaaatttcattttaatttctaagtaatgatttctgctgttatgaaagcaaagagaaaggatggaggcaaaataaaaaaaaatcacgtttcaagaaatgttaagctcttcttggaacaagccccaccttgctttccttgtgtagggcaaacccgctgtcccccgcgcgcctgggtggtcaggctgagggatttctacctcacactgtgcatttgcacagcagatagaaagacttgtttatattaaacagcttatttatgtatcaatattagttggaaggaccaggcgcagagcctctctctgtgacatgtgactctgtcaattgaagacaggacattaaaagagagcgagagagagaaacagttcagattactgcacatgtggataaaaacaaaaacaaaaaaaaggagtggttcaaaatgccatttttgcacagtgttaggaattacaaaatccacagaagatgttacttgcacaaaaagaaattaaatattttttaaagggagaggggctgggcagatcttaaataaaattcaaactctacttctgttgtctagtatgttattgagctaatgattcattgggaaaatacctttttatactcctttatcatggtactgtaactgtatccatattataaatataattatcttaaggattttttatttttttttatgtccaagtgcccacgtgaatttgctggtgaaagttagcacttgtgtgtaaattctacttcctcttgtgtgttttaccaagtatttatactctggtgcaactaactactgtgtgaggaattggtccatgtgcaataaataccaatgaagcacaatcaa

SEQ ID NO: 14411 - DNA, 1434 bp, Artificial Sequence
  derived and/or modified sequence
atgggcgcgggagtgctcgtgttgggcgccagtgaaccaggaaacctgagctcagcagcccccttaccagatggagccgccactgccgcacggttattggtgcccgcttctccccctgccagtctcctgccgccagccagcgaaagtcccgagccgttgagtcagcaatggacagccggcatgggtttactcatggccttaattgtgctcctgattgtggctggtaatgtcctcgtgatcgtggcgatagcgaagactccaagactacagactctgacaaaccttttcataatgagtctggcatctgccgatctggttatgggtttgctagtggtgccattcggagcgacaatagtcgtttggggccggtgggagtatggatcatttttttgcgagctgtggacgtctgtggacgtgctttgcgtcactgctagtatagagacactttgcgttattgctctcgaccgatacttggctattacctctccattccgctaccaatcccttttgaccagggcacgggcaaggggcctcgtatgtaccgtgtgggccatttctgctttggtgtccttcctgcccatcctcatgcactggtggcgcgccgaatctgacgaggcaaggaggtgctataacgatcccaaatgttgcgattttgttactaatagagcatacgccatcgcgagttccgtagtatccttttatgtgcctttgtgtattatggcatttgtgtatcttagagtttttagagaagcacagaaacaggtcaagaagatagactcctgcgagcgacgatttctgggcggccctgctagacctccgtctcccagcccttcgccagtccccgcgcccgcccctccgcctggaccgcccagacccgccgctgccgccgcaactgccccactggccaacggtagagccggaaaaagaagacccagccgactcgtggctctgcgcgaacagaaagcactgaagactctgggtattattatgggtgtgttcaccctgtgctggttgccattcttccttgcaaacgtagttaaggcattccaccgggaactcgtccccgatcgactgtttgttttcttcaactggttgggctatgccaactctgctttcaatcccattatctactgccgatcccccgatttccggaaagccttccaggggcttctgtgctgcgcccgcagggccgccagaaggagacacgcaacgcacggagatagacccagagcttctggatgcctagctagaccaggtcctccaccttcgccaggcgctgctagcgacgatgacgatgatgatgtagtgggagccacccctccagctcgcctgctggaaccatgggctggatgtaacggtggcgccgccgcagacagcgacagtagtctggacgagccatgtcgccccggctttgcctccgaatcaaaagtatag

SEQ ID NO: 14412 - DNA, 1434 bp, Artificial Sequence
  derived and/or modified sequence
atgggcgccggcgtgctggtgctgggcgccagcgagcccggcaacctgagcagcgctgcccccctgcctgatggagctgccacagctgcccggctgctggtgcctgccagccccccagccagcctgctgcccccagccagcgagagccctgagcccctgagccagcagtggacagctggcatgggcctgctgatggccctgattgtgctgctgattgtggccggaaatgtgctggtgattgtggccatcgccaagaccccccggctgcagaccctgaccaacctcttcatcatgagcctggccagcgctgacctggtgatgggcctgctggtggtgccctttggagccaccatcgtggtgtggggccgctgggagtatggcagcttcttctgtgagctgtggacctctgtggatgtgctgtgtgtgacagccagcattgagaccctgtgtgtgattgccctggaccgctacctggccatcaccagccccttccgctaccagagcctgctgacccgggcccgggcccggggcctggtgtgcaccgtgtgggccatcagcgccctggtgtccttcctgcccatcctgatgcactggtggagggctgagagtgatgaggcccggcgctgctacaatgaccccaagtgctgtgactttgtgaccaacagagcctatgccatcgccagctctgtggtgtccttctacgtgcccctgtgcatcatggcctttgtgtacctgcgggtcttccgggaggcccagaagcaggtgaagaagattgacagctgtgaaagacgcttcctgggcggccctgcccggccccccagccccagccccagccctgtgcctgccccagcccctcctcctggcccccccaggcctgctgctgctgctgccacagcccccctggccaacggccgggccggcaagagaagacccagccggctggtggccctgcgggagcagaaggccctgaagaccctgggcatcatcatgggcgtcttcaccctgtgctggctgcccttcttcctggccaacgtggtgaaggccttccaccgggagctggtgcctgaccggctgtttgtgttcttcaactggctgggctacgccaacagcgccttcaaccccatcatctactgccgcagcccagacttcaggaaggccttccagggcctgctgtgctgtgccaggagagctgcccggaggagacatgccacccatggagaccggccccgggccagcggctgcctggcccggcccggccccccacccagccctggggccgccagtgatgatgatgatgatgatgtggtgggcgccaccccaccagcccggctgctggagccctgggccggctgcaatggaggagctgctgctgacagcgacagcagcctggatgagccctgcaggcctggctttgccagcgagagcaaggtgtag

SEQ ID NO: 14413 - DNA, 1434 bp, Artificial Sequence
  derived and/or modified sequence
atgggcgccggcgtgctggtgctgggcgccagcgagcccggcaacctcagttccgccgcaccgttgccggatggcgccgctaccgcagccaggctcctagttccagctagcccaccagcatctctcctgcctccagcttccgagtcgcctgagcctcttagccaacaatggactgccgggatgggtctgctgatggccctgatagtgctgcttatcgtggccggcaatgttctcgtgattgttgccatcgcgaaaacaccacggctgcagaccctgaccaacctgttcattatgagtttggccagtgcagacctagtaatgggcctccttgtcgtaccatttggcgccaccattgtcgtttggggtagatgggaatacggttcctttttctgtgagctctggacaagtgtggacgtgttatgtgtaacagcatcaatcgaaactctttgtgtcatcgcacttgatagatatctggcaatcacgagcccatttagatatcaaagcctcctgacgagggcccgcgccagaggcctggtgtgtactgtgtgggccatctctgccctcgtgtcattcttaccaattctcatgcactggtggcgtgccgaaagcgacgaggcccgcaggtgctataatgatccaaagtgttgcgattttgttactaacagggcgtacgcaatcgccagctctgtggtctctttctacgttcctctttgcatcatggcattcgtttacctcagagtctttagagaagcccagaagcaagttaaaaaaattgactcctgcgagcgcaggtttctgggtggaccagcccgccctccgagcccatcccctagccctgttcccgcccctgccccaccgcccggtcctccaaggcctgctgcagcagcggccacagcacctctggctaatggaagggccggtaagcgccggcccagccgattagtcgcactccgcgaacaaaaagccctgaagactctgggtatcattatgggagtgttcaccctctgttggttgccgttttttctcgctaatgttgttaaagcttttcaccgagagctggtacccgatcggcttttcgtcttttttaactggctgggctatgccaattccgcatttaaccccataatttattgccgttcccccgattttcgcaaagccttccaggggctgctgtgttgtgcacggagagctgcccggcggagacatgccacacacggtgatcgaccacgagcctcgggatgcctggcaagacctggcccgccaccgtctcctggagcagcatccgacgacgatgatgatgacgtagtcggagcaaccccgccggccaggctcctcgagccctgggcgggttgcaatggcggagctgccgcagacagcgattcttccctcgacgagccatgcaggccagggttcgcctcagagtctaaagtttag

SEQ ID NO: 14414 - DNA, 1434 bp, Artificial Sequence
  derived and/or modified sequence
atgggcgcaggtgtgctggtgttaggggcaagcgagccgggaaacctttccagcgctgcccctcttcccgacggagccgcaacagccgctcgactgttagtcccagcgtccccccctgcttccctgctccctcccgctagcgagtctcctgagcctttgagccaacagtggacagcgggtatgggcttgctaatggctctcatcgtgctgttgatcgtggccggtaatgtactggtcatcgttgccatcgccaaaaccccgaggttacagacactgaccaatcttttcatcatgagtttggcgtccgcggacctggtgatgggtctgttggtggtgccgtttggcgcaacgatcgttgtttggggaaggtgggaatatgggtcatttttctgtgagctgtggacatccgtggacgtactatgtgtaacagcctcaatagagacgctttgcgttattgccctggacagatatttggcaatcacatccccctttaggtatcagtccctccttactagggccagggccaggggattagtttgcaccgtatgggctattagcgccctggtgtcctttcttccaatccttatgcattggtggcgcgcagaaagcgatgaggccaggagatgttacaacgatcccaaatgctgtgacttcgttaccaacagggcctatgctatcgccagcagtgtcgtctccttctacgtgcctctgtgtatcatggctttcgtgtatctgagggtgttcagggaagctcagaagcaagtcaaaaaaatcgactcatgcgaaaggcggtttctaggaggtcccgcaagacccccttccccctctccaagcccggtacccgctcctgcaccacctcccggtccccctcgcccagctgcagccgctgccaccgccccactggcgaacggacgggcaggtaagagacggccatctaggctggtggcattgagggagcagaaagccctgaagacgctaggtatcataatgggggtgtttacactgtgctggttaccgtttttcttggccaacgtggtgaaggcttttcaccgcgaacttgtacccgatcgactgttcgtgtttttcaattggctcggttatgcaaactctgcgttcaatcctatcatctactgcagatccccagattttcgaaaggcttttcagggcctactctgctgtgcaaggcgggctgcacgccgtcgacatgccactcacggcgacagaccacgcgcatcggggtgtctggccagaccagggccaccaccctctcctggcgcagcttcagatgacgatgacgacgatgtcgttggggcaaccccgccagccagattactcgagccttgggccggatgcaatggcggagcagcagccgacagtgactcatcgctggatgaaccctgtcggccaggcttcgccagcgagtctaaggtgtag

SEQ ID NO: 14415 - DNA, 1434 bp, Artificial Sequence
  derived and/or modified sequence
atgggcgccggcgtgctggtgctgggcgccagcgagcccggcaacctgagcagcgccgcccccctgcccgacggcgccgccaccgccgccagactgctggtgcccgccagcccccccgccagcctgctgccccccgccagcgagagccccgagcccctgagccagcagtggaccgccggcatgggcctgctgatggccctgatcgtgctgctgatcgtggccggcaacgtgctggtgatcgtggccatcgccaagacccccagactgcagaccctgaccaacctgttcatcatgagcctggccagcgccgacctggtgatgggcctgctggtggtgcccttcggcgccaccatcgtggtgtggggcagatgggagtacggcagcttcttctgcgagctgtggaccagcgtggacgtgctgtgcgtgaccgccagcatcgagaccctgtgcgtgatcgccctggacagatacctggccatcaccagccccttcagataccagagcctgctgaccagagccagagccagaggcctggtgtgcaccgtgtgggccatcagcgccctggtgagcttcctgcccatcctgatgcactggtggagagccgagagcgacgaggccagaagatgctacaacgaccccaagtgctgcgacttcgtgaccaacagagcctacgccatcgccagcagcgtggtgagcttctacgtgcccctgtgcatcatggccttcgtgtacctgagagtgttcagagaggcccagaagcaggtgaagaagatcgacagctgcgagagaagattcctgggcggccccgccagaccccccagccccagccccagccccgtgcccgcccccgcccccccccccggcccccccagacccgccgccgccgccgccaccgcccccctggccaacggcagagccggcaagagaagacccagcagactggtggccctgagagagcagaaggccctgaagaccctgggcatcatcatgggcgtgttcaccctgtgctggctgcccttcttcctggccaacgtggtgaaggccttccacagagagctggtgcccgacagactgttcgtgttcttcaactggctgggctacgccaacagcgccttcaaccccatcatctactgcagaagccccgacttcagaaaggccttccagggcctgctgtgctgcgccagaagagccgccagaagaagacacgccacccacggcgacagacccagagccagcggctgcctggccagacccggccccccccccagccccggcgccgccagcgacgacgacgacgacgacgtggtgggcgccaccccccccgccagactgctggagccctgggccggctgcaacggcggcgccgccgccgacagcgacagcagcctggacgagccctgcagacccggcttcgccagcgagagcaaggtgtag

SEQ ID NO: 14416 - protein, 432 aa, Artificial Sequence
  derived and/or modified sequence
MSDKLPYKVADIGLAAWGRKALDIAENEMPGLMRMRERYSASKPLKGARIAGCLHMTVETAVLIETLVTLGAEVQWSSCNIFSTQDHAAAAIAKAGIPVYAWKGETDEEYLWCIEQTLYFKDGPLNMILDDGGDLTNLIHTKYPQLLPGIRGISEETTTGVHNLYKMMANGILKVPAINVNDSVTKSKFDNLYGCRESLIDGIKRATDVMIAGKVAVVAGYGDVGKGCAQALRGFGARVIITEIDPINALQAAMEGYEVTTMDEACQEGNIFVTTTGCIDIILGRHFEQMKDDAIVCNIGHFDVEIDVKWLNENAVEKVNIKPQVDRYRLKNGRRIILLAEGRLVNLGCAMGHPSFVMSNSFTNQVMAQIELWTHPDKYPVGVHFLPKKLDEAVAEAHLGKLNVKLTKLTEKQAQYLGMSCDGPFKPDHYRY

SEQ ID NO: 14417 - protein, 404 aa, Artificial Sequence
  derived and/or modified sequence
MPGLMRMRERYSASKPLKGARIAGCLHMTVETAVLIETLVTLGAEVQWSSCNIFSTQDHAAAAIAKAGIPVYAWKGETDEEYLWCIEQTLYFKDGPLNMILDDGGDLTNLIHTKYPQLLPGIRGISEETTTGVHNLYKMMANGILKVPAINVNDSVTKSKFDNLYGCRESLIDGIKRATDVMIAGKVAVVAGYGDVGKGCAQALRGFGARVIITEIDPINALQAAMEGYEVTTMDEACQEGNIFVTTTGCIDIILGRHFEQMKDDAIVCNIGHFDVEIDVKWLNENAVEKVNIKPQVDRYRLKNGRRIILLAEGRLVNLGCAMGHPSFVMSNSFTNQVMAQIELWTHPDKYPVGVHFLPKKLDEAVAEAHLGKLNVKLTKLTEKQAQYLGMSCDGPFKPDHYRY

SEQ ID NO: 14418 - DNA, 2143 bp, Artificial Sequence
  derived and/or modified sequence
cggcgctgcccgcccagttcctgttcccagactgaggcccagcccccttcgcccgtttccatcacgagtgccgccagcatgtctgacaaactgccctacaaagtcgccgacatcggcctggctgcctggggacgcaaggccctggacattgctgagaacgagatgccgggcctgatgcgtatgcgggagcggtactcggcctccaagccactgaagggcgcccgcatcgctggctgcctgcacatgaccgtggagacggccgtcctcattgagaccctcgtcaccctgggtgctgaggtgcagtggtccagctgcaacatcttctccacccaggaccatgcggcggctgccattgccaaggctggcattccggtgtatgcctggaagggcgaaacggacgaggagtacctgtggtgcattgagcagaccctgtacttcaaggacgggcccctcaacatgattctggacgacgggggcgacctcaccaacctcatccacaccaagtacccgcagcttctgccaggcatccgaggcatctctgaggagaccacgactggggtccacaacctctacaagatgatggccaatgggatcctcaaggtgcctgccatcaatgtcaatgactccgtcaccaagagcaagtttgacaacctctatggctgccgggagtccctcatagatggcatcaagcgggccacagatgtgatgattgccggcaaggtagcggtggtagcaggctatggtgatgtgggcaagggctgtgcccaggccctgcggggtttcggagcccgcgtcatcatcaccgagattgaccccatcaacgcactgcaggctgccatggagggctatgaggtgaccaccatggatgaggcctgtcaggagggcaacatctttgtcaccaccacaggctgtattgacatcatccttggccggcactttgagcagatgaaggatgatgccattgtgtgtaacattggacactttgacgtggagatcgatgtcaagtggctcaacgagaacgccgtggagaaggtgaacatcaagccgcaggtggaccggtatcggttgaagaatgggcgccgcatcatcctgctggccgagggtcggctggtcaacctgggttgtgccatgggccaccccagcttcgtgatgagtaactccttcaccaaccaggtgatggcgcagatcgagctgtggacccatccagacaagtaccccgttggggttcatttcctgcccaagaagctggatgaggcagtggctgaagcccacctgggcaagctgaatgtgaagttgaccaagctaactgagaagcaagcccagtacctgggcatgtcctgtgatggccccttcaagccggatcactaccgctactgagagccaggtctgcgtttcaccctccagctgctgtccttgcccaggccccacctctcctccctaagagctaatggcaccaactttgtgattggtttgtcagtgtcccccatcgactctctggggctgatcacttagtttttggcctctgctgcagccgtcatactgttccaaatgtggcagcgggaacagagtaccctcttcaagccccggtcatgatggaggtcccagccacagggaaccatgagctcagtggtcttggaacagctcactaagtcagtccttccttagcctggaagtcagtagtggagtcacaaagcccatgtgttttgccatctaggccttcacctggtctgtggacttatacctgtgtgcttggtttacaggtccagtggttcttcagcccatgacagatgagaaggggctatattgaagggcaaagaggaactgttgtttgaattttcctgagagcctggcttagtgctgggccttctcttaaacctcattacaatgaggttagtacttttagtccctgttttacaggggttagaatagactgttaaggggcaactgagaaagaacagagaagtgacagctaggggttgagaggggccagaaaaacatgaatgcaggcagatttcgtgaaatctgccaccactttataaccagatggttcctttcacaaccctgggtcaaaaagagaataatttggcctataatgttaaaagaaagcaggaaggtgggtaaataaaaatcttggtgcctggaa

SEQ ID NO: 14419 - DNA, 2366 bp, Artificial Sequence
  derived and/or modified sequence
ctggagggaggggcgtggatacagcgggaaaggagagacccctagcggggtggacaagaagggaggaactccacagaactgcttaatccggctccatccccatcagcgggctttctcagcgcctgcacccctctctatcccatctcgaagcctccagttaatccagagtgagacgcaggaccgccgggaggcgagcggggatgctgaagctagggcaggctaaagccccgcggccaaagggcaggcttgtgcgccctccgccccctctccgccccctctccgcccctccgcgcccaggacctaattgtttgcaaaagcaaacacggaaaagccgacatcggcctggctgcctggggacgcaaggccctggacattgctgagaacgagatgccgggcctgatgcgtatgcgggagcggtactcggcctccaagccactgaagggcgcccgcatcgctggctgcctgcacatgaccgtggagacggccgtcctcattgagaccctcgtcaccctgggtgctgaggtgcagtggtccagctgcaacatcttctccacccaggaccatgcggcggctgccattgccaaggctggcattccggtgtatgcctggaagggcgaaacggacgaggagtacctgtggtgcattgagcagaccctgtacttcaaggacgggcccctcaacatgattctggacgacgggggcgacctcaccaacctcatccacaccaagtacccgcagcttctgccaggcatccgaggcatctctgaggagaccacgactggggtccacaacctctacaagatgatggccaatgggatcctcaaggtgcctgccatcaatgtcaatgactccgtcaccaagagcaagtttgacaacctctatggctgccgggagtccctcatagatggcatcaagcgggccacagatgtgatgattgccggcaaggtagcggtggtagcaggctatggtgatgtgggcaagggctgtgcccaggccctgcggggtttcggagcccgcgtcatcatcaccgagattgaccccatcaacgcactgcaggctgccatggagggctatgaggtgaccaccatggatgaggcctgtcaggagggcaacatctttgtcaccaccacaggctgtattgacatcatccttggccggcactttgagcagatgaaggatgatgccattgtgtgtaacattggacactttgacgtggagatcgatgtcaagtggctcaacgagaacgccgtggagaaggtgaacatcaagccgcaggtggaccggtatcggttgaagaatgggcgccgcatcatcctgctggccgagggtcggctggtcaacctgggttgtgccatgggccaccccagcttcgtgatgagtaactccttcaccaaccaggtgatggcgcagatcgagctgtggacccatccagacaagtaccccgttggggttcatttcctgcccaagaagctggatgaggcagtggctgaagcccacctgggcaagctgaatgtgaagttgaccaagctaactgagaagcaagcccagtacctgggcatgtcctgtgatggccccttcaagccggatcactaccgctactgagagccaggtctgcgtttcaccctccagctgctgtccttgcccaggccccacctctcctccctaagagctaatggcaccaactttgtgattggtttgtcagtgtcccccatcgactctctggggctgatcacttagtttttggcctctgctgcagccgtcatactgttccaaatgtggcagcgggaacagagtaccctcttcaagccccggtcatgatggaggtcccagccacagggaaccatgagctcagtggtcttggaacagctcactaagtcagtccttccttagcctggaagtcagtagtggagtcacaaagcccatgtgttttgccatctaggccttcacctggtctgtggacttatacctgtgtgcttggtttacaggtccagtggttcttcagcccatgacagatgagaaggggctatattgaagggcaaagaggaactgttgtttgaattttcctgagagcctggcttagtgctgggccttctcttaaacctcattacaatgaggttagtacttttagtccctgttttacaggggttagaatagactgttaaggggcaactgagaaagaacagagaagtgacagctaggggttgagaggggccagaaaaacatgaatgcaggcagatttcgtgaaatctgccaccactttataaccagatggttcctttcacaaccctgggtcaaaaagagaataatttggcctataatgttaaaagaaagcaggaaggtgggtaaataaaaatcttggtgcctgg

SEQ ID NO: 14420 - DNA, 1299 bp, Artificial Sequence
  derived and/or modified sequence
atgagcgataaattaccatacaaagttgcggatatcggactggctgcatggggaaggaaagctctggacatagccgagaacgaaatgcccgggctgatgaggatgagagagaggtattcagcctccaaacctctgaagggcgccagaatagctggatgccttcacatgaccgttgagaccgccgtgctcatcgagaccctggtaacgttgggtgcagaagtgcagtggagctcttgcaacatattcagcactcaggaccacgctgctgctgcaatcgccaaggccggcatccccgtgtacgcgtggaagggtgaaacagacgaggaatatctgtggtgcattgaacaaacattgtatttcaaggatggccctttgaacatgatcttggacgatgggggtgacctgacaaacttgatccatacaaagtacccacaactccttcctggcattcgcgggatctccgaggaaactacaactggagtgcataacctgtataagatgatggcgaatggaatactgaaagtgccagcgatcaacgttaatgattcagtgactaagtcgaagttcgataatctgtacggatgccgggaatctttgatcgacggcattaagagggcaacagatgtgatgatcgccggtaaggtggccgtggtcgctggctacggggacgttggaaaagggtgtgcccaggctctgagagggtttggagcccgagtgattatcaccgaaattgaccccatcaatgccctccaggctgctatggaaggctacgaggtgaccaccatggacgaggcttgccaggaaggaaacatctttgtcactaccactggttgtattgacattattctgggtcggcacttcgaacagatgaaagacgatgcaattgtgtgtaatatagggcactttgatgttgaaattgatgtaaaatggctcaacgaaaatgccgtggagaaagtgaacataaagccgcaagtggaccgctatcgactcaagaacggtcgccgtatcatcctcctggccgagggccgcctggtcaatctgggctgcgcaatggggcacccttcattcgtgatgtccaactccttcacaaatcaggtgatggcccagattgaactgtggacgcatcctgataagtacccggtaggggtccatttcttgcccaagaaactcgatgaggcagttgcggaggcacatctgggcaaattgaatgtcaagctgacaaagttgacagaaaagcaagcccagtatctcggcatgtcttgtgacggaccatttaagccagaccactaccgctattag

SEQ ID NO: 14421 - DNA, 1299 bp, Artificial Sequence
  derived and/or modified sequence
atgtctgacaagctgccctacaaggtggccgacatcggcctggccgcctggggcaggaaggccctggacattgctgaaaatgagatgcctggcctgatgaggatgagggagcgctacagcgccagcaagcccctgaagggggccagaattgctggctgcctgcacatgacagtggagacagctgtgctgattgagaccctggtgaccctgggcgctgaggtgcagtggagcagctgcaacatcttcagcacccaggaccacgccgccgccgccatcgccaaggccggcatccctgtgtatgcctggaagggggagacagatgaggagtacctgtggtgcatcgagcagaccctgtacttcaaggatggccccctgaacatgatcctggatgatggaggagacctgaccaacctgatccacaccaagtacccccagctgctgcccggcatccggggcatcagcgaggagaccaccactggagtgcacaacctgtacaagatgatggccaacggcatcctgaaggtgcctgccatcaacgtgaatgattctgtgaccaagagcaagtttgacaacctgtatggctgccgggagagcctgattgatggcatcaagagggccacagatgtgatgattgctgggaaggtggccgtggtggccggctatggagatgtgggcaagggctgtgcccaggccctgcggggctttggagcccgggtcatcatcacagaaattgaccccatcaatgccctgcaggccgccatggagggctatgaggtgaccaccatggatgaggcctgccaggagggcaacatctttgtgaccaccaccggctgcatcgacatcatcctgggccgccactttgagcagatgaaggatgatgccatcgtgtgcaacatcggccactttgatgtggagattgatgtgaagtggctgaatgaaaatgctgtggagaaggtgaacatcaagccccaggtggaccgctaccgcctgaagaatggccgccgcatcatcctgctggccgagggccgcctggtgaacctgggctgtgccatgggccaccccagctttgtgatgagcaacagcttcaccaaccaggtgatggcccagatcgagctgtggacccacccagacaagtaccctgtgggcgtgcacttcctgcccaagaagctggatgaagctgtggccgaggcccacctgggcaagctgaatgtgaagctgaccaagctgacagagaagcaggcccagtacctgggcatgagctgtgatggccccttcaagccagaccactaccgctactag

SEQ ID NO: 14422 - DNA, 1299 bp, Artificial Sequence
  derived and/or modified sequence
atgagcgacaagctgccctacaaggtggccgacatcggcctggccgcatggggccgcaaagcacttgacatagccgagaacgagatgccgggacttatgcggatgagagaacggtactcagctagcaaacctctgaaaggcgcccggatcgccggctgcctgcacatgactgtggagactgcagttttaattgagactttggtgacactgggagctgaggtgcagtggtccagctgtaatatcttctccacacaagaccacgccgcagctgcaatcgctaaagccgggattccagtttacgcctggaaaggggagaccgatgaggaatatctgtggtgtattgagcagacgttgtatttcaaggatggccccctgaatatgatcttagacgatggtggagacctcacgaacttgatccacacaaagtatccccaactgctccccggcattcgtgggatctctgaggagacaaccacgggcgtgcataatctgtacaagatgatggcaaacggtattctgaaagtccccgccattaatgtcaatgacagtgtgacgaagtctaagttcgacaatttgtacggttgtagagagtcactgattgatggtatcaagcgtgcaaccgacgtgatgatcgcaggaaaagtggccgtggtcgctgggtacggcgatgtggggaaaggctgcgctcaggcacttcggggcttcggggccagagtcattataaccgaaatagaccccatcaacgctctgcaggccgcaatggagggctatgaagtaactaccatggacgaggcttgccaggaaggtaatatatttgttacaactaccggttgtattgatatcattctgggtcgccactttgagcagatgaaggatgatgcgatagtgtgcaatataggacacttcgatgtcgaaatcgatgtgaaatggttgaacgaaaacgccgtggaaaaagtgaatattaaaccacaagtcgatcggtacagactgaagaacggcaggcgaattattcttctggccgaaggaagattggtaaacctgggctgtgcaatgggccacccaagcttcgtcatgtccaattctttcacaaatcaggttatggctcagattgagctgtggacacatcccgacaagtatcccgtcggtgtacactttctacctaaaaagctcgacgaggcggttgctgaagcacacctcggcaaattaaatgtcaagttgactaaattaaccgagaagcaggctcagtacctggggatgagctgcgacgggccatttaaaccagaccactaccggtattag

SEQ ID NO: 14423 - DNA, 1299 bp, Artificial Sequence
  derived and/or modified sequence
atgagcgataagctgccttataaggtggccgacatcggactcgctgcctgggggagaaaagcccttgatattgccgagaatgagatgcctggcctgatgcggatgcgcgagagatacagcgcctcaaaaccgttgaagggcgcacggattgcgggatgtctgcacatgaccgtcgaaaccgccgtgctgattgaaactctggtgaccctgggagccgaggtgcagtggtccagctgtaatatattctcaactcaggatcacgcagctgccgctattgccaaggctggtatccccgtatacgcatggaaaggtgagactgacgaggaatatctctggtgtatagagcaaaccttgtacttcaaggacgggcctctgaatatgattctagacgatggcggtgatctcaccaatctcatacataccaagtatcctcagctgttgcccggaatccggggaatttccgaggagaccaccacgggtgtacataacctttacaaaatgatggcgaacggtatcctgaaggtgcccgcaattaacgttaacgactctgtgacgaagagtaaatttgacaacctgtatggatgccgggagtctctaatcgacggaataaaaagagccacagacgtcatgatcgccggtaaagtcgctgtggtcgccggttatggagacgttgggaagggttgcgctcaggcgttacggggtttcggggcacgagttatcatcactgaaattgatccaataaacgcccttcaagccgctatggaaggatacgaggttacgactatggacgaagcatgccaggagggtaatatctttgtgaccactacagggtgcattgatatcatcctgggacgtcactttgaacagatgaaagatgatgctatcgtgtgtaatatcggccattttgacgtcgaaatcgacgttaaatggttaaacgagaacgccgtggagaaagtcaatattaagccccaggttgaccgttaccgtctgaaaaatggtcggaggattattctgcttgccgagggcagactggttaacctgggctgtgccatgggccacccttcctttgtcatgtccaactcgtttacaaaccaagtgatggcccagatagaactctggacccacccagacaagtatcccgtgggcgtgcactttctgcctaaaaagttggacgaagcggttgcagaagcccaccttgggaagctcaacgtgaaactcactaaactaacagagaaacaggcccaatatctgggcatgtcatgtgacggcccttttaagccagaccactatcggtattag

SEQ ID NO: 14424 - DNA, 1299 bp, Artificial Sequence
  derived and/or modified sequence
atgagcgacaagctgccctacaaggtggccgacatcggcctggccgcctggggcagaaaggccctggacatcgccgagaacgagatgcccggcctgatgagaatgagagagagatacagcgccagcaagcccctgaagggcgccagaatcgccggctgcctgcacatgaccgtggagaccgccgtgctgatcgagaccctggtgaccctgggcgccgaggtgcagtggagcagctgcaacatcttcagcacccaggaccacgccgccgccgccatcgccaaggccggcatccccgtgtacgcctggaagggcgagaccgacgaggagtacctgtggtgcatcgagcagaccctgtacttcaaggacggccccctgaacatgatcctggacgacggcggcgacctgaccaacctgatccacaccaagtacccccagctgctgcccggcatcagaggcatcagcgaggagaccaccaccggcgtgcacaacctgtacaagatgatggccaacggcatcctgaaggtgcccgccatcaacgtgaacgacagcgtgaccaagagcaagttcgacaacctgtacggctgcagagagagcctgatcgacggcatcaagagagccaccgacgtgatgatcgccggcaaggtggccgtggtggccggctacggcgacgtgggcaagggctgcgcccaggccctgagaggcttcggcgccagagtgatcatcaccgagatcgaccccatcaacgccctgcaggccgccatggagggctacgaggtgaccaccatggacgaggcctgccaggagggcaacatcttcgtgaccaccaccggctgcatcgacatcatcctgggcagacacttcgagcagatgaaggacgacgccatcgtgtgcaacatcggccacttcgacgtggagatcgacgtgaagtggctgaacgagaacgccgtggagaaggtgaacatcaagccccaggtggacagatacagactgaagaacggcagaagaatcatcctgctggccgagggcagactggtgaacctgggctgcgccatgggccaccccagcttcgtgatgagcaacagcttcaccaaccaggtgatggcccagatcgagctgtggacccaccccgacaagtaccccgtgggcgtgcacttcctgcccaagaagctggacgaggccgtggccgaggcccacctgggcaagctgaacgtgaagctgaccaagctgaccgagaagcaggcccagtacctgggcatgagctgcgacggccccttcaagcccgaccactacagatactag

SEQ ID NO: 14425 - protein, 501 aa, Artificial Sequence
  derived and/or modified sequence
MSSSGTPDLPVLLTDLKIQYTKIFINNEWHDSVSGKKFPVFNPATEEELCQVEEGDKEDVDKAVKAARQAFQIGSPWRTMDASERGRLLYKLADLIERDRLLLATMESMNGGKLYSNAYLNDLAGCIKTLRYCAGWADKIQGRTIPIDGNFFTYTRHEPIGVCGQIIPWNFPLVMLIWKIGPALSCGNTVVVKPAEQTPLTALHVASLIKEAGFPPGVVNIVPGYGPTAGAAISSHMDIDKVAFTGSTEVGKLIKEAAGKSNLKRVTLELGGKSPCIVLADADLDNAVEFAHHGVFYHQGQCCIAASRIFVEESIYDEFVRRSVERAKKYILGNPLTPGVTQGPQIDKEQYDKILDLIESGKKEGAKLECGGGPWGNKGYFVQPTVFSNVTDEMRIAKEEIFGPVQQIMKFKSLDDVIKRANNTFYGLSAGVFTKDIDKAITISSALQAGTVWVNCYGVVSAQCPFGGFKMSGNGRELGEYGFHEYTEVKTVTVKISQKNS

SEQ ID NO: 14426 - protein, 230 aa, Artificial Sequence
  derived and/or modified sequence
MSSSGTPDLPVLLTDLKIQYTKIFINNEWHDSVSGKKFPVFNPATEEELCQVEEGDKEDVDKAVKAARQAFQIGSPWRTMDASERGRLLYKLADLIERDRLLLATMESMNGGKLYSNAYLNDLAGCIKTLRYCAGWADKIQGRTIPIDGNFFTYTRHEPIGVCGQIIPWNFPLVMLIWKIGPALSCGNTVVVKPAEQTPLTALHVASLIKEAGFPPGVVNIVPGYGASVV

SEQ ID NO: 14427 - protein, 238 aa, Artificial Sequence
  derived and/or modified sequence
MSSSGTPDLPVLLTDLKIQYTKIFINNEWHDSVSGKKFPVFNPATEEELCQVEEGDKEDVDKAVKAARQAFQIGSPWRTMDASERGRLLYKLADLIERDRLLLATMESMNGGKLYSNAYLNDLAGCIKTLRYCAGWADKIQGRTIPIDGNFFTYTRHEPIGVCGQIIPWNFPLVMLIWKIGPALSCGNTVVVKPAEQTPLTALHVASLIKEAGFPPGVVNIVPGYGPTAGAAISSHMD

SEQ ID NO: 14428 - protein, 329 aa, Artificial Sequence
  derived and/or modified sequence
IAEPVTCVPGAESEMSSSGTPDLPVLLTDLKIQYTKIFINNEWHDSVSGKKFPVFNPATEEELCQVEEGDKEDVDKAVKAARQAFQIGSPWRTMDASERGRLLYKLADLIERDRLLLATMESMNGGKLYSNAYLNDLAGCIKTLRYCAGWADKIQGRTIPIDGNFFTYTRHEPIGVCGQIIPWNFPLVMLIWKIGPALSCGNTVVVKPAEQTPLTALHVASLIKEAGFPPGVVNIVPGYGPTAGAAISSHMDIDKVAFTGSTEVGKLIKEAAGKSNLKRVTLELGGKSPCIVLADADLDNAVEFAHHGVFYHQGQCCIAASRFCGRINL

SEQ ID NO: 14429 - protein, 203 aa, Artificial Sequence
  derived and/or modified sequence
MSSSGTPDLPVLLTDLKIQYTKIFINNEWHDSVSGKKFPVFNPATEEELCQVEEGDKEDVDKAVKAARQAFQIGSPWRTMDASERGRLLYKLADLIERDRLLLATMESMNGGKLYSNAYLNDLAGCIKTLRYCAGWADKIQGRTIPIDGNFFTYTRHEPIGVCGQIIPWNFPLVMLIWKIGPALSCGNTVVVKPAEQTPLTAL

SEQ ID NO: 14430 - DNA, 1506 bp, Artificial Sequence
  derived and/or modified sequence
atgtcaagctccgggacacctgacctgcctgttttgctcaccgacctgaaaatccagtataccaagatttttataaacaatgaatggcatgactcggtctcagggaaaaaatttcctgtgtttaaccctgccacggaagaggaactttgtcaggtggaagagggtgacaaagaggatgtagataaagccgtgaaagctgctcggcaagcttttcagatagggtcaccttggcgtacgatggacgcctcagagcgcggcaggctcctttacaaactggccgatctgatcgaacgggaccgcctgctgctggctacaatggagtcaatgaacggcggcaaactctatagcaacgcttacctgaatgatctggctggatgcattaagacccttcggtattgtgccggctgggctgacaagattcaaggaagaacgattcctatcgacggaaacttcttcacctacacccgacacgaacccattggagtgtgcggccagatcatcccttggaatttccctcttgtgatgcttatttggaagatcggacctgccctttcgtgcggaaacactgtggtggtgaaaccagcagagcaaaccccgttaaccgcactgcacgttgcttctttgattaaagaggccggctttccaccaggtgtggtgaacatagttcccgggtatggccccacagctggagcagctattagctctcatatggacatcgataaagtggccttcaccggctccactgaagtcggtaaattaatcaaagaagccgctggaaagtctaaccttaaacgcgtgaccctcgagttaggaggtaaatctccttgcatcgtcttagctgacgccgacctggataatgccgtggaattcgcacaccatggcgttttctatcatcagggccagtgttgtatcgccgcgtcccggattttcgtcgaggagagtatctatgacgaattcgtgcggcggtctgtcgagagggcgaagaaatacatcctggggaatccactcacacccggagtgacccaagggccccaaattgataaagaacaatatgacaagattctggacctgatcgagtctggtaagaaggagggggccaagcttgagtgtggaggcggtccttgggggaacaagggatattttgtgcagcctaccgtgttctctaacgtgacagatgagatgagaatcgccaaggaggaaatatttggacccgtgcaacaaattatgaaattcaaatccctggatgatgtcattaaaagagccaataataccttttacggtctgtcagcaggtgtgttcacaaaagacatagataaagccattaccatcagctccgccctgcaggcaggaacggtttgggttaactgttacggggtcgtgagcgcacagtgccctttcggcggattcaaaatgagcgggaatggccgggaactgggtgagtacggtttccacgaatacacagaggtgaaaacagttaccgtgaaaatatctcagaagaattcctag

SEQ ID NO: 14431 - DNA, 693 bp, Artificial Sequence
  derived and/or modified sequence
atgagtagcagcggcacacccgatctcccagtgttgttgactgatttaaagattcagtatacaaagatcttcataaacaatgagtggcacgacagtgtgagtggcaagaagtttcccgtatttaacccggctactgaagaggagctgtgccaggtggaggagggtgataaggaggatgtcgataaggcagtaaaggctgctcgccaagccttccagatcggctctccttggaggaccatggacgcgtctgaaagaggaaggttgctttacaaattagccgatctaattgagcgcgacaggctgctgttggccactatggagtcaatgaatggtgggaaactgtactccaatgcctatctgaacgacctggctggctgtataaaaacactccgctactgcgcaggttgggccgataagatccaggggcgaacgatccccatagacggtaactttttcacctacactcgtcacgagcccatcggagtgtgcggccaaatcattccttggaactttccgctggtcatgctgatttggaagattggcccagcgctgagctgcggcaacacagttgtggtgaagcctgctgaacagacccccctgaccgccctgcatgtggcatcactgatcaaggaggccgggttcccgccaggtgttgtgaatatcgtacctggatatggagcctcagtggtttag

SEQ ID NO: 14432 - DNA, 717 bp, Artificial Sequence
  derived and/or modified sequence
atgtcctcaagcggcacaccagaccttcctgtcctgctgactgacctgaagatccagtatacaaaaattttcattaataacgagtggcacgacagtgtatccgggaagaagtttccagtgttcaatcctgccacggaggaggaactgtgtcaggtggaagagggggacaaggaggacgtggacaaggccgtgaaggcagcaagacaggcattccagattgggagtccatggcggacaatggatgcatcagaaagggggagactcctgtataaactcgccgatctcattgaacgggaccgattgctgttggccactatggagagtatgaatgggggcaagctctatagtaacgcctatcttaatgacctggcagggtgcattaaaaccttaagatactgtgcaggatgggcagataagatccagggaaggacgatccctatcgatggcaatttctttacatacacaagacacgagcccatcggcgtgtgcggccagattattccgtggaatttccccctcgtgatgctcatctggaagatcggccctgctctcagctgtgggaacacagtggtcgtgaagcccgcagagcagactcctctgactgccttgcatgtggcgagcttaattaaggaggccggctttcctcccggagtggtcaatatagttcccggttacggaccaacagccggagcagcaatcagctctcatatggactag

SEQ ID NO: 14433 - DNA, 990 bp, Artificial Sequence
  derived and/or modified sequence
atcgctgaaccagtgacatgtgtaccgggggcagaaagcgagatgagctcctctggcactccagacctgcctgtgctactcactgacctcaagatacagtacacgaagatctttattaacaatgaatggcatgacagcgtgtccggaaaaaagttcccagtgttcaacccagctactgaagaagagctctgccaggtggaagagggcgacaaagaggacgttgataaggcggtgaaggcagcacgacaggcctttcagatcgggtcaccatggcgaacaatggatgcttctgagcgtgggagactactatataagctggccgaccttatcgagcgggataggctgcttctggccacaatggagtccatgaacggcggcaaactctattccaacgcatatctgaacgacttggccggatgtatcaaaaccctgcgatactgtgctggatgggccgataagatccaggggcgcaccattcctattgacggcaatttctttacctatacccgccatgagcccatcggggtttgcggccagataattccttggaactttcctctcgttatgttgatttggaagatcggacccgctctgtcctgtggtaatacagtggtggtgaaaccggcagagcaaaccccacttaccgccctgcatgtggcctctctgatcaaagaggctggcttccccccaggcgtcgtcaacattgtgccaggttatgggcctaccgcaggcgcagctatatcgagccacatggacatcgataaagttgcctttaccgggagcaccgaggtcgggaagcttatcaaggaagccgctgggaaatcaaatctcaagcgggttaccctagagctagggggtaaatctccctgcatcgtcctagctgacgccgatctggacaatgcagtcgagtttgcacaccacggagtattctatcatcagggccagtgttgtatcgctgcgagcaggttttgtggcaggattaatctgtag

SEQ ID NO: 14434 - DNA, 612 bp, Artificial Sequence
  derived and/or modified sequence
atgagtagcagtggaaccccagatctccctgtgctccttaccgatctcaagatccaatatacaaagattttcataaataacgagtggcatgattccgtgtcaggaaagaagttccctgtgttcaaccccgcaaccgaagaagaactctgccaggtggaggagggcgacaaagaagacgtcgataaggccgttaaagccgcgaggcaggcgtttcagattgggtccccctggcgtacaatggatgcgagcgaacgcggccgtctgttgtacaagctcgcagacttgatagagcgggaccggttgttgttagccacaatggagagcatgaacggcggtaagctgtattctaatgcttacttgaacgatctggccggttgtatcaagacactcagatattgtgccgggtgggccgacaaaatccaggggcggaccattccaattgatggcaatttctttacgtatactaggcacgagcccattggcgtctgcggccagatcattccctggaactttcctcttgtcatgctgatatggaaaatcggccctgctctgtcttgtggcaacacagtggtagtcaaaccagccgagcagactccgctcacagcgctctag

SEQ ID NO: 14435 - DNA, 1506 bp, Artificial Sequence
  derived and/or modified sequence
atgagcagcagcggcaccccagacctgcctgtgctgctgacagacctgaagatccagtacaccaagatcttcatcaacaatgagtggcatgacagcgtgtctgggaagaagtttcctgtgttcaacccagccacagaggaggagctgtgccaggtggaggagggggacaaggaggatgtggacaaggctgtgaaggccgcccggcaggccttccagatcggcagcccctggaggaccatggatgccagcgagcggggccgcctgctgtacaagctggccgacctgattgaaagagaccggctgctgctggccaccatggagagcatgaatggaggcaagctgtacagcaatgcctacctgaatgacctggccggctgcatcaagaccctgcgctactgtgccggctgggccgacaagatccagggccgcaccatccccattgatggcaacttcttcacctacaccaggcatgagcccatcggcgtgtgtggccagatcatcccctggaacttccccctggtgatgctgatctggaagattggccctgccctgagctgtggcaacacagtggtggtgaagccagctgagcagacccccctgacagccctgcacgtggccagcctcatcaaggaggccggcttccccccaggagtggtgaacatcgtgcccggctacggccccacagctggagctgccatcagcagccacatggacatcgacaaggtggccttcaccggcagcacagaggtgggcaagctgatcaaggaggccgccggcaagagcaacctgaagagggtgaccctggagctgggcggcaagagcccctgcatcgtgctggctgatgctgacctggacaatgctgtggagtttgcccaccacggcgtcttctaccaccagggccagtgctgcatcgccgccagccgcatctttgtggaggagagcatctatgatgaatttgtgagaagatctgtggagcgggccaagaagtacatcctgggcaaccccctgaccccaggagtgacccagggcccccagattgacaaggagcagtatgacaagatcctggacctgattgagagcggcaagaaggagggcgccaagctggagtgtggcggcggcccctggggcaacaagggctactttgtgcagcccaccgtcttcagcaatgtgacagatgagatgagaattgccaaggaggagatcttcggccctgtgcagcagatcatgaagttcaagagcctggatgatgtgatcaagagggccaacaacaccttctacggcctgtctgctggggtcttcaccaaggacatcgacaaggccatcaccatcagcagcgccctgcaggccggcaccgtgtgggtgaactgctatggagtggtgtctgcccagtgcccctttggaggcttcaagatgtctggaaatggccgggagctgggggagtatggcttccacgagtacacagaggtgaagacagtgacagtgaagatcagccagaagaacagctag

SEQ ID NO: 14436 - DNA, 693 bp, Artificial Sequence
  derived and/or modified sequence
atgagcagcagcggcaccccagacctgcctgtgctgctgacagacctgaagatccagtacaccaagatcttcatcaacaatgagtggcatgacagcgtgtctgggaagaagtttcctgtgttcaacccagccacagaggaggagctgtgccaggtggaggagggggacaaggaggatgtggacaaggctgtgaaggccgcccggcaggccttccagatcggcagcccctggaggaccatggatgccagcgagcggggccgcctgctgtacaagctggccgacctgattgaaagagaccggctgctgctggccaccatggagagcatgaatggaggcaagctgtacagcaatgcctacctgaatgacctggccggctgcatcaagaccctgcgctactgtgccggctgggccgacaagatccagggccgcaccatccccattgatggcaacttcttcacctacaccaggcatgagcccatcggcgtgtgtggccagatcatcccctggaacttccccctggtgatgctgatctggaagattggccctgccctgagctgtggcaacacagtggtggtgaagccagctgagcagacccccctgacagccctgcacgtggccagcctcatcaaggaggccggcttccccccaggagtggtgaacatcgtgcccggctatggagcctctgtggtgtag

SEQ ID NO: 14437 - DNA, 717 bp, Artificial Sequence
  derived and/or modified sequence
atgagcagcagcggcaccccagacctgcctgtgctgctgacagacctgaagatccagtacaccaagatcttcatcaacaatgagtggcatgacagcgtgtctgggaagaagtttcctgtgttcaacccagccacagaggaggagctgtgccaggtggaggagggggacaaggaggatgtggacaaggctgtgaaggccgcccggcaggccttccagatcggcagcccctggaggaccatggatgccagcgagcggggccgcctgctgtacaagctggccgacctgattgaaagagaccggctgctgctggccaccatggagagcatgaatggaggcaagctgtacagcaatgcctacctgaatgacctggccggctgcatcaagaccctgcgctactgtgccggctgggccgacaagatccagggccgcaccatccccattgatggcaacttcttcacctacaccaggcatgagcccatcggcgtgtgtggccagatcatcccctggaacttccccctggtgatgctgatctggaagattggccctgccctgagctgtggcaacacagtggtggtgaagccagctgagcagacccccctgacagccctgcacgtggccagcctcatcaaggaggccggcttccccccaggagtggtgaacatcgtgcccggctacggccccacagctggagctgccatcagcagccacatggactag

SEQ ID NO: 14438 - DNA, 990 bp, Artificial Sequence
  derived and/or modified sequence
attgctgagcctgtgacctgtgtgcctggagctgagagcgagatgagcagcagcggcaccccagacctgcctgtgctgctgacagacctgaagatccagtacaccaagatcttcatcaacaatgagtggcatgacagcgtgtctgggaagaagtttcctgtgttcaacccagccacagaggaggagctgtgccaggtggaggagggggacaaggaggatgtggacaaggctgtgaaggccgcccggcaggccttccagatcggcagcccctggaggaccatggatgccagcgagcggggccgcctgctgtacaagctggccgacctgattgaaagagaccggctgctgctggccaccatggagagcatgaatggaggcaagctgtacagcaatgcctacctgaatgacctggccggctgcatcaagaccctgcgctactgtgccggctgggccgacaagatccagggccgcaccatccccattgatggcaacttcttcacctacaccaggcatgagcccatcggcgtgtgtggccagatcatcccctggaacttccccctggtgatgctgatctggaagattggccctgccctgagctgtggcaacacagtggtggtgaagccagctgagcagacccccctgacagccctgcacgtggccagcctcatcaaggaggccggcttccccccaggagtggtgaacatcgtgcccggctacggccccacagctggagctgccatcagcagccacatggacatcgacaaggtggccttcaccggcagcacagaggtgggcaagctgatcaaggaggccgccggcaagagcaacctgaagagggtgaccctggagctgggcggcaagagcccctgcatcgtgctggctgatgctgacctggacaatgctgtggagtttgcccaccacggcgtcttctaccaccagggccagtgctgcatcgccgccagccgcttctgtggccgcatcaacctgtag

SEQ ID NO: 14439 - DNA, 612 bp, Artificial Sequence
  derived and/or modified sequence
atgagcagcagcggcaccccagacctgcctgtgctgctgacagacctgaagatccagtacaccaagatcttcatcaacaatgagtggcatgacagcgtgtctgggaagaagtttcctgtgttcaacccagccacagaggaggagctgtgccaggtggaggagggggacaaggaggatgtggacaaggctgtgaaggccgcccggcaggccttccagatcggcagcccctggaggaccatggatgccagcgagcggggccgcctgctgtacaagctggccgacctgattgaaagagaccggctgctgctggccaccatggagagcatgaatggaggcaagctgtacagcaatgcctacctgaatgacctggccggctgcatcaagaccctgcgctactgtgccggctgggccgacaagatccagggccgcaccatccccattgatggcaacttcttcacctacaccaggcatgagcccatcggcgtgtgtggccagatcatcccctggaacttccccctggtgatgctgatctggaagattggccctgccctgagctgtggcaacacagtggtggtgaagccagctgagcagacccccctgacagccctgtag

SEQ ID NO: 14440 - DNA, 2107 bp, Artificial Sequence
  derived and/or modified sequence
ctatcagaaccaaattgctgagccagtcacctgtgttccaggagccgaatcagaaatgtcatcctcaggcacgccagacttacctgtcctactcaccgatttgaagattcaatatactaagatcttcataaacaatgaatggcatgattcagtgagtggcaagaaatttcctgtctttaatcctgcaactgaggaggagctctgccaggtagaagaaggagataaggaggatgttgacaaggcagtgaaggccgcaagacaggcttttcagattggatccccgtggcgtactatggatgcttccgagagggggcgactattatacaagttggctgatttaatcgaaagagatcgtctgctgctggcgacaatggagtcaatgaatggtggaaaactctattccaatgcatatctgaatgatttagcaggctgcatcaaaacattgcgctactgtgcaggttgggctgacaagatccagggccgtacaataccaattgatggaaatttttttacatatacaagacatgaacctattggtgtatgtggccaaatcattccttggaatttcccgttggttatgctcatttggaagatagggcctgcactgagctgtggaaacacagtggttgtcaaaccagcagagcaaactcctctcactgctctccacgtggcatctttaataaaagaggcagggtttcctcctggagtagtgaatattgttcctggttatgggcctacagcaggggcagccatttcttctcacatggatatagacaaagtagccttcacaggatcaacagaggttggcaagttgatcaaagaagctgccgggaaaagcaatctgaagagggtgaccctggagcttggaggaaagagcccttgcattgtgttagctgatgccgacttggacaatgctgttgaatttgcacaccatggggtattctaccaccagggccagtgttgtatagccgcatccaggatttttgtggaagaatcaatttatgatgagtttgttcgaaggagtgttgagcgggctaagaagtatatccttggaaatcctctgaccccaggagtcactcaaggccctcagattgacaaggaacaatatgataaaatacttgacctcattgagagtgggaagaaagaaggggccaaactggaatgtggaggaggcccgtgggggaataaaggctactttgtccagcccacagtgttctctaatgttacagatgagatgcgcattgccaaagaggagatttttggaccagtgcagcaaatcatgaagtttaaatctttagatgacgtgatcaaaagagcaaacaatactttctatggcttatcagcaggagtgtttaccaaagacattgataaagccataacaatctcctctgctctgcaggcaggaacagtgtgggtgaattgctatggcgtggtaagtgcccagtgcccctttggtggattcaagatgtctggaaatggaagagaactgggagagtacggtttccatgaatatacagaggtcaaaacagtcacagtgaaaatctctcagaagaactcataaagaaaatacaagagtggagagaagctcttcaatagctaagcatctccttacagtcactaatatagtagattttaaagacaaaatttttcttttcttgatttttttaaacataagctaaatcatattagtattaatactacccatagaaaacttgacatgtagcttcttctgaaagaattatttgccttctgaaatgtgacccccaagtcctatcctaaataaaaaaagacaaattcggatgtatgatctctctagctttgtcatagttatgtgattttcctttgtagctacttttgcaggataataattttatagaaaaggaacagttgcatttagcttctttcccttagtgactcttgaagtacttaacatacacgttaactgcagagtaaattgctctgttcccagtagttataaagtccttggactgttttgaaaagtttcctaggatgtcatgtctgcttgtcaaaagaaataatccctgtaatatttagctgtaaactgaatataaagcttaataaaaacaaccttgcatgattcttgtta

SEQ ID NO: 14441 - DNA, 822 bp, Artificial Sequence
  derived and/or modified sequence
tctatcagaaccaaattgctgagccagtcacctgtgttccaggagccgaatcagaaatgtcatcctcaggcacgccagacttacctgtcctactcaccgatttgaagattcaatatactaagatcttcataaacaatgaatggcatgattcagtgagtggcaagaaatttcctgtctttaatcctgcaactgaggaggagctctgccaggtagaagaaggagataaggaggatgttgacaaggcagtgaaggccgcaagacaggcttttcagattggatccccgtggcgtactatggatgcttccgagagggggcgactattatacaagttggctgatttaatcgaaagagatcgtctgctgctggcgacaatggagtcaatgaatggtggaaaactctattccaatgcatatctgaatgatttagcaggctgcatcaaaacattgcgctactgtgcaggttgggctgacaagatccagggccgtacaataccaattgatggaaatttttttacatatacaagacatgaacctattggtgtatgtggccaaatcattccttggaatttcccgttggttatgctcatttggaagatagggcctgcactgagctgtggaaacacagtggttgtcaaaccagcagagcaaactcctctcactgctctccacgtggcatctttaataaaagaggcagggtttcctcctggagtagtgaatattgttcctggttatggggccagtgttgtatagccgcatccaggatttttgtggaagaatcaatttatgatgagtttgttcgaaggagtgttgagcgggctaagaa

SEQ ID NO: 14442 - DNA, 806 bp, Artificial Sequence
  derived and/or modified sequence
agaagtccaggatgggaagagagatctgcagactcccagggaacctacagctttctccttcacagcattgcaggaggagccgaatcagaaatgtcatcctcaggcacgccagacttacctgtcctactcaccgatttgaagattcaatatactaagatcttcataaacaatgaatggcatgattcagtgagtggcaagaaatttcctgtctttaatcctgcaactgaggaggagctctgccaggtagaagaaggagataaggaggatgttgacaaggcagtgaaggccgcaagacaggcttttcagattggatccccgtggcgtactatggatgcttccgagagggggcgactattatacaagttggctgatttaatcgaaagagatcgtctgctgctggcgacaatggagtcaatgaatggtggaaaactctattccaatgcatatctgaatgatttagcaggctgcatcaaaacattgcgctactgtgcaggttgggctgacaagatccagggccgtacaataccaattgatggaaatttttttacatatacaagacatgaacctattggtgtatgtggccaaatcattccttggaatttcccgttggttatgctcatttggaagatagggcctgcactgagctgtggaaacacagtggttgtcaaaccagcagagcaaactcctctcactgctctccacgtggcatctttaataaaagaggcagggtttcctcctggagtagtgaatattgttcctggttatgggcctacagcaggggcagccatttcttctcacatggatat

SEQ ID NO: 14443 - DNA, 1001 bp, Artificial Sequence
  derived and/or modified sequence
atcagaaccaaattgctgagccagtcacctgtgttccaggagccgaatcagaaatgtcatcctcaggcacgccagacttacctgtcctactcaccgatttgaagattcaatatactaagatcttcataaacaatgaatggcatgattcagtgagtggcaagaaatttcctgtctttaatcctgcaactgaggaggagctctgccaggtagaagaaggagataaggaggatgttgacaaggcagtgaaggccgcaagacaggcttttcagattggatccccgtggcgtactatggatgcttccgagagggggcgactattatacaagttggctgatttaatcgaaagagatcgtctgctgctggcgacaatggagtcaatgaatggtggaaaactctattccaatgcatatctgaatgatttagcaggctgcatcaaaacattgcgctactgtgcaggttgggctgacaagatccagggccgtacaataccaattgatggaaatttttttacatatacaagacatgaacctattggtgtatgtggccaaatcattccttggaatttcccgttggttatgctcatttggaagatagggcctgcactgagctgtggaaacacagtggttgtcaaaccagcagagcaaactcctctcactgctctccacgtggcatctttaataaaagaggcagggtttcctcctggagtagtgaatattgttcctggttatgggcctacagcaggggcagccatttcttctcacatggatatagacaaagtagccttcacaggatcaacagaggttggcaagttgatcaaagaagctgccgggaaaagcaatctgaagagggtgaccctggagcttggaggaaagagcccttgcattgtgttagctgatgccgacttggacaatgctgttgaatttgcacaccatggggtattctaccaccagggccagtgttgtatagccgcatccaggttttgtggaagaatcaatttatga

SEQ ID NO: 14444 - DNA, 805 bp, Artificial Sequence
  derived and/or modified sequence
gtggccaggatcgggtctgggaagctcggagatttcactgtgagtggagtcagagggaaggcatttggagcaaaggcttctgtaagagggagtaggatggaaattgatctttgaagaaagcaagacagaagaagggagatggaaagatgaaatcattttaaaattgctggtaacaaacgaaggagccgaatcagaaatgtcatcctcaggcacgccagacttacctgtcctactcaccgatttgaagattcaatatactaagatcttcataaacaatgaatggcatgattcagtgagtggcaagaaatttcctgtctttaatcctgcaactgaggaggagctctgccaggtagaagaaggagataaggaggatgttgacaaggcagtgaaggccgcaagacaggcttttcagattggatccccgtggcgtactatggatgcttccgagagggggcgactattatacaagttggctgatttaatcgaaagagatcgtctgctgctggcgacaatggagtcaatgaatggtggaaaactctattccaatgcatatctgaatgatttagcaggctgcatcaaaacattgcgctactgtgcaggttgggctgacaagatccagggccgtacaataccaattgatggaaatttttttacatatacaagacatgaacctattggtgtatgtggccaaatcattccttggaatttcccgttggttatgctcatttggaagatagggcctgcactgagctgtggaaacacagtggttgtcaaaccagcagagcaaactcctctcactgctctc

SEQ ID NO: 14445 - DNA, 1506 bp, Artificial Sequence
  derived and/or modified sequence
atgagcagcagcggcacccccgacctgcccgtgctgctgaccgacctgaaaattcaatacactaaaatcttcatcaacaacgaatggcatgattccgtgtcgggcaaaaaatttcctgtctttaatcccgccaccgaggaagaattgtgccaggttgaagaaggcgataaggaagatgtggataaggctgtgaaggctgcaagacaggcgttccagatcggcagtccatggcgaacaatggacgcctctgagagagggcggctcctctacaagctagctgacctcatcgagagagacagactcctgctcgccactatggagtcaatgaatggcggcaagctatattccaatgcttatttgaatgacctggccggctgcattaagacgctgagatactgcgccgggtgggcggacaagatccaaggtcgtactatacccattgatggcaatttttttacatatacgcgccacgagccaataggcgtatgtggacagatcatcccctggaatttccctctcgtcatgctgatctggaaaattggaccagccttatcttgcggcaatacagtggtagtgaagcctgcggagcaaacacccttgaccgcacttcatgtggcttccctgatcaaagaggccggcttcccaccaggcgttgtgaacattgtgcctggctacgggcccacagccggggcagccatcagctctcatatggatattgataaggtggccttcaccggttctacagaggtcggcaagctgataaaggaggctgctggtaaatctaacctgaaacgcgtgacgctcgaattgggagggaaaagcccatgcatagtgttagcagacgcggacctcgataacgcagtcgagtttgctcaccatggtgtgttttatcatcagggtcagtgctgcattgctgcctcacgtattttcgttgaggagagcatatatgacgaatttgtcaggaggtccgtcgagcgggctaagaagtacatactaggcaaccctctcacccctggcgtcacacaaggcccacagatcgacaaagagcagtatgacaaaatactggatcttatagaatcagggaaaaaagaaggtgcaaaactcgaatgcgggggtggaccttgggggaataagggatacttcgtgcaacccactgtgttctcaaatgtcacagatgagatgcggattgccaaagaagaaatattcggacccgtgcagcagattatgaaattcaaatcgctggacgacgtgatcaagagagccaataataccttctatggtctcagcgccggcgttttcacaaaggatatagacaaggccatcaccatttccagcgcgctgcaagcaggcacagtgtgggtaaattgctatggggtggtctctgcccagtgtccatttgggggattcaagatgtctggaaacggccgcgagttgggcgagtatgggtttcatgagtacaccgaagtcaagactgtcaccgttaagatctctcagaaaaatagctag

SEQ ID NO: 14446 - DNA, 693 bp, Artificial Sequence
  derived and/or modified sequence
atgagcagcagcggcacccccgacctgcccgtgctgctgaccgacttaaaaatccagtatacgaagatcttcataaataacgagtggcatgatagtgtatccggcaaaaagttccctgtcttcaatccagcaacagaggaggaactgtgtcaggtggaggagggcgataaagaagatgtcgacaaagcagtgaaggcggctcgccaggcctttcaaatcggtagtccctggcgaactatggatgcttctgaacgggggcgtttactctacaagctggctgatctcatcgaaagggatcgattgctgttggccacaatggaaagtatgaacgggggaaaactatacagcaatgcctacctgaacgacttggcaggttgcattaaaactcttcggtactgcgctggatgggctgataagattcaaggcagaaccatacccatcgatggaaatttttttacctacacccggcatgagcccatcggagtttgtggacaaataatcccttggaattttcccctggtgatgctcatatggaaaattggacctgccttgagttgtgggaacactgtggtcgtgaaacctgcagagcagacgcccctgacagctcttcacgtcgcttcacttatcaaggaagcaggttttcccccgggagtcgtaaacattgtgcccggctatggcgccagtgtggtgtag

SEQ ID NO: 14447 - DNA, 717 bp, Artificial Sequence
  derived and/or modified sequence
atgagcagcagcggcacccccgacctgcccgtgctgctgaccgaccttaagatccagtatacgaagatcttcataaacaacgaatggcacgattctgtaagtgggaaaaaatttcccgtcttcaatcctgccaccgaagaagagttgtgccaggtggaagagggggacaaagaggacgtcgataaagccgtgaaggctgctaggcaggctttccaaatcggctccccctggcgcactatggatgcaagcgaacgaggtaggctgctgtataagttggcagaccttatcgagcgggatcgcctccttctggccactatggagtccatgaacggtggcaagctatattctaatgcctacctaaatgatttggccggatgtatcaagactcttagatactgcgctgggtgggctgacaaaattcagggccgcacaatccccattgatgggaactttttcacgtacaccagacacgaaccaattggtgtgtgcggccagattataccctggaattttcctttggtgatgctaatttggaagatcggcccagccttaagttgcggaaataccgtcgttgtcaaacccgccgagcagactcctttgactgcgcttcatgtggcaagccttatcaaggaagcaggcttccccccaggcgtggtgaatattgtaccagggtatggtcccacagcaggggccgccatcagtagccacatggattag

SEQ ID NO: 14448 - DNA, 990 bp, Artificial Sequence
  derived and/or modified sequence
atcgccgagcccgtgacctgcgtgcccggcgccgagagcgagatgagttcttccggtacaccggatctgcccgtgttgctgacggatctgaagattcaatatactaagatcttcattaataatgaatggcatgactccgtgtcgggaaagaaattccctgttttcaatccagccacggaggaggagctctgtcaggtggaagaaggggacaaggaagatgtagataaggccgttaaggccgcccgacaagcctttcagattggctctccctggcgtaccatggacgccagcgaaagggggcgtcttctgtataagctggcagatttgatcgaaagagacagacttttgcttgcaacaatggagagcatgaatggtggtaagctatatagcaacgcatatctgaacgacctagccggatgtataaagacactgagatactgcgccggctgggccgacaagatacagggaaggaccataccaatcgacggcaattttttcacctacacccggcatgagcccatcggcgtgtgtgggcagatcatcccctggaacttccccctggtgatgctaatctggaagattggtcccgctttgtcatgcggaaataccgttgtggtcaaacccgccgagcagacgccgctgactgctttacacgtagcttcactgatcaaggaggcagggttccccccgggggtagtcaacattgtccctggctacggtcctaccgccggtgcggccattagctcacatatggacatagataaggtggctttcactggaagcacagaggtggggaagctgatcaaggaggccgctggcaagagtaatctgaaaagggtcactctggagttaggcggaaaatcgccttgtatagtgttggccgacgcagacctggataacgctgtggaatttgcgcaccacggggtcttctatcatcaaggccaatgctgtatcgccgcctctagattttgcgggcggattaacctgtag

SEQ ID NO: 14449 - DNA, 612 bp, Artificial Sequence
  derived and/or modified sequence
atgagcagcagcggcacccccgacctgcccgtgctgctgaccgacctgaaaattcagtatacaaagatctttattaataatgagtggcatgactctgtgagcggcaaaaaattccccgtttttaatcctgcaaccgaagaggagttgtgtcaagttgaggagggggacaaggaggacgtggacaaagccgttaaagctgcccgacaggccttccagatcggcagtccttggcggacaatggacgccagtgagaggggccgcttgttatacaagttggctgatctcattgaacgtgaccggttactcttggcgacaatggaatcgatgaatggcgggaagttatatagcaacgcttatcttaatgatttagccggctgcataaaaactttgcggtactgcgctggatgggcagataagatacaaggacggactattcctattgatggaaacttcttcacctatacccgccatgaacccatcggtgtgtgcgggcagatcattccctggaatttccccctggtcatgttgatctggaagattggccctgcactgtcgtgcggcaacacagtggtggtaaagcccgcggagcagacacctctgacagcgctgtag

SEQ ID NO: 14450 - DNA, 1506 bp, Artificial Sequence
  derived and/or modified sequence
atgtcgagcagtggaactcctgatctgccagtcttactcaccgatttgaagatccagtacacaaagatttttatcaacaacgaatggcacgactcagtcagcggtaagaaattccctgtgttcaatcccgcaactgaagaggagctgtgccaggtagaggagggtgataaggaggatgtcgacaaggcggtgaaggcagcaagacaagcatttcagattggttctccctggagaactatggatgcttccgagcggggacgactgttatataaattagcagacttgatagaaagagaccgtttgctgctggccaccatggagagcatgaacggaggtaaactgtattcaaacgcctatctcaacgacctcgcaggatgcattaaaaccctcaggtactgcgctggatgggccgacaagatccagggacggaccattcccattgacggcaacttcttcacatatactaggcacgagccaataggcgtatgtgggcagattattccatggaattttcctctagttatgctgatttggaaaattggaccagctctcagctgtggaaacaccgtggtcgtcaagccagccgaacagacgcctcttaccgccttacacgtggccagcttgatcaaagaggccggatttccacccggagtcgtgaacattgttccagggtacggacctactgcaggagccgcaattagcagccacatggatattgataaggtggccttcacggggagtactgaggtcggcaaactgattaaagaagcggctggaaaatccaatctcaagcgtgtcacactggagctcgggggtaagtctccatgtatagtgctggccgatgctgacctcgacaacgccgtggagttcgctcatcacggcgtattttatcatcagggtcagtgttgtatcgctgcctcccgtatttttgtggaggagagcatttacgacgaatttgttcggaggagcgtggaacgtgccaagaagtacattttaggtaatccgctcacaccgggagtcacccagggaccacagatcgataaggagcagtatgacaagatcctcgacctgatcgagtctggaaagaaagagggtgcaaagctagaatgcggcggaggtccatggggaaacaagggatattttgtgcagccgacagttttcagcaatgtgactgacgaaatgagaatcgctaaagaggagatcttcggcccagtgcagcagatcatgaagttcaagtccctggatgacgtgatcaaaagggctaataacacgttctatgggctctcagcgggtgtctttaccaaagatattgataaggctatcaccattagctccgccctccaagccggaacggtctgggtaaactgttatggcgtggtgagtgcacaatgtcccttcggtggcttcaaaatgagtggaaacggcagggagctgggggaatacggctttcacgagtacaccgaggtcaaaactgtcacggtaaagataagccagaagaatagttag

SEQ ID NO: 14451 - DNA, 693 bp, Artificial Sequence
  derived and/or modified sequence
atgagtagctccggcacccctgacctgccagtcctcctgaccgacttgaaaatacagtacacaaaaatattcattaacaacgaatggcatgacagtgtcagcgggaaaaagttcccggtgttcaaccctgcaaccgaagaggaactctgtcaggtggaggaaggggataaggaggacgtcgacaaggctgtaaaggctgcaaggcaggcttttcaaatcgggagtccctggagaaccatggacgcaagcgagcgagggaggctactttacaagctggcggatctgatcgagagagaccggttgcttctggctaccatggaaagcatgaacggcggtaagctgtattctaacgcatacttgaacgatctcgcagggtgtattaaaactctgagatattgtgctggctgggcagataaaatccaggggagaacaattcccatagatggcaatttttttacctacacgcgccacgagcccatcggggtttgcggtcagatcatcccttggaatttcccactagtcatgctgatctggaagatcggacccgcactgagctgtggcaatactgtggttgtaaagccagcagagcagacacccctgacggcccttcacgtcgccagcctgattaaggaagcagggtttccacctggtgtcgttaacatagttcctgggtatggagcttcagtggtctag

SEQ ID NO: 14452 - DNA, 717 bp, Artificial Sequence
  derived and/or modified sequence
atgtcatcctccggcacccccgatctccccgtgctgctcaccgatctcaagatccagtacaccaagattttcattaacaacgaatggcacgatagtgtgagcggcaagaaattccctgtgtttaaccccgctaccgaggaagagctgtgccaggtggaggaaggtgataaggaggatgtggataaggcggtgaaggcagctcgacaagcatttcagattggatctccttggcgaaccatggatgccagcgagcggggacggctactctataagctggctgaccttatcgagcgagacagactgttgctagctaccatggaaagcatgaatgggggaaagttgtactccaatgcttatttgaatgacctcgcgggatgcattaaaactctgaggtactgcgccggttgggcagataaaattcagggcagaaccatccctatagacggcaatttctttacatatacgcgacacgagcccattggggtctgcggacaaatcatcccctggaacttcccactggtgatgctgatctggaagatcggtcccgcactttcctgtggaaacacagtagtggtgaagcccgctgagcagactcccctgacagcattgcatgtggcttcacttattaaagaggccggtttcccacctggagttgtgaacatcgtgcccggttacgggccaacggccggagccgcaatcagctcccacatggattag

SEQ ID NO: 14453 - DNA, 990 bp, Artificial Sequence
  derived and/or modified sequence
attgccgaaccagtgacctgcgtgcctggcgctgaaagcgagatgtctagctcaggtacccccgacctgcctgtgctgctcactgatcttaagatccaatatactaagatctttattaataacgagtggcatgatagcgtgtctggaaagaagttccctgtgttcaaccctgccactgaagaggaactctgtcaagtagaagagggcgataaagaggacgtggataaggcggtaaaggctgcacggcaggcctttcagatcggtagcccgtggcgcactatggacgcatccgagcgagggcgactcctgtataaactcgcagatctcattgagcgcgaccgcctcttgctggccactatggagagcatgaacggaggaaagctgtactcaaatgcatatcttaatgacctcgcagggtgtatcaagacacttagatactgcgctggatgggctgataaaattcagggccgtacgattcctatagacgggaatttttttacctatacccgccacgagcctattggggtgtgtggacagatcatcccctggaattttcctttggttatgctgatctggaagataggaccagcattgagctgtggtaacacagtcgtcgttaagcctgctgagcaaacgcccctgaccgctttacatgtggcttccctcattaaagaggcagggttccccccaggagttgttaatattgtcccaggctacggacctactgctggggcagccatatcttcgcatatggatatagataaagtggcttttacaggcagtaccgaggtcggtaagctgattaaggaagctgcaggaaagagcaacctgaagcgcgtgacacttgagctcggaggaaagtctccgtgtatcgtgctggcagatgcagacctagataacgccgtggagtttgcacatcatggcgtgttctaccaccaggggcagtgttgtatagctgcaagccgattctgcggcaggataaatttgtag

SEQ ID NO: 14454 - DNA, 612 bp, Artificial Sequence
  derived and/or modified sequence
atgtcttcgtctggaaccccagatctcccggtgttgctgaccgacctaaaaattcagtacacaaaaatctttatcaacaacgagtggcatgacagtgtgtccggcaagaaattcccggtgtttaatcccgcaactgaagaggagttgtgccaggttgaagagggagataaagaggacgtggacaaggccgtgaaggccgcaagacaagccttccagatcggctcaccttggcggactatggacgcttccgaacgtggccgtctgctgtataagttagccgatctgattgaaagagacaggcttcttctggctacgatggaatccatgaacggagggaaactctacagtaacgcctatctcaacgatttggctggttgcatcaagacccttaggtactgcgcaggctgggctgataaaattcaaggcagaacaatcccaattgatggcaattttttcacctacactcgccatgagcctattggcgtttgtggtcaaatcatcccctggaattttccactcgtgatgttgatctggaaaatcggcccagctctgtcttgcggcaacaccgtcgtcgtcaagcctgctgagcagacacccctgacagctctgtag

SEQ ID NO: 14455 - DNA, 1506 bp, Artificial Sequence
  derived and/or modified sequence
atgagcagcagcggcacccccgacctgcccgtgctgctgaccgacctgaagatccagtacaccaagatcttcatcaacaacgagtggcacgacagcgtgagcggcaagaagttccccgtgttcaaccccgccaccgaggaggagctgtgccaggtggaggagggcgacaaggaggacgtggacaaggccgtgaaggccgccagacaggccttccagatcggcagcccctggagaaccatggacgccagcgagagaggcagactgctgtacaagctggccgacctgatcgagagagacagactgctgctggccaccatggagagcatgaacggcggcaagctgtacagcaacgcctacctgaacgacctggccggctgcatcaagaccctgagatactgcgccggctgggccgacaagatccagggcagaaccatccccatcgacggcaacttcttcacctacaccagacacgagcccatcggcgtgtgcggccagatcatcccctggaacttccccctggtgatgctgatctggaagatcggccccgccctgagctgcggcaacaccgtggtggtgaagcccgccgagcagacccccctgaccgccctgcacgtggccagcctgatcaaggaggccggcttcccccccggcgtggtgaacatcgtgcccggctacggccccaccgccggcgccgccatcagcagccacatggacatcgacaaggtggccttcaccggcagcaccgaggtgggcaagctgatcaaggaggccgccggcaagagcaacctgaagagagtgaccctggagctgggcggcaagagcccctgcatcgtgctggccgacgccgacctggacaacgccgtggagttcgcccaccacggcgtgttctaccaccagggccagtgctgcatcgccgccagcagaatcttcgtggaggagagcatctacgacgagttcgtgagaagaagcgtggagagagccaagaagtacatcctgggcaaccccctgacccccggcgtgacccagggcccccagatcgacaaggagcagtacgacaagatcctggacctgatcgagagcggcaagaaggagggcgccaagctggagtgcggcggcggcccctggggcaacaagggctacttcgtgcagcccaccgtgttcagcaacgtgaccgacgagatgagaatcgccaaggaggagatcttcggccccgtgcagcagatcatgaagttcaagagcctggacgacgtgatcaagagagccaacaacaccttctacggcctgagcgccggcgtgttcaccaaggacatcgacaaggccatcaccatcagcagcgccctgcaggccggcaccgtgtgggtgaactgctacggcgtggtgagcgcccagtgccccttcggcggcttcaagatgagcggcaacggcagagagctgggcgagtacggcttccacgagtacaccgaggtgaagaccgtgaccgtgaagatcagccagaagaacagctag

SEQ ID NO: 14456 - DNA, 693 bp, Artificial Sequence
  derived and/or modified sequence
atgagcagcagcggcacccccgacctgcccgtgctgctgaccgacctgaagatccagtacaccaagatcttcatcaacaacgagtggcacgacagcgtgagcggcaagaagttccccgtgttcaaccccgccaccgaggaggagctgtgccaggtggaggagggcgacaaggaggacgtggacaaggccgtgaaggccgccagacaggccttccagatcggcagcccctggagaaccatggacgccagcgagagaggcagactgctgtacaagctggccgacctgatcgagagagacagactgctgctggccaccatggagagcatgaacggcggcaagctgtacagcaacgcctacctgaacgacctggccggctgcatcaagaccctgagatactgcgccggctgggccgacaagatccagggcagaaccatccccatcgacggcaacttcttcacctacaccagacacgagcccatcggcgtgtgcggccagatcatcccctggaacttccccctggtgatgctgatctggaagatcggccccgccctgagctgcggcaacaccgtggtggtgaagcccgccgagcagacccccctgaccgccctgcacgtggccagcctgatcaaggaggccggcttcccccccggcgtggtgaacatcgtgcccggctacggcgccagcgtggtgtag

SEQ ID NO: 14457 - DNA, 717 bp, Artificial Sequence
  derived and/or modified sequence
atgagcagcagcggcacccccgacctgcccgtgctgctgaccgacctgaagatccagtacaccaagatcttcatcaacaacgagtggcacgacagcgtgagcggcaagaagttccccgtgttcaaccccgccaccgaggaggagctgtgccaggtggaggagggcgacaaggaggacgtggacaaggccgtgaaggccgccagacaggccttccagatcggcagcccctggagaaccatggacgccagcgagagaggcagactgctgtacaagctggccgacctgatcgagagagacagactgctgctggccaccatggagagcatgaacggcggcaagctgtacagcaacgcctacctgaacgacctggccggctgcatcaagaccctgagatactgcgccggctgggccgacaagatccagggcagaaccatccccatcgacggcaacttcttcacctacaccagacacgagcccatcggcgtgtgcggccagatcatcccctggaacttccccctggtgatgctgatctggaagatcggccccgccctgagctgcggcaacaccgtggtggtgaagcccgccgagcagacccccctgaccgccctgcacgtggccagcctgatcaaggaggccggcttcccccccggcgtggtgaacatcgtgcccggctacggccccaccgccggcgccgccatcagcagccacatggactag

SEQ ID NO: 14458 - DNA, 990 bp, Artificial Sequence
  derived and/or modified sequence
atcgccgagcccgtgacctgcgtgcccggcgccgagagcgagatgagcagcagcggcacccccgacctgcccgtgctgctgaccgacctgaagatccagtacaccaagatcttcatcaacaacgagtggcacgacagcgtgagcggcaagaagttccccgtgttcaaccccgccaccgaggaggagctgtgccaggtggaggagggcgacaaggaggacgtggacaaggccgtgaaggccgccagacaggccttccagatcggcagcccctggagaaccatggacgccagcgagagaggcagactgctgtacaagctggccgacctgatcgagagagacagactgctgctggccaccatggagagcatgaacggcggcaagctgtacagcaacgcctacctgaacgacctggccggctgcatcaagaccctgagatactgcgccggctgggccgacaagatccagggcagaaccatccccatcgacggcaacttcttcacctacaccagacacgagcccatcggcgtgtgcggccagatcatcccctggaacttccccctggtgatgctgatctggaagatcggccccgccctgagctgcggcaacaccgtggtggtgaagcccgccgagcagacccccctgaccgccctgcacgtggccagcctgatcaaggaggccggcttcccccccggcgtggtgaacatcgtgcccggctacggccccaccgccggcgccgccatcagcagccacatggacatcgacaaggtggccttcaccggcagcaccgaggtgggcaagctgatcaaggaggccgccggcaagagcaacctgaagagagtgaccctggagctgggcggcaagagcccctgcatcgtgctggccgacgccgacctggacaacgccgtggagttcgcccaccacggcgtgttctaccaccagggccagtgctgcatcgccgccagcagattctgcggcagaatcaacctgtag

SEQ ID NO: 14459 - DNA, 612 bp, Artificial Sequence
  derived and/or modified sequence
atgagcagcagcggcacccccgacctgcccgtgctgctgaccgacctgaagatccagtacaccaagatcttcatcaacaacgagtggcacgacagcgtgagcggcaagaagttccccgtgttcaaccccgccaccgaggaggagctgtgccaggtggaggagggcgacaaggaggacgtggacaaggccgtgaaggccgccagacaggccttccagatcggcagcccctggagaaccatggacgccagcgagagaggcagactgctgtacaagctggccgacctgatcgagagagacagactgctgctggccaccatggagagcatgaacggcggcaagctgtacagcaacgcctacctgaacgacctggccggctgcatcaagaccctgagatactgcgccggctgggccgacaagatccagggcagaaccatccccatcgacggcaacttcttcacctacaccagacacgagcccatcggcgtgtgcggccagatcatcccctggaacttccccctggtgatgctgatctggaagatcggccccgccctgagctgcggcaacaccgtggtggtgaagcccgccgagcagacccccctgaccgccctgtag

SEQ ID NO: 14460 - protein, 517 aa, Artificial Sequence
  derived and/or modified sequence
MLRAAARFGPRLGRRLLSAAATQAVPAPNQQPEVFCNQIFINNEWHDAVSRKTFPTVNPSTGEVICQVAEGDKEDVDKAVKAARAAFQLGSPWRRMDASHRGRLLNRLADLIERDRTYLAALETLDNGKPYVISYLVDLDMVLKCLRYYAGWADKYHGKTIPIDGDFFSYTRHEPVGVCGQIIPWNFPLLMQAWKLGPALATGNVVVMKVAEQTPLTALYVANLIKEAGFPPGVVNIVPGFGPTAGAAIASHEDVDKVAFTGSTEIGRVIQVAAGSSNLKRVTLELGGKSPNIIMSDADMDWAVEQAHFALFFNQGQCCCAGSRTFVQEDIYDEFVERSVARAKSRVVGNPFDSKTEQGPQVDETQFKKILGYINTGKQEGAKLLCGGGIAADRGYFIQPTVFGDVQDGMTIAKEEIFGPVMQILKFKTIEEVVGRANNSTYGLAAAVFTKDLDKANYLSQALQAGTVWVNCYDVFGAQSPFGGYKMSGSGRELGEYGLQAYTEVKTVTVKVPQKNS

SEQ ID NO: 14461 - DNA, 1554 bp, Artificial Sequence
  derived and/or modified sequence
atgttgcgcgcagcagcccggtttggcccccgcctgggtcggcgacttctgtctgcagcagcgacccaggccgttcccgctccaaatcagcaacctgaggttttctgcaatcaaatctttatcaacaacgaatggcacgatgccgtttcaaggaagacattcccaacggtcaatccttccactggcgaggtcatttgtcaagtcgcagaaggggacaaagaagatgtggataaggctgtaaaggcagctcgtgctgcttttcagctggggtctccatggcgcagaatggacgcctcgcaccggggtcgcctgctcaaccgactcgcggacctcatagagagggaccgcacataccttgccgccctggagacactggataacggtaaaccctatgttatctcctacctcgttgacctcgacatggtcttgaaatgtctgcgttactatgcaggctgggctgacaaataccatggaaagactattcccattgacggggatttcttctcttatacccgccacgagcccgtaggggtttgtggccagatcattccctggaacttcccactgttgatgcaagcgtggaagctgggcccagcactggccaccggtaatgttgttgtcatgaaagtggctgagcaaactcctctgacagccttgtacgtggccaacctcatcaaagaagccggtttcccccccggagtcgttaacatagtcccaggttttggacctaccgccggtgccgccattgcaagccatgaggacgtcgataaggtcgcattcactggctccacggagattggacgcgtaattcaagtcgcagcgggttcctctaacctgaaacgtgtcaccttggagttgggaggcaagagtcccaacataatcatgagtgatgcagacatggactgggcagtggagcaggcccatttcgcactttttttcaaccagggtcagtgttgttgtgccggatctcggactttcgttcaggaggatatttatgatgagttcgtagagcgtagtgttgcccgcgcaaagtccagagttgtaggtaatccattcgactctaaaacagagcaaggcccacaggtcgatgaaacccagttcaagaagatactgggatacatcaataccggcaagcaggagggtgccaagcttttgtgtggcggcggaattgccgccgacagaggctattttatacagcccactgttttcggcgatgtccaggatgggatgactatcgccaaggaagagatatttggacctgtgatgcaaatcttgaaatttaaaaccatcgaggaggtggtggggagagcgaataattccacctacggactagccgcagcagtgttcacaaaggacctggacaaggcaaattacttgagccaggccttgcaggcgggcactgtgtgggtaaactgctatgacgtttttggagcccagtccccattcggtggttataagatgtctggcagcggcagagagctcggcgagtacggtctgcaggcctacaccgaggtcaagacagtgacagtaaaagttcctcaaaagaattcttag

SEQ ID NO: 14462 - DNA, 1554 bp, Artificial Sequence
  derived and/or modified sequence
atgctgcgggctgctgcccgcttcggcccccggctgggccggcggctgctgtctgctgctgccacccaggccgtgcctgcccccaaccagcagcctgaggtgttctgcaaccagatcttcatcaacaatgagtggcatgatgctgtgtccaggaagaccttccccaccgtgaaccccagcactggagaggtgatctgccaggtggccgagggggacaaggaggatgtggacaaggctgtgaaggccgcccgggccgccttccagctgggcagcccctggaggaggatggatgccagccaccggggccgcctgctgaaccggctggccgacctgattgaaagagacaggacctacctggccgccctggagaccctggacaatggcaagccctacgtgatctcctacctggtggacctggacatggtgctgaagtgcctgcgctactatgccggctgggccgacaagtaccacggcaagaccatccccattgatggagacttcttctcctacaccaggcatgagcctgtgggcgtgtgtggccagatcatcccctggaacttccccctgctgatgcaggcctggaagctgggccctgccctggccactggaaatgtggtggtgatgaaggtggccgagcagacccccctgacagccctgtatgtggccaacctgatcaaggaggccggcttccccccaggagtggtgaacatcgtgcccggcttcggccccacagctggagctgccatcgccagccatgaagatgtggacaaggtggccttcaccggcagcacagagatcggccgggtcatccaggtggccgccggcagcagcaacctgaagagggtgaccctggagctgggcggcaagagccccaacatcatcatgtctgatgctgacatggactgggccgtggagcaggcccactttgccctcttcttcaaccagggccagtgctgctgtgccggcagcaggacctttgtgcaggaggacatctatgatgaatttgtggagaggtctgtggcccgggccaagagccgggtggtgggcaacccctttgacagcaagacagagcagggcccccaggtggatgagacccagttcaagaagatcctgggctacatcaacacaggcaagcaggagggcgccaagctgctgtgtggcggcggcattgctgctgaccggggctacttcatccagcccaccgtgtttggagatgtgcaggacggcatgaccatcgccaaggaggagatcttcggccctgtgatgcagatcctgaagttcaagaccatcgaggaggtggtgggccgggccaacaacagcacctacggcctggccgctgctgtgttcaccaaggacctggacaaggccaactacctgagccaggccctgcaggccggcaccgtgtgggtgaactgctatgatgtgtttggagcccagagcccctttggaggctacaagatgagcggcagcggccgggagctgggggagtatggcctgcaggcctacacagaggtgaagacagtgacagtgaaggtgccccagaagaacagctag

SEQ ID NO: 14463 - DNA, 2018 bp, Artificial Sequence
  derived and/or modified sequence
tcagtggccctgagaccctagctctgctctcggtccgctcgctgtccgctagcccgctgcgatgttgcgcgctgccgcccgcttcgggccccgcctgggccgccgcctcttgtcagccgccgccacccaggccgtgcctgcccccaaccagcagcccgaggtcttctgcaaccagattttcataaacaatgaatggcacgatgccgtcagcaggaaaacattccccaccgtcaatccgtccactggagaggtcatctgtcaggtagctgaaggggacaaggaagatgtggacaaggcagtgaaggccgcccgggccgccttccagctgggctcaccttggcgccgcatggacgcatcacacaggggccggctgctgaaccgcctggccgatctgatcgagcgggaccggacctacctggcggccttggagaccctggacaatggcaagccctatgtcatctcctacctggtggatttggacatggtcctcaaatgtctccggtattatgccggctgggctgataagtaccacgggaaaaccatccccattgacggagacttcttcagctacacacgccatgaacctgtgggggtgtgcgggcagatcattccgtggaatttcccgctcctgatgcaagcatggaagctgggcccagccttggcaactggaaacgtggttgtgatgaaggtagctgagcagacacccctcaccgccctctatgtggccaacctgatcaaggaggctggctttccccctggtgtggtcaacattgtgcctggatttggccccacggctggggccgccattgcctcccatgaggatgtggacaaagtggcattcacaggctccactgagattggccgcgtaatccaggttgctgctgggagcagcaacctcaagagagtgaccttggagctgggggggaagagccccaacatcatcatgtcagatgccgatatggattgggccgtggaacaggcccacttcgccctgttcttcaaccagggccagtgctgctgtgccggctcccggaccttcgtgcaggaggacatctatgatgagtttgtggagcggagcgttgcccgggccaagtctcgggtggtcgggaacccctttgatagcaagaccgagcaggggccgcaggtggatgaaactcagtttaagaagatcctcggctacatcaacacggggaagcaagagggggcgaagctgctgtgtggtgggggcattgctgctgaccgtggttacttcatccagcccactgtgtttggagatgtgcaggatggcatgaccatcgccaaggaggagatcttcgggccagtgatgcagatcctgaagttcaagaccatagaggaggttgttgggagagccaacaattccacgtacgggctggccgcagctgtcttcacaaaggatttggacaaggccaattacctgtcccaggccctccaggcgggcactgtgtgggtcaactgctatgatgtgtttggagcccagtcaccctttggtggctacaagatgtcggggagtggccgggagttgggcgagtacgggctgcaggcatacactgaagtgaaaactgtcacagtcaaagtgcctcagaagaactcataagaatcatgcaagcttcctccctcagccattgatggaaagttcagcaagatcagcaacaaaaccaagaaaaatgatccttgcgtgctgaatatctgaaaagagaaatttttcctacaaaatctcttgggtcaagaaagttctagaatttgaattgataaacatggtgggttggctgagggtaagagtatatgaggaaccttttaaacgacaacaatactgctagctttcaggatgatttttaaaaaatagattcaaatgtgttatcctctctctgaaacgcttcctataactcgagtttataggggaagaaaaagctattgtttacaattatatcaccattaaggcaactgctacaccctgctttgtattctgggctaagattcattaaaaactagctgctctt

SEQ ID NO: 14464 - DNA, 1554 bp, Artificial Sequence
  derived and/or modified sequence
atgctgcgggccgccgcccggttcggcccccggctgggccggcggcttctgtccgccgcagcgacacaggccgtgcccgctccaaaccagcagcctgaggtgttttgtaaccaaatctttatcaacaacgagtggcatgatgcagtaagccggaagacttttccaaccgtgaatccgagcactggggaggtgatttgccaagtcgcagagggcgacaaggaggacgtggacaaggcagtgaaggctgccagagctgctttccagctgggctccccttggcgccgaatggatgctagtcaccgtggccggcttctcaataggctggccgacctcatagagagagatagaacttacctggccgcactggagacactcgataacgggaagccctacgtaataagctacctggtggatctggacatggtgttgaagtgcctgcgctactacgccggatgggccgataagtaccatggtaaaaccatccccatcgatggtgatttctttagctacacccgccatgagccagtgggagtatgcggacagataatcccgtggaatttcccattactcatgcaagcttggaagttaggccccgcgctggccacaggaaatgtggtggtgatgaaagttgcggagcagacaccactgaccgctctatatgtggctaacctaatcaaggaggccggattcccgcctggggtagtgaacatcgttcccggtttcggcccaaccgcaggcgcagcaatagcatcccatgaagatgtggacaaagttgcatttaccggatccaccgagataggacgagtcatacaggtggctgcagggagctcaaacctgaaacgggtgacgcttgaattaggcgggaaatcccctaacataatcatgagcgatgcggacatggattgggccgtggagcaggcacacttcgcgctgttttttaatcagggccagtgctgctgtgccgggagccgcacgtttgttcaagaagacatctacgacgagttcgtggagcggagcgtggcgagagcaaagtcccgcgtagttggcaaccctttcgacagtaagacagaacagggaccccaggtggatgaaacacaattcaagaagatcctgggatacatcaataccggtaaacaggagggggccaagctcctttgcggcggcggcatcgctgccgatcgggggtatttcattcagccaaccgtttttggtgacgtacaggacggaatgaccattgccaaagaggagattttcggaccagttatgcagattttgaagtttaagactatcgaggaggtcgtcggtcgggcgaataattctacttatgggctcgccgctgccgtgtttacaaaagatctcgacaaagccaattatctgagtcaagcattgcaggccggtacagtctgggttaattgctacgacgtgttcggcgctcagtcgcccttcggcggctataaaatgagcggatcaggacgcgagttgggcgagtacggtcttcaagcctataccgaagtgaaaacagtgacggttaaagtccctcaaaagaattcctag

SEQ ID NO: 14465 - DNA, 1554 bp, Artificial Sequence
  derived and/or modified sequence
atgctgcgggctgccgctcgttttgggcctagacttggccgtcggttattgagtgcagccgctacgcaggctgtgccagcccctaaccaacagccagaggttttctgtaaccagattttcattaacaacgaatggcacgatgccgtcagcaggaaaactttcccgactgtgaacccaagtactggcgaggtcatttgccaagtagccgagggagataaggaagatgttgacaaagccgtcaaagcggctcgggcagctttccagctcggaagcccatggagacggatggatgcctctcatcggggtcggctgttaaaccgcttggccgacctgatcgagcgggataggacctacctcgccgctctggaaaccctcgataacgggaaaccgtatgtcatatcctacctggtggacttggatatggtattaaaatgtcttaggtactatgccggatgggccgacaagtaccatgggaaaaccattcctatagatggagactttttctcatatacgaggcacgagcccgtgggcgtctgtggacagataattccttggaactttcctctgttaatgcaggcttggaagctgggcccagccctcgctactggaaatgtggtcgtgatgaaggtcgctgaacagacacccctgaccgccctgtacgtggccaacctgattaaagaagccggttttcctcctggagtggtgaatattgtgcccggatttggccctaccgctggcgctgctattgcttcccatgaggacgtggacaaagttgccttcacaggaagtaccgagattggcagagtgatacaggttgccgcagggagctctaacctaaagagggtgaccctggagcttggcggaaagtctcctaacattatcatgagtgacgcggatatggactgggcagtcgaacaggctcacttcgcacttttcttcaatcaaggacagtgctgttgtgctggctctcgcactttcgtgcaggaagatatctatgacgaattcgtagagcgttccgttgcccgtgcgaagtcacgagtggtcggcaatccgtttgacagcaagaccgaacagggtcctcaggtggatgagacacagtttaagaaaattctgggttatattaacacggggaagcaagaaggcgctaagctcctgtgcggagggggtattgctgctgatcgtggctacttcatccagccaacagtctttggtgatgttcaggatgggatgacaatagcaaaagaggagatattcggcccagttatgcagatcctgaaattcaaaactatcgaggaggtggtgggcagagcaaataactccacatacggcctggccgctgctgtgtttactaaagacctggataaagctaactatctgtctcaggccctgcaggcgggaactgtgtgggtgaactgctacgacgtattcggcgcacagtctccatttggagggtacaagatgtcaggcagtggaagggagctcggcgagtacggattacaggcctataccgaggtaaagacagtcaccgtaaaggtcccccagaaaaacagttag

SEQ ID NO: 14466 - DNA, 1554 bp, Artificial Sequence
  derived and/or modified sequence
atgctgagagccgccgccagattcggccccagactgggcagaagactgctgagcgccgccgccacccaggccgtgcccgcccccaaccagcagcccgaggtgttctgcaaccagatcttcatcaacaacgagtggcacgacgccgtgagcagaaagaccttccccaccgtgaaccccagcaccggcgaggtgatctgccaggtggccgagggcgacaaggaggacgtggacaaggccgtgaaggccgccagagccgccttccagctgggcagcccctggagaagaatggacgccagccacagaggcagactgctgaacagactggccgacctgatcgagagagacagaacctacctggccgccctggagaccctggacaacggcaagccctacgtgatcagctacctggtggacctggacatggtgctgaagtgcctgagatactacgccggctgggccgacaagtaccacggcaagaccatccccatcgacggcgacttcttcagctacaccagacacgagcccgtgggcgtgtgcggccagatcatcccctggaacttccccctgctgatgcaggcctggaagctgggccccgccctggccaccggcaacgtggtggtgatgaaggtggccgagcagacccccctgaccgccctgtacgtggccaacctgatcaaggaggccggcttcccccccggcgtggtgaacatcgtgcccggcttcggccccaccgccggcgccgccatcgccagccacgaggacgtggacaaggtggccttcaccggcagcaccgagatcggcagagtgatccaggtggccgccggcagcagcaacctgaagagagtgaccctggagctgggcggcaagagccccaacatcatcatgagcgacgccgacatggactgggccgtggagcaggcccacttcgccctgttcttcaaccagggccagtgctgctgcgccggcagcagaaccttcgtgcaggaggacatctacgacgagttcgtggagagaagcgtggccagagccaagagcagagtggtgggcaaccccttcgacagcaagaccgagcagggcccccaggtggacgagacccagttcaagaagatcctgggctacatcaacaccggcaagcaggagggcgccaagctgctgtgcggcggcggcatcgccgccgacagaggctacttcatccagcccaccgtgttcggcgacgtgcaggacggcatgaccatcgccaaggaggagatcttcggccccgtgatgcagatcctgaagttcaagaccatcgaggaggtggtgggcagagccaacaacagcacctacggcctggccgccgccgtgttcaccaaggacctggacaaggccaactacctgagccaggccctgcaggccggcaccgtgtgggtgaactgctacgacgtgttcggcgcccagagccccttcggcggctacaagatgagcggcagcggcagagagctgggcgagtacggcctgcaggcctacaccgaggtgaagaccgtgaccgtgaaggtgccccagaagaacagctag

SEQ ID NO: 14467 - protein, 453 aa, Artificial Sequence
  derived and/or modified sequence
MSKISEAVKRARAAFSSGRTRPLQFRIQQLEALQRLIQEQEQELVGALAADLHKNEWNAYYEEVVYVLEEIEYMIQKLPEWAADEPVEKTPQTQQDELYIHSEPLGVVLVIGTWNYPFNLTIQPMVGAIAAGNSVVLKPSELSENMASLLATIIPQYLDKDLYPVINGGVPETTELLKERFDHILYTGSTGVGKIIMTAAAKHLTPVTLELGGKSPCYVDKNCDLDVACRRIAWGKFMNSGQTCVAPDYILCDPSIQNQIVEKLKKSLKEFYGEDAKKSRDYGRIISARHFQRVMGLIEGQKVAYGGTGDAATRYIAPTILTDVDPQSPVMQEEIFGPVLPIVCVRSLEEAIQFINQREKPLALYMFSSNDKVIKKMIAETSSGGVAANDVIVHITLHSLPFGGVGNSGMGSYHGKKSFETFSHRRSCLVRPLMNDEGLKVRYPPSPAKMTQH

SEQ ID NO: 14468 - protein, 511 aa, Artificial Sequence
  derived and/or modified sequence
EVQRTPHPTFEYFFFLSRKLPGQELQGLNGREAGSLNTSPLGSCRSRSPSYRERLCQRRHEQDQRGREARPRRLQGRTRPLQFRIQQLEALQRLIQEQEQELVGALAADLHKNEWNAYYEEVVYVLEEIEYMIQKLPEWAADEPVEKTPQTQQDELYIHSEPLGVVLVIGTWNYPFNLTIQPMVGAIAAGNSVVLKPSELSENMASLLATIIPQYLDKDLYPVINGGVPETTELLKERFDHILYTGSTGVGKIIMTAAAKHLTPVTLELGGKSPCYVDKNCDLDVACRRIAWGKFMNSGQTCVAPDYILCDPSIQNQIVEKLKKSLKEFYGEDAKKSRDYGRIISARHFQRVMGLIEGQKVAYGGTGDAATRYIAPTILTDVDPQSPVMQEEIFGPVLPIVCVRSLEEAIQFINQREKPLALYMFSSNDKVIKKMIAETSSGGVAANDVIVHITLHSLPFGGVGNSGMGSYHGKKSFETFSHRRSCLVRPLMNDEGLKVRYPPSPAKMTQH

SEQ ID NO: 14469 - protein, 389 aa, Artificial Sequence
  derived and/or modified sequence
MSKISEAVKRARAAFSSGRTRPLQFRIQQLEALQRLIQEQEQELVGALAADLHKNEWNAYYEEVVYVLEEIEYMIQKLPEWAADEPVEKTPQTQQDELYIHSEPLGVVLVIGTWNYPFNLTIQPMVGAIAAGNSVVLKPSELSENMASLLATIIPQYLDKDLYPVINGGVPETTELLKERFDHILYTGSTGVGKIIMTAAAKHLTPVTLELGGKSPCYVDKNCDLDVACRRIAWGKFMNSGQTCVAPDYILCDPSIQNQIVEKLKKSLKEIFGPVLPIVCVRSLEEAIQFINQREKPLALYMFSSNDKVIKKMIAETSSGGVAANDVIVHITLHSLPFGGVGNSGMGSYHGKKSFETFSHRRSCLVRPLMNDEGLKVRYPPSPAKMTQH

SEQ ID NO: 14470 - protein, 230 aa, Artificial Sequence
  derived and/or modified sequence
MSKISEAVKRARAAFSSGRTRPLQFRIQQLEALQRLIQEQEQELVGALAADLHKNEWNAYYEEVVYVLEEIEYMIQKLPEWAADEPVEKTPQTQQDELYIHSEPLGVVLVIGTWNYPFNLTIQPMVGAIAAGNSVVLKPSELSENMASLLATIIPQYLDKDLYPVINGGVPETTELLKERFDHILYTGSTGVGKIIMTAAAKHLTPVTLELGGKSPCYVDKNCDLDVACR

SEQ ID NO: 14471 - protein, 372 aa, Artificial Sequence
  derived and/or modified sequence
MSKISEAVKRARAAFSSGRTRPLQFRIQQLEALQRLIQEQEQELVGALAADLHKNEWNAYYEEVVYVLEEIEYMIQKLPEWAADEPVEKTPQTQQDELYIHSEPLGVVLVIGTWNYPFNLTIQPMVGAIAAGNSVVLKPSELSENMASLLATIIPQYLDKDLYPVINGGVPETTELLKERFDHILYTGSTGVGKIIMTAAAKHLTPVTLELGGKSPCYVDKNCDLDVACRRIAWGKFMNSGQTCVAPDYILCDPSIQNQIVEKLKKSLKEFYGEDAKKSRDYGRIISARHFQRVMGLIEGQKVAYGGTGDAATRYIAPTILTDVDPQSPVMQEEIFGPVLPIVCVRSLEEAIQFINQREKPLALYMFSSNDK

SEQ ID NO: 14472 - protein, 400 aa, Artificial Sequence
  derived and/or modified sequence
MIQKLPEWAADEPVEKTPQTQQDELYIHSEPLGVVLVIGTWNYPFNLTIQPMVGAIAAGNSVVLKPSELSENMASLLATIIPQYLDKDLYPVINGGVPETTELLKERFDHILYTGSTGVGKIIMTAAAKHLTPVTLELGGKSPCYVDKNCDLDVACRRIAWGKFMNSGQTCVAPDYILCDPSIQNQIVEKLKKSLKEFYGEDAKKSRDYGRIISARHFQRVMGLIEGQKVAYGGTGDAATRYIAPTILTDVDPQSPVMQEEIFGPVLPIVCVRSLEEAIQFINQREKPLALYMFSSNDKVIKKMIAETSSGGVAANDVIVHITLHSLPFGGVGNSGMGSYHGKKSFETFSHRRSCLVRPLMNDEGLKVRYPPSPAKMTQHWLSWPWENRSCSPSPAPLLC

SEQ ID NO: 14473 - DNA, 1536 bp, Artificial Sequence
  derived and/or modified sequence
gaggtgcaacggactcctcacccgacttttgaatactttttcttcctaagtcggaagttgccaggacaggaactgcaagggctgaacgggcgggaggcaggcagtctgaatacctctccactgggctcttgccgctcccgaagtccctcctacagggaaaggctgtgtcagcggagacacgaacaggaccagagagggcgcgaggccaggcctcgccgcctccagggccgcacccgcccgttgcaatttcgtatacagcagctagaagctctgcagcgcctcatccaagaacaggaacaggagttagttggagcgctggcagccgatcttcacaaaaacgagtggaacgcttactacgaggaagtggtttacgtgctggaggaaatcgagtatatgatccagaaacttcctgaatgggccgccgacgaacctgtcgagaaaacacctcaaacgcagcaagatgaactgtacattcacagtgaaccattgggagtcgtgctcgtgataggtacctggaactatccattcaatctgactattcagcccatggttggcgctatcgcagctggcaacagcgtagtcctgaagccctccgagctttcagagaacatggcgtctttgctcgctacaattatacctcagtatctcgacaaagatctgtatccggtaatcaatggaggggtgccagaaaccactgagctgttgaaggagcgattcgatcacattctgtatacaggctccacgggagtggggaagattattatgactgcggccgcgaagcatctgacgcccgtgaccctggagttgggcggtaagagcccctgctacgtggataagaattgtgatctcgatgttgcttgtcgacggatagcgtggggcaagtttatgaactctgggcagacatgtgtcgcccctgattatatcttgtgcgacccgtccatccaaaaccaaatagtcgaaaagctgaagaagtctctcaaggagttttacggggaagatgctaaaaaatctagggattacggtcgaatcattagtgctcgacactttcagcgcgttatggggctcattgaaggccaaaaagtggcctatggcgggaccggcgatgccgccactcgatatattgctcctacgatactgaccgacgtggaccctcagagccctgtaatgcaagaggaaattttcgggcccgtcttgcctatagtctgtgtacggagtctggaagaagcaatccagtttattaatcagcgcgagaagccgttggccttgtacatgttcagtagtaacgacaaagtgattaagaaaatgattgctgagacctcgtctggtggtgtggcagctaatgacgtcatagtgcatattacccttcactctttgcctttcggcggagtgggcaactctggaatggggagctaccacggaaagaagtccttcgaaaccttttctcataggaggtcctgcttagtgaggcctctgatgaatgacgagggattgaaggtgcgctaccctccctccccagctaagatgactcagcactag

SEQ ID NO: 14474 - DNA, 1170 bp, Artificial Sequence
  derived and/or modified sequence
atgtctaaaatatccgaggctgttaagcgggccagggcagcctttagctctggtagaacacggcctcttcagttccgcattcagcagttagaagcactgcaacgtctgatacaagagcaggagcaggagcttgtgggcgccctggcggccgacctccacaaaaatgagtggaatgcctattacgaggaggtggtgtatgtgctcgaggagatcgagtatatgatacagaagctgcctgaatgggccgcagatgagcccgtagaaaagacacctcaaactcaacaagatgagctctacattcattctgaacctcttggagttgtgctagtcattggtacgtggaactatccgtttaacctcacaattcaacccatggtgggagccatagccgcaggcaattctgtggtgctgaagccatcagagctaagcgaaaacatggcatctcttctggccacaattattccacagtacctggataaggacctttatcctgtaatcaacggtggtgtgcctgaaaccactgagctgctaaaggaaagatttgatcacatcttgtacacaggatcgaccggagtggggaagatcatcatgactgctgccgccaagcacctgacccctgtgaccttggagttaggagggaagtctccatgttacgtcgacaaaaattgtgacctggacgtggcatgcaggaggatcgcgtggggcaaatttatgaactccggccagacttgcgtcgccccggactacattctgtgcgatccatccatccaaaaccagatcgttgaaaagttgaagaaaagtctcaaagaaatattcggacccgtccttcctatcgtatgtgtcaggtccctggaggaggctatacagtttatcaaccaacgtgaaaagccactggctctgtacatgttctccagtaatgacaaggtcatcaagaaaatgatagcagagacctctagtggcggggtcgccgctaatgatgtaattgtacatattaccctgcacagtttacctttcgggggagttggcaattctgggatgggttcatatcatggaaaaaaaagttttgagaccttttctcatcgtcgttcctgtctggtgagacccctaatgaatgatgagggactgaaagtgcgttatcccccaagcccagcaaagatgacccagcactag

SEQ ID NO: 14475 - DNA, 693 bp, Artificial Sequence
  derived and/or modified sequence
atgagcaagatcagtgaggccgtaaagcgagctcgtgctgcatttagcagcggccggacgcggccattgcagttcaggatccagcagctcgaagctctgcagaggttaatacaagaacaggagcaggaactcgtcggggctctggccgcggacctgcataagaacgagtggaatgcctactacgaagaggtggtgtacgtcctggaagaaattgaatacatgatccaaaagctgcccgagtgggctgccgatgaacccgttgagaagacacctcagactcaacaggacgagctgtatatacactccgagcccctgggcgtcgtgctggtgattggcacctggaactatccattcaaccttacgatccagccaatggtcggcgctatagctgccgggaattcagtcgtcctgaagccatcagagctttctgagaacatggcctctcttctggccacaatcatcccacagtatcttgacaaggatctgtaccctgtgataaatggcggtgtcccagaaaccacagagctgctgaaggagcggtttgatcacatcttgtatacaggatccacgggtgttggcaagatcattatgaccgctgccgccaaacacctgacacccgtcacactcgagcttggcggaaaaagtccttgttacgtggataaaaactgcgatctggatgtggcctgtaggtag

SEQ ID NO: 14476 - DNA, 1119 bp, Artificial Sequence
  derived and/or modified sequence
atgagtaagatctccgaagccgtgaaacgagccagggctgccttctcgagcgggagaaccaggccgctgcagtttagaatccagcagcttgaggctttgcaacggttgattcaggaacaagagcaggagctggtcggagccctggccgctgacctgcataagaacgagtggaacgcctactatgaggaggtggtgtacgtgctcgaggagattgagtacatgattcagaaattgcccgagtgggccgccgatgagccggttgaaaaaacgccccaaacacagcaggatgaactgtacattcatagtgagcctctgggggtcgttctggtgatcggcacctggaattatcctttcaatctgactatccaaccaatggttggcgccattgctgccgggaatagtgtagtacttaaaccgagtgagctcagcgagaatatggcctctctgctggcaactattattcctcaatacctggacaaagacttatatccagtgatcaatgggggggtgccagagactactgagttgctaaaagaaaggtttgatcacatcttgtacactggaagtaccggcgtgggaaaaatcattatgaccgctgcagcaaaacatctcactcctgttacgttggagttggggggcaaatctccctgttatgtggacaaaaattgtgacttagacgtggcctgcaggcgcatagcatgggggaaatttatgaacagcggacagacatgcgttgcccccgattacattctctgcgacccctccatccagaaccagatcgtcgaaaaactgaagaaatcactcaaagaattttatggtgaagacgcgaagaagagccgcgactacggcaggattataagtgcccgccacttccagagggtcatggggttgatcgaaggccaaaaagtagcttatggtggcactggcgacgccgccacacggtatatagcacctacgatccttaccgatgtagatccacaatccccggtcatgcaggaggagatcttcggccctgtgttgcccatcgtctgtgttaggtccctggaagaagctattcagttcatcaaccagcgcgaaaagcccctggctttgtatatgttcagctcaaatgataaatag

SEQ ID NO: 14477 - DNA, 1362 bp, Artificial Sequence
  derived and/or modified sequence
atgtcaaagatctctgaggctgtcaaacgagcccgcgcggcatttagtagtggtcggacgagaccattgcagtttcgaatccaacaactggaggccctccagcgcttgatacaagagcaagagcaggagctggtaggcgcactggcagcggacctgcacaagaacgagtggaatgcctattatgaggaagtggtgtacgtgttggaggagattgagtatatgatccagaaactgccagaatgggccgcagatgagcccgtagagaagaccccacaaacccagcaggatgagctatatatccattccgaaccattgggcgtcgtgttagtaatcggtacctggaattacccttttaatctgacaatccagcccatggtaggggctatcgcagctggcaatagtgtggttttgaagccttcggagttgtcagagaatatggccagcctgttggctaccattatcccacagtatctggataaagacctgtatccagttattaacgggggtgtacccgagacaaccgagctcctcaaggaacggtttgaccacattctctatacgggctccacaggggtggggaagatcatcatgactgcggccgctaaacatcttactccagtgacactagagctgggtggcaagagtccctgctacgtggacaagaattgcgatctagatgtcgcatgtaggcggatcgcctggggcaaattcatgaatagcggccagacgtgtgtggcacccgattatatcctgtgcgatcctagtatccagaatcaaatcgtagagaaattgaagaaatccctgaaggaattctacggcgaggatgcgaagaagtctcgggactacgggcgaatcatctccgccaggcactttcagcgtgtgatgggcctgatcgagggacaaaaggtggcatacgggggtacaggcgatgcagctactcggtacattgcacctaccatcctcacagacgtcgatccgcaatccccggtgatgcaagaggagattttcgggcctgtgctgcctattgtgtgtgttcgctccctcgaagaggctatccagttcatcaatcagcgcgagaagcctctggccctgtatatgttcagttctaacgacaaagtaataaaaaaaatgatcgccgagacctctagcggaggggtagccgcaaacgatgtgattgtccatataactctgcattccctcccctttgggggtgtcggaaatagcggcatgggaagctaccacgggaaaaagtcctttgaaacattttcgcacagacgcagctgtctggtgagaccactgatgaatgacgaaggtttaaaggtgagatacccaccgtctccagctaagatgactcagcattag

SEQ ID NO: 14478 - DNA, 1362 bp, Artificial Sequence
  derived and/or modified sequence
atgtccaagattagcgaggcggtgaaacgcgcccgcgcggcattcagtagcggccggactcgccctctgcagtttcgcatccagcagctcgaggccttgcaacgactcatacaagaacaagaacaagaactcgtgggagcgctggcagcagacctacataagaatgaatggaacgcttactacgaagaagtagtttatgtgcttgaggagattgagtatatgatccaaaagcttccagagtgggcggcagacgaacctgtcgagaagacccctcagactcagcaggatgagttgtacattcattccgagccattgggggtagtcctggttatcgggacatggaactacccatttaacctgacgatccagccgatggtgggtgccattgccgcgggcaactcagtcgtccttaagccctccgaactgtctgagaatatggcatccctgctggccaccattataccccagtacctggataaagatctataccctgttatcaacggcggtgtccctgaaactaccgagctgcttaaggagaggttcgatcacatcttgtatacaggatcaacgggcgtcgggaaaattattatgacggctgccgctaaacacctaacacctgttacattagagctcggaggaaagtccccatgctacgttgacaaaaactgcgacctcgacgtggcctgccgtcgaattgcttggggtaagttcatgaactccggccagacctgcgttgcccctgactacatcctttgcgatccatcgatccagaatcagatagtggagaaactaaaaaaaagtctgaaggaattttatggggaggacgccaaaaaatcccgcgactacggtcgaataatctccgcccgacactttcaacgggtcatggggctaatcgagggccagaaagtggcctatggcgggacaggtgatgccgctacacgctatatcgcccctaccatcctcacagatgttgatcctcagtcccccgtgatgcaggaggagatatttggtccagtcttgcccatagtgtgcgttcggtctttggaggaagctattcagttcataaaccagcgggaaaagccacttgccctgtacatgttcagttctaatgacaaagtcattaaaaagatgatcgcggagacttcctccgggggtgtcgcggccaacgacgtgattgtacatatcacactccactcccttcctttcggaggggtggggaactcagggatgggaagctatcacggaaagaagtcattcgagacattctcgcaccggcgcagctgtcttgtgagacctctcatgaacgatgaaggcctcaaagtacgatatccaccatcccccgcgaagatgacccagcactag

SEQ ID NO: 14479 - DNA, 1362 bp, Artificial Sequence
  derived and/or modified sequence
atgtccaaaattagcgaagctgtgaaacgtgcgcgcgcagcatttagctcaggcaggacccgccccctccaatttcggattcagcagttagaagctctccagcgactaatccaggaacaggaacaggaactggtgggcgccttggcggcagaccttcacaaaaacgaatggaacgcctactatgaagaggtggtgtatgttctggaagaaatcgagtatatgatccaaaaattgcccgaatgggccgccgatgaaccggttgagaagactcctcaaacacagcaggatgaattatatattcattccgaaccactgggtgtggtcctggttatcgggacctggaactaccccttcaacctcacgatccagccaatggttggggcgattgcagcagggaattccgtagttctgaagccctcagagctttcagagaacatggcctccttgctcgccacaattatccctcagtacttggacaaagatctgtaccccgtaattaatgggggcgtaccagagactacagagctgttgaaggagcggttcgatcatatcctgtataccggcagcacgggcgtgggaaaaattatcatgacggctgccgccaagcacttgacacctgtaacactggagcttggcggcaaatctccttgctatgtcgacaagaactgtgacctcgacgtcgcctgccgcagaattgcctgggggaaattcatgaattccggacaaacatgtgtggctcccgattatatcctgtgcgaccccagtattcagaaccagattgtggagaagctgaaaaaatccctcaaggagttctacggcgaggatgccaagaagtcccgcgactacgggcgaatcatatcagctaggcatttccagagggtgatggggttgattgaagggcagaaagttgcatatggtggcacaggggatgcggcgacccgatatatcgccccaacaattctgacagatgtcgacccgcaatccccagtaatgcaggaggaaatattcggccctgttctcccaatcgtttgcgtcagatcactggaggaagcaatccagtttataaatcaacgcgaaaagccactcgcactgtatatgttttcgtccaacgacaaggtcatcaagaagatgattgctgagacctctagcgggggagtcgccgcaaatgatgtaatagttcatatcactctgcattcactcccctttgggggtgtgggcaactcaggaatgggatcttaccacggcaaaaaatcttttgagacattctctcatcggcggagctgtctggtgcggcctttgatgaacgacgagggactcaaagttcggtatccacccagtcctgctaaaatgacccaacactag

SEQ ID NO: 14480 - DNA, 1536 bp, Artificial Sequence
  derived and/or modified sequence
gaggtgcagaggaccccccaccccacctttgagtacttcttcttcctgagcaggaagctgcccggccaggagctgcagggcctgaatggccgggaggccggcagcctgaacaccagccccctgggcagctgccgcagccgcagccccagctaccgggagcggctgtgccagaggagacatgagcaggaccagaggggccgggaggcccggccccggcggctgcagggccgcacccggcccctgcagttccgcatccagcagctggaggccctgcagaggctcatccaggagcaggagcaggagctggtgggcgccctggccgctgacctgcacaagaatgagtggaatgcctactatgaggaggtggtgtatgtgctggaggagattgagtacatgatccagaagctgcctgagtgggccgcagatgagcctgtggagaagaccccccagacccagcaggatgagctgtacatccacagcgagcccctgggcgtggtgctggtgattggcacctggaactaccccttcaacctgaccatccagcccatggtgggcgccatcgctgctggcaacagcgtggtgctgaagcccagcgagctgtctgagaacatggccagcctgctggccaccatcatcccccagtacctggacaaggacctgtaccctgtgatcaatggaggagtgcctgagaccacagagctgctgaaggagagatttgaccacatcctgtacacaggcagcactggagtgggcaagatcatcatgacagctgctgccaagcacctgacccctgtgaccctggagctgggcggcaagagcccctgctacgtggacaagaactgtgacctggatgtggcctgccgccgcatcgcctggggcaagttcatgaacagcggccagacctgtgtggccccagactacatcctgtgtgaccccagcatccagaaccagatcgtggagaagctgaagaagagcctgaaggagttctacggggaggatgccaagaagagccgggactatggccgcatcatcagcgcccggcacttccagagggtgatgggcctcatcgagggccagaaggtggcctatggaggcactggagatgctgccacccgctacatcgcccccaccatcctgacagatgtggacccccagagccctgtgatgcaggaggagatcttcggccctgtgctgcccatcgtgtgtgtgcgcagcctggaggaggccatccagttcatcaaccagcgggagaagcccctggccctgtacatgttcagcagcaatgacaaggtgatcaagaagatgattgctgagaccagcagtggaggagtggccgccaatgatgtgattgtgcacatcaccctgcacagcctgccctttggaggagtgggcaacagcggcatgggcagctaccacggcaagaagagctttgagaccttcagccacagaagaagctgcctggtgcggcccctgatgaatgatgagggcctgaaggtgcgctacccacccagccctgccaagatgacccagcactag

SEQ ID NO: 14481 - DNA, 1170 bp, Artificial Sequence
  derived and/or modified sequence
atgagcaagatcagcgaggccgtgaagagggcccgggccgccttcagcagcggccgcacccggcccctgcagttccgcatccagcagctggaggccctgcagaggctcatccaggagcaggagcaggagctggtgggcgccctggccgctgacctgcacaagaatgagtggaatgcctactatgaggaggtggtgtatgtgctggaggagattgagtacatgatccagaagctgcctgagtgggccgcagatgagcctgtggagaagaccccccagacccagcaggatgagctgtacatccacagcgagcccctgggcgtggtgctggtgattggcacctggaactaccccttcaacctgaccatccagcccatggtgggcgccatcgctgctggcaacagcgtggtgctgaagcccagcgagctgtctgagaacatggccagcctgctggccaccatcatcccccagtacctggacaaggacctgtaccctgtgatcaatggaggagtgcctgagaccacagagctgctgaaggagagatttgaccacatcctgtacacaggcagcactggagtgggcaagatcatcatgacagctgctgccaagcacctgacccctgtgaccctggagctgggcggcaagagcccctgctacgtggacaagaactgtgacctggatgtggcctgccgccgcatcgcctggggcaagttcatgaacagcggccagacctgtgtggccccagactacatcctgtgtgaccccagcatccagaaccagatcgtggagaagctgaagaagagcctgaaggagatcttcggccctgtgctgcccatcgtgtgtgtgcgcagcctggaggaggccatccagttcatcaaccagcgggagaagcccctggccctgtacatgttcagcagcaatgacaaggtgatcaagaagatgattgctgagaccagcagtggaggagtggccgccaatgatgtgattgtgcacatcaccctgcacagcctgccctttggaggagtgggcaacagcggcatgggcagctaccacggcaagaagagctttgagaccttcagccacagaagaagctgcctggtgcggcccctgatgaatgatgagggcctgaaggtgcgctacccacccagccctgccaagatgacccagcactag

SEQ ID NO: 14482 - DNA, 693 bp, Artificial Sequence
  derived and/or modified sequence
atgagcaagatcagcgaggccgtgaagagggcccgggccgccttcagcagcggccgcacccggcccctgcagttccgcatccagcagctggaggccctgcagaggctcatccaggagcaggagcaggagctggtgggcgccctggccgctgacctgcacaagaatgagtggaatgcctactatgaggaggtggtgtatgtgctggaggagattgagtacatgatccagaagctgcctgagtgggccgcagatgagcctgtggagaagaccccccagacccagcaggatgagctgtacatccacagcgagcccctgggcgtggtgctggtgattggcacctggaactaccccttcaacctgaccatccagcccatggtgggcgccatcgctgctggcaacagcgtggtgctgaagcccagcgagctgtctgagaacatggccagcctgctggccaccatcatcccccagtacctggacaaggacctgtaccctgtgatcaatggaggagtgcctgagaccacagagctgctgaaggagagatttgaccacatcctgtacacaggcagcactggagtgggcaagatcatcatgacagctgctgccaagcacctgacccctgtgaccctggagctgggcggcaagagcccctgctacgtggacaagaactgtgacctggatgtggcctgcaggtag

SEQ ID NO: 14483 - DNA, 1119 bp, Artificial Sequence
  derived and/or modified sequence
atgagcaagatcagcgaggccgtgaagagggcccgggccgccttcagcagcggccgcacccggcccctgcagttccgcatccagcagctggaggccctgcagaggctcatccaggagcaggagcaggagctggtgggcgccctggccgctgacctgcacaagaatgagtggaatgcctactatgaggaggtggtgtatgtgctggaggagattgagtacatgatccagaagctgcctgagtgggccgcagatgagcctgtggagaagaccccccagacccagcaggatgagctgtacatccacagcgagcccctgggcgtggtgctggtgattggcacctggaactaccccttcaacctgaccatccagcccatggtgggcgccatcgctgctggcaacagcgtggtgctgaagcccagcgagctgtctgagaacatggccagcctgctggccaccatcatcccccagtacctggacaaggacctgtaccctgtgatcaatggaggagtgcctgagaccacagagctgctgaaggagagatttgaccacatcctgtacacaggcagcactggagtgggcaagatcatcatgacagctgctgccaagcacctgacccctgtgaccctggagctgggcggcaagagcccctgctacgtggacaagaactgtgacctggatgtggcctgccgccgcatcgcctggggcaagttcatgaacagcggccagacctgtgtggccccagactacatcctgtgtgaccccagcatccagaaccagatcgtggagaagctgaagaagagcctgaaggagttctacggggaggatgccaagaagagccgggactatggccgcatcatcagcgcccggcacttccagagggtgatgggcctcatcgagggccagaaggtggcctatggaggcactggagatgctgccacccgctacatcgcccccaccatcctgacagatgtggacccccagagccctgtgatgcaggaggagatcttcggccctgtgctgcccatcgtgtgtgtgcgcagcctggaggaggccatccagttcatcaaccagcgggagaagcccctggccctgtacatgttcagcagcaatgacaagtag

SEQ ID NO: 14484 - DNA, 1362 bp, Artificial Sequence
  derived and/or modified sequence
atgagcaagatcagcgaggccgtgaagagggcccgggccgccttcagcagcggccgcacccggcccctgcagttccgcatccagcagctggaggccctgcagaggctcatccaggagcaggagcaggagctggtgggcgccctggccgctgacctgcacaagaatgagtggaatgcctactatgaggaggtggtgtatgtgctggaggagattgagtacatgatccagaagctgcctgagtgggccgcagatgagcctgtggagaagaccccccagacccagcaggatgagctgtacatccacagcgagcccctgggcgtggtgctggtgattggcacctggaactaccccttcaacctgaccatccagcccatggtgggcgccatcgctgctggcaacagcgtggtgctgaagcccagcgagctgtctgagaacatggccagcctgctggccaccatcatcccccagtacctggacaaggacctgtaccctgtgatcaatggaggagtgcctgagaccacagagctgctgaaggagagatttgaccacatcctgtacacaggcagcactggagtgggcaagatcatcatgacagctgctgccaagcacctgacccctgtgaccctggagctgggcggcaagagcccctgctacgtggacaagaactgtgacctggatgtggcctgccgccgcatcgcctggggcaagttcatgaacagcggccagacctgtgtggccccagactacatcctgtgtgaccccagcatccagaaccagatcgtggagaagctgaagaagagcctgaaggagttctacggggaggatgccaagaagagccgggactatggccgcatcatcagcgcccggcacttccagagggtgatgggcctcatcgagggccagaaggtggcctatggaggcactggagatgctgccacccgctacatcgcccccaccatcctgacagatgtggacccccagagccctgtgatgcaggaggagatcttcggccctgtgctgcccatcgtgtgtgtgcgcagcctggaggaggccatccagttcatcaaccagcgggagaagcccctggccctgtacatgttcagcagcaatgacaaggtgatcaagaagatgattgctgagaccagcagtggaggagtggccgccaatgatgtgattgtgcacatcaccctgcacagcctgccctttggaggagtgggcaacagcggcatgggcagctaccacggcaagaagagctttgagaccttcagccacagaagaagctgcctggtgcggcccctgatgaatgatgagggcctgaaggtgcgctacccacccagccctgccaagatgacccagcactag

SEQ ID NO: 14485 - DNA, 1779 bp, Artificial Sequence
  derived and/or modified sequence
cagaggtccagaggacgccacaccccacatttgaatatttttttttcttgtcacgcaaacttcctgggcaggaactccaagggctcaatggacgggaagcagggtccttaaatacgtcccctcttggctcttgccgttccaggagccccagttaccgggagaggctgtgtcaaaggcgccatgagcaagatcagcgaggccgtgaagcgcgcccgcgccgccttcagctcgggcaggacccgtccgctgcagttccggatccagcagctggaggcgctgcagcgcctgatccaggagcaggagcaggagctggtgggcgcgctggccgcagacctgcacaagaatgaatggaacgcctactatgaggaggtggtgtacgtcctagaggagatcgagtacatgatccagaagctccctgagtgggccgcggatgagcccgtggagaagacgccccagactcagcaggacgagctctacatccactcggagccactgggcgtggtcctcgtcattggcacctggaactaccccttcaacctcaccatccagcccatggtgggcgccatcgctgcagggaactcagtggtcctcaagccctcggagctgagtgagaacatggcgagcctgctggctaccatcatcccccagtacctggacaaggatctgtacccagtaatcaatgggggtgtccctgagaccacggagctgctcaaggagaggttcgaccatatcctgtacacgggcagcacgggggtggggaagatcatcatgacggctgctgccaagcacctgacccctgtcacgctggagctgggagggaagagtccctgctacgtggacaagaactgtgacctggacgtggcctgccgacgcatcgcctgggggaaattcatgaacagtggccagacctgcgtggcccctgactacatcctctgtgacccctcgatccagaaccaaattgtggagaagctcaagaagtcactgaaagagttctacggggaagatgctaagaaatcccgggactatggaagaatcattagtgcccggcacttccagagggtgatgggcctgattgagggccagaaggtggcttatgggggcaccggggatgccgccactcgctacatagcccccaccatcctcacggacgtggacccccagtccccggtgatgcaagaggagatcttcgggcctgtgctgcccatcgtgtgcgtgcgcagcctggaggaggccatccagttcatcaaccagcgtgagaagcccctggccctctacatgttctccagcaacgacaaggtgattaagaagatgattgcagagacatccagtggtggggtggcggccaacgatgtcatcgtccacatcaccttgcactctctgcccttcgggggcgtggggaacagcggcatgggatcctaccatggcaagaagagcttcgagactttctctcaccgccgctcttgcctggtgaggcctctgatgaatgatgaaggcctgaaggtcagataccccccgagcccggccaagatgacccagcactgaggaggggttgctccgcctggcctggccatactgtgtcccatcggagtgcggaccaccctcactggctctcctggccctgggagaatcgctcctgcagccccagcccagccccactcctctgctgacctgctgacctgtgcacaccccactcccacatgggcccaggcctcaccattccaagtctccacccctttctagaccaataaagagacgaatacaattttctaactcagcaaa

SEQ ID NO: 14486 - DNA, 1772 bp, Artificial Sequence
  derived and/or modified sequence
cagaggtccagaggacgccacaccccacatttgaatatttttttttcttgtcacgcaaacttcctgggcaggaactccaagggctcaatggacgggaagcagggtccttaaatacgtcccctcttggctcttgccgttccaggagccccagttaccgggagaggctgtgtcaaaggcgccatgagcaagatcagcgaggccgtgaagcgcgcccgcgccgccttcagggcaggacccgtccgctgcagttccggatccagcagctggaggcgctgcagcgcctgatccaggagcaggagcaggagctggtgggcgcgctggccgcagacctgcacaagaatgaatggaacgcctactatgaggaggtggtgtacgtcctagaggagatcgagtacatgatccagaagctccctgagtgggccgcggatgagcccgtggagaagacgccccagactcagcaggacgagctctacatccactcggagccactgggcgtggtcctcgtcattggcacctggaactaccccttcaacctcaccatccagcccatggtgggcgccatcgctgcagggaactcagtggtcctcaagccctcggagctgagtgagaacatggcgagcctgctggctaccatcatcccccagtacctggacaaggatctgtacccagtaatcaatgggggtgtccctgagaccacggagctgctcaaggagaggttcgaccatatcctgtacacgggcagcacgggggtggggaagatcatcatgacggctgctgccaagcacctgacccctgtcacgctggagctgggagggaagagtccctgctacgtggacaagaactgtgacctggacgtggcctgccgacgcatcgcctgggggaaattcatgaacagtggccagacctgcgtggcccctgactacatcctctgtgacccctcgatccagaaccaaattgtggagaagctcaagaagtcactgaaagagttctacggggaagatgctaagaaatcccgggactatggaagaatcattagtgcccggcacttccagagggtgatgggcctgattgagggccagaaggtggcttatgggggcaccggggatgccgccactcgctacatagcccccaccatcctcacggacgtggacccccagtccccggtgatgcaagaggagatcttcgggcctgtgctgcccatcgtgtgcgtgcgcagcctggaggaggccatccagttcatcaaccagcgtgagaagcccctggccctctacatgttctccagcaacgacaaggtgattaagaagatgattgcagagacatccagtggtggggtggcggccaacgatgtcatcgtccacatcaccttgcactctctgcccttcgggggcgtggggaacagcggcatgggatcctaccatggcaagaagagcttcgagactttctctcaccgccgctcttgcctggtgaggcctctgatgaatgatgaaggcctgaaggtcagataccccccgagcccggccaagatgacccagcactgaggaggggttgctccgcctggcctggccatactgtgtcccatcggagtgcggaccaccctcactggctctcctggccctgggagaatcgctcctgcagccccagcccagccccactcctctgctgacctgctgacctgtgcacaccccactcccacatgggcccaggcctcaccattccaagtctccacccctttctagaccaataaagagacgaatacaattttctaactcagc

SEQ ID NO: 14487 - DNA, 1495 bp, Artificial Sequence
  derived and/or modified sequence
cgggaagcagggtccttaaatacgtcccctcttggctcttgccgttccaggagccccagttaccgggagaggctgtgtcaaaggcgccatgagcaagatcagcgaggccgtgaagcgcgcccgcgccgccttcagctcgggcaggacccgtccgctgcagttccggatccagcagctggaggcgctgcagcgcctgatccaggagcaggagcaggagctggtgggcgcgctggccgcagacctgcacaagaatgaatggaacgcctactatgaggaggtggtgtacgtcctagaggagatcgagtacatgatccagaagctccctgagtgggccgcggatgagcccgtggagaagacgccccagactcagcaggacgagctctacatccactcggagccactgggcgtggtcctcgtcattggcacctggaactaccccttcaacctcaccatccagcccatggtgggcgccatcgctgcagggaactcagtggtcctcaagccctcggagctgagtgagaacatggcgagcctgctggctaccatcatcccccagtacctggacaaggatctgtacccagtaatcaatgggggtgtccctgagaccacggagctgctcaaggagaggttcgaccatatcctgtacacgggcagcacgggggtggggaagatcatcatgacggctgctgccaagcacctgacccctgtcacgctggagctgggagggaagagtccctgctacgtggacaagaactgtgacctggacgtggcctgccgacgcatcgcctgggggaaattcatgaacagtggccagacctgcgtggcccctgactacatcctctgtgacccctcgatccagaaccaaattgtggagaagctcaagaagtcactgaaagagatcttcgggcctgtgctgcccatcgtgtgcgtgcgcagcctggaggaggccatccagttcatcaaccagcgtgagaagcccctggccctctacatgttctccagcaacgacaaggtgattaagaagatgattgcagagacatccagtggtggggtggcggccaacgatgtcatcgtccacatcaccttgcactctctgcccttcgggggcgtggggaacagcggcatgggatcctaccatggcaagaagagcttcgagactttctctcaccgccgctcttgcctggtgaggcctctgatgaatgatgaaggcctgaaggtcagataccccccgagcccggccaagatgacccagcactgaggaggggttgctccgcctggcctggccatactgtgtcccatcggagtgcggaccaccctcactggctctcctggccctgggagaatcgctcctgcagccccagcccagccccactcctctgctgacctgctgacctgtgcacaccccactcccacatgggcccaggcctcaccattccaagtctccacccctttctagaccaataaagagacgaatacaattttctaactcagcaaa

SEQ ID NO: 14488 - DNA, 985 bp, Artificial Sequence
  derived and/or modified sequence
gccgggaaaggccctgccgcgagcacgctgccaagagcccccagcagcagttcggcttaggactcgggttgcggcgggtgtcaccttctcaggggctagcaaggcagccagggcccaggcgtctgagtgaggggcgggagaggaggcgaggcagaaagtggaccttccagcggaaaggccattttccccaaggccgagcccagggaagtcccttcctatagaattcaggcagggtgggaggcagggcgcgctcgtgcccctcagccagctgcaggtgctctctgtccccaggcgccatgagcaagatcagcgaggccgtgaagcgcgcccgcgccgccttcagctcgggcaggacccgtccgctgcagttccggatccagcagctggaggcgctgcagcgcctgatccaggagcaggagcaggagctggtgggcgcgctggccgcagacctgcacaagaatgaatggaacgcctactatgaggaggtggtgtacgtcctagaggagatcgagtacatgatccagaagctccctgagtgggccgcggatgagcccgtggagaagacgccccagactcagcaggacgagctctacatccactcggagccactgggcgtggtcctcgtcattggcacctggaactaccccttcaacctcaccatccagcccatggtgggcgccatcgctgcagggaactcagtggtcctcaagccctcggagctgagtgagaacatggcgagcctgctggctaccatcatcccccagtacctggacaaggatctgtacccagtaatcaatgggggtgtccctgagaccacggagctgctcaaggagaggttcgaccatatcctgtacacgggcagcacgggggtggggaagatcatcatgacggctgctgccaagcacctgacccctgtcacgctggagctgggagggaagagtccctgctacgtggacaagaactgtgacctggacgtggcctgccg

SEQ ID NO: 14489 - DNA, 1157 bp, Artificial Sequence
  derived and/or modified sequence
gttggtctgggattgtgccatcagctttgcaagcaagcgccatgagcaagatcagcgaggccgtgaagcgcgcccgcgccgccttcagctcgggcaggacccgtccgctgcagttccggatccagcagctggaggcgctgcagcgcctgatccaggagcaggagcaggagctggtgggcgcgctggccgcagacctgcacaagaatgaatggaacgcctactatgaggaggtggtgtacgtcctagaggagatcgagtacatgatccagaagctccctgagtgggccgcggatgagcccgtggagaagacgccccagactcagcaggacgagctctacatccactcggagccactgggcgtggtcctcgtcattggcacctggaactaccccttcaacctcaccatccagcccatggtgggcgccatcgctgcagggaactcagtggtcctcaagccctcggagctgagtgagaacatggcgagcctgctggctaccatcatcccccagtacctggacaaggatctgtacccagtaatcaatgggggtgtccctgagaccacggagctgctcaaggagaggttcgaccatatcctgtacacgggcagcacgggggtggggaagatcatcatgacggctgctgccaagcacctgacccctgtcacgctggagctgggagggaagagtccctgctacgtggacaagaactgtgacctggacgtggcctgccgacgcatcgcctgggggaaattcatgaacagtggccagacctgcgtggcccctgactacatcctctgtgacccctcgatccagaaccaaattgtggagaagctcaagaagtcactgaaagagttctacggggaagatgctaagaaatcccgggactatggaagaatcattagtgcccggcacttccagagggtgatgggcctgattgagggccagaaggtggcttatgggggcaccggggatgccgccactcgctacatagcccccaccatcctcacggacgtggacccccagtccccggtgatgcaagaggagatcttcgggcctgtgctgcccatcgtgtgcgtgcgcagcctggaggaggccatccagttcatcaaccagcgtgagaagcccctggccctctacatgttctccagcaacgacaag

SEQ ID NO: 14490 - DNA, 1771 bp, Artificial Sequence
  derived and/or modified sequence
gctttttagaacaatggcttagccaggagggtggtgctgggtttttctttatcggcttgggtgtggaatcgcggactgcgcccctccaatctgatctggagagtggctgactgcgtgtgcagagctctgggggtgttggtctgggattgtgccatcagctttgcaagcaagcgccatgagcaagatcagcgaggccgtgaagcgcgcccgcgccgccttcagctcgggcaggacccgtccgctgcagttccggatccagcagctggaggcgctgcagcgcctgatccaggagcaggagcaggagctggtgggcgcgctggccgcagacctgcacaagaatgaatggaacgcctactatgaggaggtggtgtacgtcctagaggagatcgagtacatgatccagaagctccctgagtgggccgcggatgagcccgtggagaagacgccccagactcagcaggacgagctctacatccactcggagccactgggcgtggtcctcgtcattggcacctggaactaccccttcaacctcaccatccagcccatggtgggcgccatcgctgcagggaactcagtggtcctcaagccctcggagctgagtgagaacatggcgagcctgctggctaccatcatcccccagtacctggacaaggatctgtacccagtaatcaatgggggtgtccctgagaccacggagctgctcaaggagaggttcgaccatatcctgtacacgggcagcacgggggtggggaagatcatcatgacggctgctgccaagcacctgacccctgtcacgctggagctgggagggaagagtccctgctacgtggacaagaactgtgacctggacgtggcctgccgacgcatcgcctgggggaaattcatgaacagtggccagacctgcgtggcccctgactacatcctctgtgacccctcgatccagaaccaaattgtggagaagctcaagaagtcactgaaagagttctacggggaagatgctaagaaatcccgggactatggaagaatcattagtgcccggcacttccagagggtgatgggcctgattgagggccagaaggtggcttatgggggcaccggggatgccgccactcgctacatagcccccaccatcctcacggacgtggacccccagtccccggtgatgcaagaggagatcttcgggcctgtgctgcccatcgtgtgcgtgcgcagcctggaggaggccatccagttcatcaaccagcgtgagaagcccctggccctctacatgttctccagcaacgacaaggtgattaagaagatgattgcagagacatccagtggtggggtggcggccaacgatgtcatcgtccacatcaccttgcactctctgcccttcgggggcgtggggaacagcggcatgggatcctaccatggcaagaagagcttcgagactttctctcaccgccgctcttgcctggtgaggcctctgatgaatgatgaaggcctgaaggtcagataccccccgagcccggccaagatgacccagcactgaggaggggttgctccgcctggcctggccatactgtgtcccatcggagtgcggaccaccctcactggctctcctggccctgggagaatcgctcctgcagccccagcccagccccactcctctgctgacctgctgacctgtgcacaccccactcccacatgggcccaggcctcaccattccaagtctccacccctttctagaccaataaagagacgaatacaattttctaactcagc

SEQ ID NO: 14491 - DNA, 1926 bp, Artificial Sequence
  derived and/or modified sequence
atcagctttgcaagcaagtaagggagcggaaaaggccgggaaaggccctgccgcgagcacgctgccaagagcccccagcagcagttcggcttaggactcgggttgcggcgggtgtcaccttctcaggggctagcaaggcagccagggcccaggcgtctgagtgaggggcgggagaggaggcgaggcagaaagtggaccttccagcggaaaggccattttccccaaggccgagcccagggaagtcccttcctatagaattcaggcagggtgggaggcagggcgcgctcgtgcccctcagccagctgcaggtgctctctgtccccaggcgccatgagcaagatcagcgaggccgtgaagcgcgcccgcgccgccttcagctcgggcaggacccgtccgctgcagttccggatccagcagctggaggcgctgcagcgcctgatccaggagcaggagcaggagctggtgggcgcgctggccgcagacctgcacaagaatgaatggaacgcctactatgaggaggtggtgtacgtcctagaggagatcgagtacatgatccagaagctccctgagtgggccgcggatgagcccgtggagaagacgccccagactcagcaggacgagctctacatccactcggagccactgggcgtggtcctcgtcattggcacctggaactaccccttcaacctcaccatccagcccatggtgggcgccatcgctgcagggaactcagtggtcctcaagccctcggagctgagtgagaacatggcgagcctgctggctaccatcatcccccagtacctggacaaggatctgtacccagtaatcaatgggggtgtccctgagaccacggagctgctcaaggagaggttcgaccatatcctgtacacgggcagcacgggggtggggaagatcatcatgacggctgctgccaagcacctgacccctgtcacgctggagctgggagggaagagtccctgctacgtggacaagaactgtgacctggacgtggcctgccgacgcatcgcctgggggaaattcatgaacagtggccagacctgcgtggcccctgactacatcctctgtgacccctcgatccagaaccaaattgtggagaagctcaagaagtcactgaaagagttctacggggaagatgctaagaaatcccgggactatggaagaatcattagtgcccggcacttccagagggtgatgggcctgattgagggccagaaggtggcttatgggggcaccggggatgccgccactcgctacatagcccccaccatcctcacggacgtggacccccagtccccggtgatgcaagaggagatcttcgggcctgtgctgcccatcgtgtgcgtgcgcagcctggaggaggccatccagttcatcaaccagcgtgagaagcccctggccctctacatgttctccagcaacgacaaggtgattaagaagatgattgcagagacatccagtggtggggtggcggccaacgatgtcatcgtccacatcaccttgcactctctgcccttcgggggcgtggggaacagcggcatgggatcctaccatggcaagaagagcttcgagactttctctcaccgccgctcttgcctggtgaggcctctgatgaatgatgaaggcctgaaggtcagataccccccgagcccggccaagatgacccagcactgaggaggggttgctccgcctggcctggccatactgtgtcccatcggagtgcggaccaccctcactggctctcctggccctgggagaatcgctcctgcagccccagcccagccccactcctctgctgacctgctgacctgtgcacaccccactcccacatgggcccaggcctcaccattccaagtctccacccctttctagaccaataaagagacgaatacaattttctaactcagc

SEQ ID NO: 14492 - DNA, 1602 bp, Artificial Sequence
  derived and/or modified sequence
cagaggtccagaggacgccacaccccacatttgaatatttttttttcttgtcacgcaaacttcctgggcaggaactccaagggctcaatggacgggaagcagggtccttaaatacgtcccctcttggctcttgccgttccaggagccccagttaccgggagaggctgtgtcaaaggcgccatgagcaagatcagcgaggccgtgaagcgcgcccgcgccgccttcagctcgggcaggacccgtccgctgcagttccggatccagcagctggaggcgctgcagcgcctgatccaggagcaggagcaggagctggtgggcgcgctggccgcagacctgcacaagaatgaatggaacgcctactatgaggaggtggtgtacgtcctagaggagatcgagtacatgatccagaagctccctgagtgggccgcggatgagcccgtggagaagacgccccagactcagcaggacgagctctacatccactcggagccactgggcgtggtcctcgtcattggcacctggaactaccccttcaacctcaccatccagcccatggtgggcgccatcgctgcagggaactcagtggtcctcaagccctcggagctgagtgagaacatggcgagcctgctggctaccatcatcccccagtacctggacaaggatctgtacccagtaatcaatgggggtgtccctgagaccacggagctgctcaaggagaggttcgaccatatcctgtacacgggcagcacgggggtggggaagatcatcatgacggctgctgccaagcacctgacccctgtcacgctggagctgggagggaagagtccctgctacgtggacaagaactgtgacctggacgtggcctgccgacgcatcgcctgggggaaattcatgaacagtggccagacctgcgtggcccctgactacatcctctgtgacccctcgatccagaaccaaattgtggagaagctcaagaagtcactgaaagagttctacggggaagatgctaagaaatcccgggactatggaagaatcattagtgcccggcacttccagagggtgatgggcctgattgagggccagaaggtggcttatgggggcaccggggatgccgccactcgctacatagcccccaccatcctcacggacgtggacccccagtccccggtgatgcaagaggagatcttcgggcctgtgctgcccatcgtgtgcgtgcgcagcctggaggaggccatccagttcatcaaccagcgtgagaagcccctggccctctacatgttctccagcaacgacaaggtgattaagaagatgattgcagagacatccagtggtggggtggcggccaacgatgtcatcgtccacatcaccttgcactctctgcccttcgggggcgtggggaacagcggcatgggatcctaccatggcaagaagagcttcgagactttctctcaccgccgctcttgcctggtgaggcctctgatgaatgatgaaggcctgaaggtcagataccccccgagcccggccaagatgacccagcactggctctcctggccctgggagaatcgctcctgcagccccagcccagccccactcctctgctga

SEQ ID NO: 14493 - DNA, 1536 bp, Artificial Sequence
  derived and/or modified sequence
gaggtgcagcggaccccccaccccaccttcgagtacttcttcttcttgtccagaaagctgcccggccaggagctgcagggtctaaacggcagggaggcaggcagcctgaatacatcacccttaggctcttgccgttccaggtcaccctcatatcgcgagcgcttatgccagagaagacacgagcaagatcaacgcgggagagaggcaagaccaagacgtctccaggggcgcacccgcccactgcaattcagaattcaacagcttgaagccctgcagaggctgatccaggaacaggagcaggagctggttggggccctggctgccgacctgcataaaaacgagtggaacgcctattacgaggaggtcgtctacgttctggaggagatcgagtatatgatccagaagctgcccgagtgggccgctgatgagccagtggaaaaaaccccccagacacagcaggatgagctgtatatccattctgagcctctcggtgttgtgttggtgatcggcacctggaactaccccttcaacctgaccattcaaccaatggtgggggccatcgccgcaggaaacagcgtagtcctgaagcccagtgaactatccgagaacatggctagcctcctagccacaataattcctcagtatctagacaaggatctctatccggtgattaacggcggagtgcctgagaccaccgagttgcttaaagaaaggtttgaccacattctctacactgggtcaaccggagttggcaagataattatgacagccgcagccaagcatctgactcccgtgaccttggagctcggtgggaaatccccttgttacgtggacaagaattgtgacctcgacgtcgcgtgtcggcgtatcgcttggggcaaattcatgaactcaggacagacttgcgttgccccagattatatcctgtgcgaccccagcattcagaaccagatcgtggagaagttgaagaaatctctgaaagaattctatggagaagacgccaagaagtccagagactacgggcgcattattagcgcccggcacttccagcgagtaatggggctcatcgagggccagaaagtagcctatgggggcacaggtgatgccgcgactcgctatatagcaccgactatcttaaccgatgtggaccctcagtcgcctgtaatgcaggaagagatcttcggcccggtgctgcctatcgtgtgtgtgagatcccttgaagaggcaattcagttcataaaccaaagagaaaaaccccttgccctgtatatgttctcaagtaatgataaggttattaaaaaaatgatagccgagactagtagtggcggagtagctgccaacgacgtgatcgtgcacatcaccctgcacagcctcccttttgggggtgtgggcaactctggcatggggagttaccatggcaaaaaatcttttgagacgttttctcaccgccgctcctgcctggtgagaccactgatgaatgatgaggggttgaaggtgcgataccccccctctcccgcaaaaatgacacagcactag

SEQ ID NO: 14494 - DNA, 1170 bp, Artificial Sequence
  derived and/or modified sequence
atgagcaagatcagcgaggccgtgaagcgggcccgggccgccttctctagtgggcgaactcgacccctgcagtttagaatacaacagctggaggccctgcaacgtctgattcaggaacaggagcaagaactggtgggcgctctcgctgctgacttacacaagaacgaatggaatgcttactacgaggaggtggtttacgtccttgaggagatcgagtacatgattcagaagctgccagagtgggccgccgatgaaccagtagagaagactccccagacccaacaggatgaactgtatatccattccgagcccctcggagtggtgctagtgatcggaacctggaactatccctttaatctaacaattcagccgatggtcggagctattgccgctggcaacagcgttgtgctgaagccttcagaacttagtgagaatatggcctcactcctggcaacgattattcctcaatatctagataaggatctctaccccgtcatcaacggcggtgttcctgagaccaccgaattactgaaggagcgctttgaccacatcttgtatactggttctaccggggtgggaaaaatcataatgacagccgctgctaagcacttaaccccagtgacactggagttagggggaaagagcccctgctatgtcgacaaaaactgcgacttggacgtggcctgtagaagaatcgcctggggtaagtttatgaattcaggacagacgtgtgtggctcctgattacattctgtgcgatccatcaattcagaaccagatagtggaaaagctgaagaagtctttaaaagaaatatttggacccgttctcccaatcgtatgcgttcgaagtctcgaagaagccattcaatttatcaatcagcgggaaaagcctctcgctctctacatgttttctagcaacgataaggtgattaaaaaaatgatcgccgagacgtcaagtggaggggtcgcggccaacgacgtaattgtgcacataactttacactccttgcccttcggcggggtggggaactccgggatggggagctaccatgggaagaaatctttcgagactttctctcatagacggtcatgtttggttcgtccacttatgaatgacgaagggctgaaagtgcggtaccccccgagtccggccaagatgactcagcattag

SEQ ID NO: 14495 - DNA, 693 bp, Artificial Sequence
  derived and/or modified sequence
atgagcaagatcagcgaggccgtgaagcgggcccgggccgccttcagcagcgggaggacgcggcctcttcaatttcggatccagcaactggaggcacttcagcggctgatacaggagcaggagcaggagttggtcggagcgttggctgctgatctgcacaaaaacgagtggaacgcctactacgaggaggtggtgtacgttctggaggagattgaatacatgatacaaaaactgcctgaatgggctgccgatgagccagtcgagaagacaccacagactcagcaggacgaactgtatatccattcagagcccctgggagtagtgctcgtcataggtacttggaattatccgttcaatctgacgattcaaccaatggtaggcgccattgccgctggcaattcggtggtgttgaaacccagcgagctctctgaaaacatggcaagcctgctggcaaccattattccccagtaccttgacaaggacctctacccggttattaatggcggtgtaccggaaaccacggaactgctgaaggagaggtttgatcatatcctgtatacagggagtacaggtgtaggaaaaataattatgacagccgctgccaagcacctgacccccgtgactctggaactgggcggaaagagcccgtgttatgtcgataagaattgcgacttggacgttgcctgtcgttag

SEQ ID NO: 14496 - DNA, 1119 bp, Artificial Sequence
  derived and/or modified sequence
atgagcaagatcagcgaggccgtgaagcgggcccgggccgccttcagcagtgggaggacgaggcccctgcagtttcgcattcagcaattggaggccctgcagcgcctgatccaagaacaggaacaggagctggtgggtgctctcgctgctgacctgcacaaaaatgaatggaatgcatactacgaggaggtggtgtacgtgctggaggagattgagtacatgatccaaaagttgccagagtgggccgcagatgaacccgtggagaaaaccccccagacccagcaggacgagctttatatccacagcgagcccttaggtgttgtcctggtgattggcacatggaactatccatttaatcttacaatccagcctatggtgggtgcaattgctgctggcaatagcgttgtcctgaaaccctctgagctttctgaaaatatggcttccctactcgctactataatcccacagtatttggacaaggacctttacccggtgatcaatggcggtgtgcctgagactactgagctactaaaagagcgcttcgatcacattctctacacaggcagtactggagttgggaagatcataatgactgcggcagccaagcacctgacccctgtgacccttgagctgggggggaaatctccttgctatgtggataagaattgcgatcttgatgtggcatgtaggaggatcgcttgggggaagttcatgaattccggacaaacttgtgtggcccctgactacattctctgcgatccaagcatacagaaccaaattgtggagaaattaaagaaatcgttgaaggagttctatggggaggacgccaaaaaatcccgagactatgggcggattatcagcgccagacactttcagcgggtgatggggttgatcgagggacagaaagtggcctacggtggcaccggtgacgccgccaccagatacatcgcccccaccattctaaccgacgtggacccccagagcccagtgatgcaggaagagattttcggaccagtcctgcccatcgtgtgcgttcggtccctggaagaagccatccagttcattaaccagagagagaaaccactggcgctttacatgtttagcagcaacgataaatag

SEQ ID NO: 14497 - DNA, 1362 bp, Artificial Sequence
  derived and/or modified sequence
atgagcaagatcagcgaggccgtgaagcgggcccgggccgccttctcatccggccgtacgagacctttacagttccgcatacagcagctggaggcgctgcagaggctaatccaggagcaagagcaggagcttgtcggtgctctcgcggcagacctgcataagaacgagtggaacgcctattacgaggaagtggtgtatgtgttggaagaaatagaatatatgatccagaagctgccagaatgggctgcagatgagccggttgagaagactccacaaactcagcaggacgagctgtatatacatagtgagccactgggggtcgtgctcgtaattggcacctggaattatccctttaacctcacaatacaacccatggtaggggcaatcgccgccgggaactcggttgtcttaaaaccctctgagttgtcagagaatatggccagcctgctcgcaactattataccgcagtatttagataaggatctgtatcccgtcatcaatgggggagtgccagaaaccacagagttgctgaaggaaaggtttgaccacattctatatacaggcagtacgggcgtaggcaaaatcataatgacagcggcagctaaacaccttacacccgtgacccttgagttggggggcaagtctccatgttacgtcgacaaaaattgcgacctggacgtcgcttgccgtagaatcgcttggggtaagtttatgaattctggacaaacttgtgtggctcccgattatatcttgtgcgacccttcgatccaaaatcagattgtggagaaattgaaaaagtccctgaaggaattctacggcgaggacgcaaaaaagtcccgagactatggaagaataatctctgcccggcactttcagagggtgatgggcctgatcgaaggtcagaaggtggcctatggcggcaccggggatgctgccacacgctacatcgctccaacaatcctgactgatgtcgacccccaatctccagtgatgcaggaggagatcttcggccctgtgctacccattgtgtgcgtacggagcttagaggaggccatccagttcatcaatcagcgcgagaaacccctagcgctatacatgttctctagcaacgataaagtgatcaaaaaaatgattgccgaaacaagttccggcggcgttgccgccaacgacgtaatagtgcatatcaccctgcactcattaccgttcgggggagttggcaattctggaatggggagttatcacggcaaaaaatccttcgagacgttcagccatcggcgctcctgcttagttcgtccactgatgaatgacgagggactcaaagtgaggtatcctccatcgcccgcaaagatgacccagcattag

SEQ ID NO: 14498 - DNA, 1362 bp, Artificial Sequence
  derived and/or modified sequence
atgagcaagatcagcgaggccgtgaagcgggcccgggccgccttctcttctgggagaacccgcccactgcaatttcggatccagcaactggaagccctacagcggctgatccaggaacaggaacaggagctagttggcgcgctggccgcggacctccataagaatgaatggaatgcttattatgaagaggttgtctacgtccttgaggagatagaatacatgatacagaagttacccgagtgggccgctgatgaacccgtggaaaaaacgcctcagactcagcaagatgagctatatattcacagtgaacccttgggtgtggtacttgtaatcggaacctggaactatcccttcaatctaacaattcagccaatggtcggcgccattgcagccgggaatagcgttgtgctgaagccttctgaactgagcgaaaatatggcctcacttttagcaacaatcatcccgcagtatctggacaaagacttatatcccgtcattaatggaggtgtccccgaaaccacagagctgctgaaagagagatttgatcacattctttacacagggtctacaggcgtgggcaagatcatcatgacagcagcagcgaagcatctaacccctgtgacactcgagttgggggggaaaagtccttgctacgttgacaagaattgtgatttggatgttgcttgccgcaggatagcctggggaaaattcatgaactccggccagacgtgtgtcgcaccggattatatcctttgcgacccttctattcagaaccagatcgtggagaagcttaaaaagtctctcaaggaattttatggggaggatgcaaaaaagtcccgggactatggccggattatttctgcccgccatttccagagggtgatgggtctgattgagggacagaaggtggcatacggtgggactggggacgctgctacgcgctatattgccccgaccattctcacagacgtggatccccagtctcccgtgatgcaggaagagatatttgggccagtgctccccattgtctgtgtgcggtcactggaggaggcaattcagttcatcaatcagagggaaaagcccttagcactgtacatgttctccagtaatgacaaagtgatcaagaagatgatcgctgagacctcctcaggaggtgtcgcggctaacgacgtaatcgtacatattacacttcactccctgccctttggcggtgtcgggaactcaggcatgggaagctatcacgggaagaagtcctttgagacattttcccacaggcgctcctgcttagtcaggcccctgatgaatgatgaaggtctgaaagtccggtacccaccctcgccagccaagatgacacagcattag

SEQ ID NO: 14499 - DNA, 1362 bp, Artificial Sequence
  derived and/or modified sequence
atgagcaagatcagcgaggccgtgaagcgggcccgggccgccttctcctcaggccgcacacgcccactgcaatttcgcattcagcagctggaagccctccagcgcctgatccaagaacaagagcaagagctagtgggggcactcgccgccgatttgcacaaaaacgagtggaatgcctactatgaggaagtcgtatatgtccttgaagagattgagtatatgattcagaaactgcctgagtgggccgccgacgagcctgtcgagaagactccgcagacccagcaggacgagttgtacattcacagtgaaccactgggggtggtacttgtgatcggaacctggaattacccattcaatcttacaatccagccaatggtgggagccatcgctgcaggaaattcggttgtgctgaaaccgtcagagctgagtgaaaatatggcaagcttgctcgcaacaatcattcctcagtacttggacaaagatctatacccagtgattaatggtggcgtgcccgagaccacagagctcttaaaagagcggtttgatcacatactttatacaggctcgaccggcgtcggaaagataatcatgacggctgctgctaaacatttaacccccgtgactctcgaacttggcggtaaaagcccttgctacgtcgataaaaattgcgacctcgacgtggcctgtaggcgtattgcctgggggaaattcatgaactctggccaaacctgtgtcgctccggactacatcttatgtgacccttccatccagaaccagatcgtcgagaagctgaagaaatcactgaaggagttctacggcgaggatgctaagaaatccagagattacggtcgtataatctctgcacggcatttccagcgtgtgatggggctcattgagggtcagaaggttgcatacggtgggaccggtgatgccgctacaaggtatatcgcccctaccattctgactgatgtggacccacagagcccagtaatgcaggaggagatttttggcccggtcctccctatagtatgcgtccgctcgctggaggaagctatccagttcatcaaccagcgcgagaagcccctggctctgtatatgttcagctctaatgataaagtcatcaaaaagatgatagctgaaacaagctccgggggtgttgcagctaacgacgttatagtgcacattacgctgcatagcctcccgttcgggggggttggcaattctggtatgggctcgtatcacgggaaaaaaagttttgagacctttagtcatcgcaggtcctgtttggtccggccccttatgaatgacgaaggccttaaagtacggtatcccccgagtccggctaaaatgactcagcattag

SEQ ID NO: 14500 - DNA, 1536 bp, Artificial Sequence
  derived and/or modified sequence
gaggttcagcggacccctcaccctacttttgaatacttcttctttctgtcacggaagttacctggtcaggagctgcaagggctgaacggtcgcgaagctggaagcctgaacacgtcccccctcggcagttgtcgaagtcgttcaccaagctatcgcgagcgactgtgtcaaaggcgccatgagcaggaccagaggggtagggaggcacgccctagaaggctgcagggtaggactcgtcctctgcagttcaggatccagcagcttgaagcactgcagagactgatccaggaacaggagcaggaactggtcggagctctggccgctgacctgcacaagaacgagtggaacgcctattacgaagaggtggtgtacgtgcttgaggaaatagaatacatgattcaaaaactccccgagtgggcagcggacgagcctgtagagaagacacctcaaacacagcaggacgagctttatatccatagtgagcccctgggcgtggtgctggtgattgggacctggaactacccattcaatctcaccattcaaccaatggtcggcgctatcgccgctggaaatagcgtcgttctcaagccttccgagctgtcagagaatatggcatccctgctggcaaccattataccacagtatctcgacaaggatctgtatccagttataaatggcggagtcccagagaccactgagctgctaaaggaacgcttcgaccacattctgtatacaggtagcaccggggtggggaagatcataatgacagctgccgctaagcacctgacacctgtaacattggagttgggcggaaagtctccttgttatgtagacaaaaattgtgatctcgatgtggcctgccggagaatcgcttgggggaagttcatgaacagtggacagacttgcgtggctcccgactatatactgtgcgaccctagtatccagaaccagattgtggagaaacttaaaaagtctcttaaagagttttacggtgaggacgccaagaagtccagggattatggtcgcatcattagtgccagacattttcagcgagtgatgggcctcatagagggccagaaggtagcttatggaggaactggcgacgccgcaacgcgatatattgctcctaccatcctgaccgacgtggatccccagtctcctgtcatgcaagaggagatctttggcccagtcctgcctattgtttgtgtgcgaagtctggaggaggcgatccagttcatcaatcaacgggagaaacccctagctctgtatatgttcagctctaatgacaaggttattaaaaaaatgatcgcagaaacgtccagcggtggcgttgccgcaaatgatgttatagtgcacataaccttacatagcctgccgtttggaggcgttgggaattcaggaatgggatcctatcacgggaaaaagtccttcgaaacattcagccacagaagaagctgtctagtcagacctctcatgaacgatgagggcttaaaggtgagataccccccttcacccgcaaagatgactcagcactag

SEQ ID NO: 14501 - DNA, 1170 bp, Artificial Sequence
  derived and/or modified sequence
atgtcaaaaattagcgaagccgtgaagagggccagagccgctttcagttctggccgtactcgacctctacagtttaggatccagcagctagaggccttacagaggttgatccaagagcaggagcaggaattagtcggtgctctggccgctgatttgcataagaatgagtggaatgcctattatgaggaggtcgtctacgtgctggaagagatcgagtatatgatccagaagctccccgaatgggcagcagacgaaccagttgaaaagaccccgcagacccaacaagatgaactctatattcactctgaacccctgggggtcgtgctcgtcatcggcacctggaattacccattcaacctcacaatccagcctatggtcggggctattgcggctggcaacagtgtggtgctcaagcccagcgagttgagcgagaatatggcttccctattagcaaccattataccccagtacctcgacaaagatctgtatcccgtaattaacggaggagtaccagagactacggagctgttaaaagagcgcttcgatcatatcttgtataccggcagcactggggtagggaagatcattatgaccgctgcagccaagcacctcacccctgttactctcgagttgggaggcaagagcccctgttatgtcgataagaactgcgatctggatgttgcgtgcagacggatagcttggggaaagttcatgaattctggacagacctgtgtcgctccagattatatcttgtgtgaccctagcattcaaaatcagatcgtggagaagcttaagaagtctttaaaagagatatttggtccggtcttacctatcgtgtgtgtccgctccctggaagaggcgatccagttcattaatcagcgggagaaacccctggccctgtatatgttctcatcaaatgacaaggtgatcaaaaagatgattgccgaaacaagctcaggcggagtcgccgcaaacgacgtgatagtacacattacactgcattccctgcccttcgggggtgtgggcaattctggcatggggtcctaccacggcaagaagagtttcgaaactttcagccaccggaggtcttgcctggtaagaccattaatgaacgacgagggacttaaagttagataccctcctagcccggcaaaaatgacacagcactag

SEQ ID NO: 14502 - DNA, 693 bp, Artificial Sequence
  derived and/or modified sequence
atgtcaaagatctcggaggctgttaaaagggctagagcggctttctcttcagggcgaacaagaccactgcaatttaggattcagcaattggaggcgctgcagcgcttgatccaggagcaggagcaagaattggtgggagctctggccgcagatctgcataaaaatgagtggaatgcctactatgaggaggtggtctatgtgctcgaagaaatcgagtacatgatacagaagcttccagaatgggctgcagatgagccagtggagaagacccctcaaacccagcaggatgaactctacattcacagtgagccacttggcgtcgtgcttgtgatcggaacttggaattaccctttcaacctcaccatccaacccatggtgggagcaattgctgcaggaaactctgtggttctgaaaccctccgagctttctgaaaatatggccagcctgcttgcaaccataatcccacaatatttagataaggacctatacccagttatcaatggcggagttccggaaacaaccgagctgctaaaggaacgctttgaccatatattatacacgggttcgaccggtgttggcaaaattatcatgacagccgctgccaaacacctaacaccagtaaccctcgaactgggagggaaaagcccctgttatgttgacaaaaactgcgacctcgacgttgcgtgcaggtag

SEQ ID NO: 14503 - DNA, 1119 bp, Artificial Sequence
  derived and/or modified sequence
atgtcgaaaatctcagaggccgtgaagagagccagagctgctttttcctccggtcggacacgcccactgcagttcaggattcagcaattggaggctttacagcgcctgattcaagaacaagagcaagagttggtgggagctcttgcagctgacctccacaaaaatgagtggaatgcgtactatgaagaagttgtgtatgtcctggaagagattgaatacatgatccagaaactccccgaatgggccgcagatgagcccgtggagaaaacgccccagacccagcaagatgagctgtatatacactctgaacctctgggcgtggtgcttgtaattggaacttggaattacccatttaacctcactattcaaccaatggtgggagcgatagccgctggaaactccgtagtgttaaaacctagcgagctgagcgaaaacatggcgagtctgctcgctacaattattccccagtatctagacaaggatctgtaccccgttatcaatggtggagtacctgagaccaccgaactgctgaaggagcggttcgatcatattctctacacaggatcaacaggcgtgggaaaaattataatgaccgccgcagccaagcatctgaccccagtgacactggagcttggaggcaaatctccatgttacgtggataaaaactgcgatctggacgttgcttgccgcagaatcgcatgggggaaattcatgaactcaggacagacatgtgtggcccctgattatatattatgcgaccctagcattcagaaccagattgtggagaagctgaagaagtctctgaaagagttttacggggaggatgcaaagaagagccgtgactatgggaggataatctccgccagacacttccagcgcgtcatgggactgattgaaggtcagaaagtggcgtacggcggaacaggcgatgccgcaactagatatatcgctccaactatattgacagacgttgacccgcagtctcccgtaatgcaagaggaaatctttggtcccgtcctgcccatcgtgtgcgtgagaagcttagaagaggcaatacagttcataaaccagagagagaaacccctggcactttacatgttctctagcaatgacaagtag

SEQ ID NO: 14504 - DNA, 1362 bp, Artificial Sequence
  derived and/or modified sequence
atgtcaaagatctccgaggcggtgaagcgtgctagagccgctttctctagcgggaggacaagaccccttcagtttcgaattcagcagctggaagctcttcagcgtctgattcaagaacaggaacaggaacttgtcggagcgctcgctgccgatttacataaaaatgaatggaatgcctattacgaggaagtggtctatgttctggaagagattgagtacatgatacagaagctccctgagtgggctgcagatgagccggtcgagaagacccctcagacccagcaggacgaactgtacatccacagtgagccccttggagttgttctggtgatcggcacctggaattatccattcaatctgactatccagcctatggtgggtgcaatcgcggcaggcaactccgttgtactcaaaccatcagaacttagtgaaaatatggctagcttgctcgcaacgatcatcccccaatacctcgacaaggatctctatccggtcattaacgggggagtgcctgagaccaccgagctcttaaaagaaagattcgaccacattctctacactgggagtacaggagtaggaaaaattatcatgactgctgccgctaagcatttgactcccgtgaccctagagctcggcggtaagtccccctgctatgtggacaagaactgcgacctggatgtggcctgcagacgcatcgcctgggggaagttcatgaatagtggacagacttgtgtggctccagattatatattgtgcgatccctcaattcagaatcagatcgtcgagaagctaaaaaaatcattgaaggagttctacggggaggatgctaaaaagtcgcgggactatgggaggattatctcagcacggcatttccagcgcgtgatgggtctgatcgaaggccagaaggtcgcctatggagggacaggcgatgccgctacacgctatatcgctccaactatcctgactgatgtggatccacagagcccagtcatgcaggaagaaatctttggcccagttctccctatcgtgtgtgtgagatcacttgaggaggccattcagtttattaaccagagggagaagccactcgccctttatatgttcagttctaatgataaggtgatcaagaagatgatcgcggaaacgagctccggcggagttgcggcaaacgatgttatcgttcacatcacactgcactcgctgccttttggcggagttgggaattccggcatgggttcttatcatggcaagaaatcttttgaaacattcagccatagacgctcttgtctggtacgccctctgatgaacgatgagggcctgaaggtccgctacccaccaagcccagccaagatgactcagcactag

SEQ ID NO: 14505 - DNA, 1362 bp, Artificial Sequence
  derived and/or modified sequence
atgagtaagataagcgaggccgtgaagagagctagagcagccttcagtagtgggaggactaggcctctgcaattccgcatacagcagttagaagccctccagcggttgattcaggaacaggagcaggaactggtgggcgcacttgctgctgatctgcacaagaacgagtggaacgcatattacgaggaagtcgtctatgtgctagaggagatcgaatatatgatccagaagctacccgagtgggcagctgacgagcccgtagagaagaccccccaaactcaacaggacgaactgtacatccattctgagcccttaggagtagttctcgtcattggcacgtggaattatcctttcaacctgactattcagccaatggtgggggcaatagccgctgggaactccgttgtgctgaagccctccgagctgagcgaaaacatggccagcctgctagcgaccattatcccacaatacctcgacaaggacctttatccggtaatcaacggcggagtccccgaaaccacagagctgctgaaggaaagatttgatcacattctgtataccggttcgaccggggttggaaaaatcatcatgactgccgctgccaagcatctgaccccggtcaccttggaactcgggggtaaatctccctgctatgttgacaaaaactgcgatcttgatgtagcctgccgcaggatcgcatggggaaagttcatgaactcaggccagacttgcgtcgccccagattatatcctgtgtgacccaagcatccagaaccaaattgtcgagaaactgaaaaagagtctgaaggaattctacggagaagacgccaaaaagtcccgtgattacggaagaatcatctctgcaagacactttcagagggtgatgggactgattgagggccaaaaggttgcatatggagggactggcgacgccgcaacccggtacattgcacctaccatcctgacagacgtggatccccagagcccagtaatgcaggaagaaatctttggcccagtgttgccaatagtctgcgtgaggagcctggaagaggcgattcagttcataaaccagagggagaagcccctggccctttacatgttctctagcaatgataaagtaatcaaaaaaatgattgctgaaactagctctgggggagtcgccgctaatgatgttatagtgcacattaccctccattccttaccttttggtggcgtgggaaactcaggcatggggagttatcacggtaaaaaatctttcgaaaccttctcacatcggagatcctgccttgtgaggcctctcatgaacgatgaaggtcttaaggttcgctacccaccttcgcctgccaagatgactcaacactag

SEQ ID NO: 14506 - DNA, 1362 bp, Artificial Sequence
  derived and/or modified sequence
atgtctaagattagcgaggcagtcaagagggcacgcgctgctttcagctctggaaggacacgcccactacagtttaggatccagcagctggaagcgctccagcggctgattcaggagcaagagcaggagttagtcggtgctctggccgctgatttgcataagaatgaatggaacgcttattacgaggaagttgtctacgtgctcgaggagatcgagtacatgatccagaagctccccgaatgggccgctgatgaacccgtggagaagaccccccagacccaacaggatgagctctacattcactcagaacctctcggcgtcgtcctggtgatcggcacttggaattatcccttcaacctcaccatccagcctatggtgggcgcaattgcagcaggaaatagcgtggtgctcaagccaagtgagttatcagaaaatatggcctccctcctggcgactataatcccccagtacctcgacaaagacctgtaccctgtcatcaatggcggtgtcccagagacaaccgagctcctcaaggagcggtttgatcatatcctgtacacgggttccacaggcgtgggaaaaattatcatgacagcggctgccaagcacctcacccccgtgactcttgagcttggcggtaaaagcccttgttacgttgacaaaaactgcgatttggacgtggcatgcagacgcatcgcgtgggggaaattcatgaacagtgggcaaacttgcgtcgccccagattacattctctgtgatccttccatccagaatcagatcgtggaaaaattaaagaaatcactgaaagagttttatggggaggacgcgaaaaaatcacgggactatgggcgaatcatttctgctcgtcacttccaacgggtgatgggtctgatagaggggcagaaagtggcatatgggggaaccggggatgccgctacacggtatatagctccaacaatcctcacagacgtggatccacagtcacctgtgatgcaggaagaaattttcggccctgtgctgccgatcgtatgcgtgcgcagccttgaagaagctatccagttcatcaatcagcgggagaaaccactcgctctctatatgttctcaagtaacgataaggtaatcaaaaagatgatagcggagaccagcagtggtggggtcgccgctaacgatgtgattgtgcacattacactgcacagcctgccattcggcggagtgggcaattccgggatgggctcctatcacggtaagaaatccttcgaaacgttttcacaccggcgatcttgtttagtgagaccacttatgaatgacgagggtctgaaagttagatatccgcctagcccagcaaaaatgacccagcattag

SEQ ID NO: 14507 - DNA, 1536 bp, Artificial Sequence
  derived and/or modified sequence
gaggtgcagagaaccccccaccccaccttcgagtacttcttcttcctgagcagaaagctgcccggccaggagctgcagggcctgaacggcagagaggccggcagcctgaacaccagccccctgggcagctgcagaagcagaagccccagctacagagagagactgtgccagagaagacacgagcaggaccagagaggcagagaggccagacccagaagactgcagggcagaaccagacccctgcagttcagaatccagcagctggaggccctgcagagactgatccaggagcaggagcaggagctggtgggcgccctggccgccgacctgcacaagaacgagtggaacgcctactacgaggaggtggtgtacgtgctggaggagatcgagtacatgatccagaagctgcccgagtgggccgccgacgagcccgtggagaagaccccccagacccagcaggacgagctgtacatccacagcgagcccctgggcgtggtgctggtgatcggcacctggaactaccccttcaacctgaccatccagcccatggtgggcgccatcgccgccggcaacagcgtggtgctgaagcccagcgagctgagcgagaacatggccagcctgctggccaccatcatcccccagtacctggacaaggacctgtaccccgtgatcaacggcggcgtgcccgagaccaccgagctgctgaaggagagattcgaccacatcctgtacaccggcagcaccggcgtgggcaagatcatcatgaccgccgccgccaagcacctgacccccgtgaccctggagctgggcggcaagagcccctgctacgtggacaagaactgcgacctggacgtggcctgcagaagaatcgcctggggcaagttcatgaacagcggccagacctgcgtggcccccgactacatcctgtgcgaccccagcatccagaaccagatcgtggagaagctgaagaagagcctgaaggagttctacggcgaggacgccaagaagagcagagactacggcagaatcatcagcgccagacacttccagagagtgatgggcctgatcgagggccagaaggtggcctacggcggcaccggcgacgccgccaccagatacatcgcccccaccatcctgaccgacgtggacccccagagccccgtgatgcaggaggagatcttcggccccgtgctgcccatcgtgtgcgtgagaagcctggaggaggccatccagttcatcaaccagagagagaagcccctggccctgtacatgttcagcagcaacgacaaggtgatcaagaagatgatcgccgagaccagcagcggcggcgtggccgccaacgacgtgatcgtgcacatcaccctgcacagcctgcccttcggcggcgtgggcaacagcggcatgggcagctaccacggcaagaagagcttcgagaccttcagccacagaagaagctgcctggtgagacccctgatgaacgacgagggcctgaaggtgagatacccccccagccccgccaagatgacccagcactag

SEQ ID NO: 14508 - DNA, 1170 bp, Artificial Sequence
  derived and/or modified sequence
atgagcaagatcagcgaggccgtgaagagagccagagccgccttcagcagcggcagaaccagacccctgcagttcagaatccagcagctggaggccctgcagagactgatccaggagcaggagcaggagctggtgggcgccctggccgccgacctgcacaagaacgagtggaacgcctactacgaggaggtggtgtacgtgctggaggagatcgagtacatgatccagaagctgcccgagtgggccgccgacgagcccgtggagaagaccccccagacccagcaggacgagctgtacatccacagcgagcccctgggcgtggtgctggtgatcggcacctggaactaccccttcaacctgaccatccagcccatggtgggcgccatcgccgccggcaacagcgtggtgctgaagcccagcgagctgagcgagaacatggccagcctgctggccaccatcatcccccagtacctggacaaggacctgtaccccgtgatcaacggcggcgtgcccgagaccaccgagctgctgaaggagagattcgaccacatcctgtacaccggcagcaccggcgtgggcaagatcatcatgaccgccgccgccaagcacctgacccccgtgaccctggagctgggcggcaagagcccctgctacgtggacaagaactgcgacctggacgtggcctgcagaagaatcgcctggggcaagttcatgaacagcggccagacctgcgtggcccccgactacatcctgtgcgaccccagcatccagaaccagatcgtggagaagctgaagaagagcctgaaggagatcttcggccccgtgctgcccatcgtgtgcgtgagaagcctggaggaggccatccagttcatcaaccagagagagaagcccctggccctgtacatgttcagcagcaacgacaaggtgatcaagaagatgatcgccgagaccagcagcggcggcgtggccgccaacgacgtgatcgtgcacatcaccctgcacagcctgcccttcggcggcgtgggcaacagcggcatgggcagctaccacggcaagaagagcttcgagaccttcagccacagaagaagctgcctggtgagacccctgatgaacgacgagggcctgaaggtgagatacccccccagccccgccaagatgacccagcactag

SEQ ID NO: 14509 - DNA, 693 bp, Artificial Sequence
  derived and/or modified sequence
atgagcaagatcagcgaggccgtgaagagagccagagccgccttcagcagcggcagaaccagacccctgcagttcagaatccagcagctggaggccctgcagagactgatccaggagcaggagcaggagctggtgggcgccctggccgccgacctgcacaagaacgagtggaacgcctactacgaggaggtggtgtacgtgctggaggagatcgagtacatgatccagaagctgcccgagtgggccgccgacgagcccgtggagaagaccccccagacccagcaggacgagctgtacatccacagcgagcccctgggcgtggtgctggtgatcggcacctggaactaccccttcaacctgaccatccagcccatggtgggcgccatcgccgccggcaacagcgtggtgctgaagcccagcgagctgagcgagaacatggccagcctgctggccaccatcatcccccagtacctggacaaggacctgtaccccgtgatcaacggcggcgtgcccgagaccaccgagctgctgaaggagagattcgaccacatcctgtacaccggcagcaccggcgtgggcaagatcatcatgaccgccgccgccaagcacctgacccccgtgaccctggagctgggcggcaagagcccctgctacgtggacaagaactgcgacctggacgtggcctgcagatag

SEQ ID NO: 14510 - DNA, 1119 bp, Artificial Sequence
  derived and/or modified sequence
atgagcaagatcagcgaggccgtgaagagagccagagccgccttcagcagcggcagaaccagacccctgcagttcagaatccagcagctggaggccctgcagagactgatccaggagcaggagcaggagctggtgggcgccctggccgccgacctgcacaagaacgagtggaacgcctactacgaggaggtggtgtacgtgctggaggagatcgagtacatgatccagaagctgcccgagtgggccgccgacgagcccgtggagaagaccccccagacccagcaggacgagctgtacatccacagcgagcccctgggcgtggtgctggtgatcggcacctggaactaccccttcaacctgaccatccagcccatggtgggcgccatcgccgccggcaacagcgtggtgctgaagcccagcgagctgagcgagaacatggccagcctgctggccaccatcatcccccagtacctggacaaggacctgtaccccgtgatcaacggcggcgtgcccgagaccaccgagctgctgaaggagagattcgaccacatcctgtacaccggcagcaccggcgtgggcaagatcatcatgaccgccgccgccaagcacctgacccccgtgaccctggagctgggcggcaagagcccctgctacgtggacaagaactgcgacctggacgtggcctgcagaagaatcgcctggggcaagttcatgaacagcggccagacctgcgtggcccccgactacatcctgtgcgaccccagcatccagaaccagatcgtggagaagctgaagaagagcctgaaggagttctacggcgaggacgccaagaagagcagagactacggcagaatcatcagcgccagacacttccagagagtgatgggcctgatcgagggccagaaggtggcctacggcggcaccggcgacgccgccaccagatacatcgcccccaccatcctgaccgacgtggacccccagagccccgtgatgcaggaggagatcttcggccccgtgctgcccatcgtgtgcgtgagaagcctggaggaggccatccagttcatcaaccagagagagaagcccctggccctgtacatgttcagcagcaacgacaagtag

SEQ ID NO: 14511 - DNA, 1362 bp, Artificial Sequence
  derived and/or modified sequence
atgagcaagatcagcgaggccgtgaagagagccagagccgccttcagcagcggcagaaccagacccctgcagttcagaatccagcagctggaggccctgcagagactgatccaggagcaggagcaggagctggtgggcgccctggccgccgacctgcacaagaacgagtggaacgcctactacgaggaggtggtgtacgtgctggaggagatcgagtacatgatccagaagctgcccgagtgggccgccgacgagcccgtggagaagaccccccagacccagcaggacgagctgtacatccacagcgagcccctgggcgtggtgctggtgatcggcacctggaactaccccttcaacctgaccatccagcccatggtgggcgccatcgccgccggcaacagcgtggtgctgaagcccagcgagctgagcgagaacatggccagcctgctggccaccatcatcccccagtacctggacaaggacctgtaccccgtgatcaacggcggcgtgcccgagaccaccgagctgctgaaggagagattcgaccacatcctgtacaccggcagcaccggcgtgggcaagatcatcatgaccgccgccgccaagcacctgacccccgtgaccctggagctgggcggcaagagcccctgctacgtggacaagaactgcgacctggacgtggcctgcagaagaatcgcctggggcaagttcatgaacagcggccagacctgcgtggcccccgactacatcctgtgcgaccccagcatccagaaccagatcgtggagaagctgaagaagagcctgaaggagttctacggcgaggacgccaagaagagcagagactacggcagaatcatcagcgccagacacttccagagagtgatgggcctgatcgagggccagaaggtggcctacggcggcaccggcgacgccgccaccagatacatcgcccccaccatcctgaccgacgtggacccccagagccccgtgatgcaggaggagatcttcggccccgtgctgcccatcgtgtgcgtgagaagcctggaggaggccatccagttcatcaaccagagagagaagcccctggccctgtacatgttcagcagcaacgacaaggtgatcaagaagatgatcgccgagaccagcagcggcggcgtggccgccaacgacgtgatcgtgcacatcaccctgcacagcctgcccttcggcggcgtgggcaacagcggcatgggcagctaccacggcaagaagagcttcgagaccttcagccacagaagaagctgcctggtgagacccctgatgaacgacgagggcctgaaggtgagatacccccccagccccgccaagatgacccagcactag

SEQ ID NO: 14512 - protein, 517 aa, Artificial Sequence [sequence omitted]

SEQ ID NO: 14513 - protein, 218 aa, Artificial Sequence
  derived and/or modified sequence
MEHAVEQCHEALFFNMGQCCCAGSRTFVEESIYNEFLERTVEKAKQRKVGNPFELDTQQGPQVDKEQFERVLGYIQLGQKEGAKLLCGGERFGERGFFIKPTVFGGVQDDMRIAKEEIFGPVQPLFKFKKIEEVVERANNTRYGLAAAVFTRDLDKAMYFTQALQAGTVWVNTYNIVTCHTPFGGFKESGNGRELGEDGLKAYTEVKTVTIKVPQKNS

SEQ ID NO: 14514 - DNA, 1554 bp, Artificial Sequence
  derived and/or modified sequence
atgctgcggtttttggcacccaggctgctttcactgcaggggaggaccgcgcgttattccagcgccgcagcattgccatcccccattctgaatccagatattccatataaccaattatttattaacaatgaatggcaggacgcggttagtaagaaaacctttcccaccgtaaatcctaccacaggcgaggtgattggtcacgtggccgagggagacagggctgatgtcgatagagctgtaaaggccgccagggaggcttttcgcctgggtagtccatggagacgcatggacgcctctgagcgaggcaggctgctgaatcgcctggccgatctggttgaacgtgatagagtgtacctcgcttccttggagacgcttgataatgggaagccgtttcaggagtcgtacgctctggacctagacgaggtcattaaagtttaccgatatttcgctggatgggcagacaagtggcatggaaagacgattcccatggacggccagcacttttgttttacccgacacgagccggtcggagtctgtggccaaattattccctggaactttccactagtaatgcaagggtggaagctggcgcccgccctggccacaggaaacactgtagtcatgaaagtcgccgaacagacccccttatcggctctgtatctggccagtctgattaaggaagccggctttccacctggagttgtcaatattattactggttatgggcccaccgctggcgccgccatagctcagcatgtggacgtcgataaggtggcatttactggctccaccgaagttgggcacctgatccagaaagcggccggagacagtaatttgaaaagggtaacccttgaactagggggaaaatcaccttctatagtcctcgccgacgccgatatggagcacgccgtggagcagtgtcacgaggctctattttttaacatgggacagtgttgctgcgcagggtctcgcaccttcgtggaagagagcatttataacgagttcttggaacgtacggtggaaaaggccaaacagcgcaaggtcggtaacccatttgaattggacacacagcagggaccacaggttgataaagaacagtttgaacgggtcctgggatatatccagctcgggcaaaaggagggcgcaaagctcctctgcggaggcgagcgcttcggcgaacggggcttctttatcaaaccaacggtgtttgggggcgtgcaggacgacatgcgtatagccaaggaggaaatcttcggtcccgtccagcccctgttcaaattcaagaagatcgaggaggtcgtcgagagggccaacaacacaagatatgggctggctgcggccgtgtttacaagggatctggataaagccatgtatttcacccaagccctccaggcgggcaccgtgtgggtgaacacctataacatcgttacttgtcataccccctttggtgggttcaaagaatccggaaacgggcgggagctgggcgaggacgggctgaaagcctataccgaagtcaagacggtgacaataaaggtgccacagaagaactcatag

SEQ ID NO: 14515 - DNA, 657 bp, Artificial Sequence
  derived and/or modified sequence
atggagcatgcagtcgagcaatgtcatgaggccctgttctttaacatgggtcaatgctgctgtgccggctcacgaacattcgtggaggagagcatttataatgaattcctggaacgaacagtagaaaaggctaaacagcgaaaagtggggaatccctttgaattggatacacagcagggccctcaggtagacaaagaacagtttgagagagtcctcggatatatccagctaggtcagaaagaaggggccaaactcctctgcggcggggagcgattcggcgaaagggggttcttcatcaaacctacggtctttggaggggtgcaggatgacatgcgaatcgccaaggaagagatcttcggaccagtgcagccccttttcaagttcaagaagatcgaggaggttgttgagcgagcgaacaatactagatatggtctggccgccgctgtgtttacacgggacttggataaagccatgtattttacacaggcactgcaggctggaaccgtgtgggtgaacacttataacattgtcacctgccatacacccttcggcggctttaaggagtctgggaatggccgagagctcggggaggacggcctgaaagcttatacagaagtcaaaacagtgactattaaggtgcctcagaaaaattcttag

SEQ ID NO: 14516 - DNA, 1554 bp, Artificial Sequence
  derived and/or modified sequence
atgctgcgcttcctggccccccggctgctgagcctgcagggccgcacagcccgctacagcagcgctgctgccctgcccagccccatcctgaacccagacatcccctacaaccagctgttcatcaacaatgagtggcaggatgctgtgtccaagaagaccttccccaccgtgaaccccaccactggagaggtgattggacatgtggccgagggggacagagcagatgtggacagagctgtgaaggccgcccgggaggccttccggctgggcagcccctggaggaggatggatgccagcgagcggggccgcctgctgaaccggctggccgacctggtggagcgggacagagtgtacctggccagcctggagaccctggacaatggcaagcccttccaggagagctatgccctggacctggatgaggtgatcaaggtgtaccgctactttgctggctgggccgacaagtggcacggcaagaccatccccatggatggccagcacttctgcttcaccaggcatgagcctgtgggcgtgtgtggccagatcatcccctggaacttccccctggtgatgcagggctggaagctggccccagccctggccaccggcaacacagtggtgatgaaggtggccgagcagacccccctgagcgccctgtacctggccagcctcatcaaggaggccggcttccccccaggagtggtgaacatcatcaccggctacggccccacagctggagctgccatcgcccagcacgtggatgtggacaaggtggccttcaccggcagcacagaggtgggccacctgatccagaaggccgccggggacagcaacctgaagagggtgaccctggagctgggcggcaagagccccagcatcgtgctggctgatgctgacatggagcacgctgtggagcagtgccacgaggccctcttcttcaacatgggccagtgctgctgtgccggcagcaggacctttgtggaggagagcatctacaatgagttcctggagaggacagtggagaaggccaagcagaggaaggtgggcaacccctttgagctggacacccagcagggcccccaggtggacaaggagcagtttgagcgggtgctgggctacatccagctgggccagaaggagggcgccaagctgctgtgtggcggggagagatttggagagcggggcttcttcatcaagcccaccgtgtttggaggagtgcaggatgacatgagaattgccaaggaggagatcttcggccctgtgcagcccctcttcaagttcaagaagattgaggaggtggtggagcgggccaacaacaccaggtatggcctggccgctgctgtgttcacccgggacctggacaaggccatgtacttcacccaggccctgcaggccggcaccgtgtgggtgaacacctacaacatcgtgacctgccacaccccatttggaggcttcaaggagagcggaaatggccgggagctgggggaggatggcctgaaggcctacacagaggtgaagacagtgaccatcaaggtgccccagaagaacagctag

SEQ ID NO: 14517 - DNA, 657 bp, Artificial Sequence
  derived and/or modified sequence
atggagcacgctgtggagcagtgccacgaggccctcttcttcaacatgggccagtgctgctgtgccggcagcaggacctttgtggaggagagcatctacaatgagttcctggagaggacagtggagaaggccaagcagaggaaggtgggcaacccctttgagctggacacccagcagggcccccaggtggacaaggagcagtttgagcgggtgctgggctacatccagctgggccagaaggagggcgccaagctgctgtgtggcggggagagatttggagagcggggcttcttcatcaagcccaccgtgtttggaggagtgcaggatgacatgagaattgccaaggaggagatctttggacctgtgcagcccctcttcaagttcaagaagattgaggaggtggtggagcgggccaacaacaccaggtatggcctggccgctgctgtgttcacccgggacctggacaaggccatgtacttcacccaggccctgcaggccggcaccgtgtgggtgaacacctacaacatcgtgacctgccacaccccatttggaggcttcaaggagagcggaaatggccgggagctgggagaagatggcctgaaggcctacacagaggtgaagacagtgaccatcaaggtgccccagaagaacagctag

SEQ ID NO: 14518 - DNA, 3066 bp, Artificial Sequence
  derived and/or modified sequence
aggcggagcctcattggccgctgagccccgggctgcgcggaggcgggacctgcggccagccctgggcggccatgtggacagagctgggagggccggaaccagaacccaagcgtgatcctgaaccggagcccgagcctgctgcagagtgtcagcatgctgcgcttcctggcaccccggctgcttagcctccagggcaggaccgcccgctactcctcggcagcagccctcccaagccccattctgaacccagacatcccctacaaccagctgttcatcaacaatgaatggcaagatgcagtcagcaagaagaccttcccgacggtcaaccctaccaccggggaggtcattgggcacgtggctgaaggtgaccgggctgatgtggatcgggccgtgaaagcagcccgggaagccttccgcctggggtccccatggcgccggatggatgcctctgagcggggccggctgctgaaccgcctggcagacctagtggagcgggatcgagtctacttggcctcactcgagaccttggacaatgggaagcctttccaagagtcttacgccttggacttggatgaggtcatcaaggtgtatcggtactttgctggctgggctgacaagtggcatggcaagaccatccccatggatggccagcatttctgcttcacccggcatgagcccgttggtgtctgtggccagatcatcccgtggaacttccccttggtcatgcagggttggaaacttgccccggcactcgccacaggcaacactgtggttatgaaggtggcagagcagacccccctctctgccctgtatttggcctccctcatcaaggaggcaggctttccccctggggtggtgaacatcatcacggggtatggcccaacagcaggtgcggccatcgcccagcacgtggatgttgacaaagttgccttcaccggttccaccgaggtgggccacctgatccagaaagcagctggcgattccaacctcaagagagtcaccctggagctgggtggtaagagccccagcatcgtgctggccgatgctgacatggagcatgccgtggagcagtgccacgaagccctgttcttcaacatgggccagtgctgctgtgctggctcccggaccttcgtggaagaatccatctacaatgagtttctcgagagaaccgtggagaaagcaaagcagaggaaagtggggaacccctttgagctggacacccagcaggggcctcaggtggacaaggagcagtttgaacgagtcctaggctacatccagcttggccagaaggagggcgcaaaactcctctgtggcggagagcgtttcggggagcgtggtttcttcatcaagcctactgtctttggtggcgtgcaggatgacatgagaattgccaaagaggagatctttgggcctgtgcagcccctgttcaagttcaagaagattgaggaggtggttgagagggccaacaacaccaggtatggcctggctgcggctgtgttcacccgggatctggacaaggccatgtacttcacccaggcactccaggccgggaccgtgtgggtaaacacctacaacatcgtcacctgccacacgccatttggagggtttaaggaatctggaaacgggagggagctgggtgaggatgggcttaaggcctacacagaggtaaagacggtcaccatcaaggttcctcagaagaactcgtaagagcagctgtcagggaggcccagtcacagtccagcaattccacaaccaccttgacgaatgcttgccaagctgttttaaagccaagaacaccctttctttgttccaaattaactcttagaagaaaccccacaaataaagcaattcaatcaaggctgttctatttaaatcagagatggggaccaggctcagagttctacctatctaacccccaaccacagcccccttggtggcccatgagttgcttccatgaaatcttaggagtctctggaggacagattaaaaaccagtgatctgtaatttgtagctcttcctgctgatccaaggactttcccatgggtgcgcttgatggtttagtggatcgactcaactcagaacacaagcttggaaagtgttaggggttttgaactaggtggatactaaatctcggccccactcttcattggcttaacctaaaaaccagaggtgcttttccttgtctgtgtgccagttgctggctgttttagttgcttgcccttcattttgctactgattttccttaatttgtgggaaggagtaggcaaagaatatgcttacatgattacacctgtaaagtaagcccaaacatcccaaatgtccgtcaactgatgagtggattaataaaatgtttccatggaatattccttggattactcagccataaaaaggaatgaagtactgacacatgctgtgacatcagtgaaccctgaaaacatccttctcagtgaaacaagccagagagatgtacaaggctacagactgtatgattccatttatatgaaatatacatactaggcaaatccatggagatggaacatagattagtggttgccaggggatagaggagtaattgttagtgggcatgggatttgtttttgggaggttttgaaaatgttctggagttgaacaatagtaatggttgcatgatttggtaaaaatactaaaaactatggaattgtttaattatggtatatgaattaatttctttctttttttcttttttttttttttttttgacacggagtctcactctgtcgcccaggctggagtgcagtggtgtgatctcgtctcactgcaacctccgcctcccagattcaagcgattctcctgtctcagcctcctgagtagctgggattataggtacatgccatcacacctggctaatttttgtatttttagtagagatgaggtttcaccattttggccaggctgatcttgaactcctgacctcaggtgatccacccgcctcagcctcccaaagtgctgggattacaggtgggagccacaacacccggccatgaattaactccgttaaaaaataaacgtatacattctgtgagcaaa

SEQ ID NO: 14519 - DNA, 1595 bp, Artificial Sequence
  derived and/or modified sequence
agccctgggcggccatgtggacagagctgggagggccggaaccagaacccaagcgtgatcctgaaccggagcccgagcctgctgcagagtgtcagcatgctgcgcttcctggcaccccggctgcttagcctccagggcaggaccgcccgctactcctcggcagcagccctcccaagccccattctgaacccagacatcccctacaaccagctggcgattccaacctcaagagagtcaccctggagctgggtggtaagagccccagcatcgtgctggccgatgctgacatggagcatgccgtggagcagtgccacgaagccctgttcttcaacatgggccagtgctgctgtgctggctcccggaccttcgtggaagaatccatctacaatgagtttctcgagagaaccgtggagaaagcaaagcagaggaaagtggggaacccctttgagctggacacccagcaggggcctcaggtggacaaggagcagtttgaacgagtcctaggctacatccagcttggccagaaggagggcgcaaaactcctctgtggcggagagcgtttcggggagcgtggtttcttcatcaagcctactgtctttggtggcgtgcaggatgacatgagaattgccaaagaggagatctttgggcctgtgcagcccctgttcaagttcaagaagattgaggaggtggttgagagggccaacaacaccaggtatggcctggctgcggctgtgttcacccgggatctggacaaggccatgtacttcacccaggcactccaggccgggaccgtgtgggtaaacacctacaacatcgtcacctgccacacgccatttggagggtttaaggaatctggaaacgggagggagctgggtgaggatgggcttaaggcctacacagaggtaaagacggtcaccatcaaggttcctcagaagaactcgtaagagcagctgtcagggaggcccagtcacagtccagcaattccacaaccaccttgacgaatgcttgccaagctgttttaaagccaagaacaccctttctttgttccaaattaactcttagaagaaaccccacaaataaagcaattcaatcaaggctgttctatttaaatcagagatggggaccaggctcagagttctacctatctaacccccaaccacagcccccttggtggcccatgagttgcttccatgaaatcttaggagtctctggaggacagattaaaaaccagtgatctgtaatttgtagctcttcctgctgatccaaggactttcccatgggtgcgcttgatggtttagtggatcgactcaactcagaacacaagcttggaaagtgttaggggttttgaactaggtggatactaaatctcggccccactcttcattggcttaacctaaaaaccagaggtgcttttccttgtctgtgtgccagttgctggctgttttagttgcttgcccttcattttgctactgattttccttaatttgtgggaaggagtaggcaaagaatatgcttacatgattacacctgtaaagtaagcccaaacatcccaaatgtccgtcaactgatgagtggattaataaaatgtttccatg

SEQ ID NO: 14520 - DNA, 1554 bp, Artificial Sequence
  derived and/or modified sequence
atgctgcggttcctggccccccggctgctgagcctgcagggccggacggcacgatattcaagtgccgcagcactgccctctcctattctgaaccctgacatcccctataatcagttgttcatcaacaatgagtggcaagatgcagtctctaaaaaaacatttcctacagtaaaccccacaactggggaagtgatcgggcacgtggctgagggagatagggccgacgtggaccgtgctgtaaaagcggcacgagaggcttttaggctcgggtcgccttggaggaggatggacgcttctgagcgtggcaggctactgaacaggctggcggatttggttgaaagagaccgggtctacttggccagtcttgagacactcgacaatgggaagcccttccaggagtcctatgcacttgatttagatgaagtcattaaagtgtatcgctactttgccggctgggccgataaatggcacggaaaaactatccccatggatggccaacatttttgctttacccgacacgaacccgtaggcgtctgcggccaaattattccgtggaatttcccgcttgtcatgcaaggctggaagctggccccggccctggctaccggaaacactgttgtcatgaaagtagccgaacaaacaccactgagcgcgctttacctggcctctctcataaaagaagccggatttccaccaggcgtcgtaaatatcattactggatacgggcccacagcaggggctgcaatcgctcaacatgtagacgttgacaaggtggccttcacaggttctaccgaggtcggtcacctcattcagaaggcagcaggcgactccaatctcaagagggttacattggaactgggcggtaaaagccccagcattgtccttgcagatgcagatatggagcacgcggtggagcagtgtcacgaggccctattctttaacatgggtcagtgctgctgtgctgggagcagaactttcgtcgaggaatcaatctataacgaattccttgagcggacagtggagaaagctaaacagagaaaagtgggcaatccctttgaactggatacgcaacagggacctcaggtggacaaggaacagttcgagcgtgtgctaggctatatccagttgggtcagaaggagggcgcaaaattgctctgcggtggtgagcggttcggcgaacgcggattttttatcaagcccacagtgttcgggggggtgcaggatgacatgcggatcgccaaggaggagatttttggcccagtgcaaccccttttcaagtttaaaaagattgaggaagtggttgaaagagcaaacaatacacgctacggcctggccgccgcagtctttacccgtgatttggacaaggctatgtacttcacacaggcactgcaagcaggtacagtctgggtgaacacttataacatcgtgacttgccacactcccttcggcggttttaaagagagcggcaatgggagagagctcggtgaagatgggctcaaggcttacacagaagtgaaaactgtcacaatcaaagtcccacagaagaattcatag

SEQ ID NO: 14521 - DNA, 657 bp, Artificial Sequence
  derived and/or modified sequence
atggagcacgccgtggagcagtgccacgaggccctgttcttcaacatgggacagtgctgctgtgcgggctcacgaacctttgttgaagagagcatctacaatgaattcctggaaaggacagtagagaaggctaagcagagaaaggtaggtaatccgttcgagctggacacccagcaaggcccacaggtcgacaaagagcagtttgaacgcgttctcggatacatccagctcggtcaaaaggaaggcgctaagttactttgcggaggtgagagattcggagagcgcggttttttcatcaaacctaccgtctttgggggtgtgcaggacgatatgcggattgcaaaagaagagattttcggacctgtgcagccgttgtttaagttcaagaagatagaggaggtcgttgagcgcgcaaataataccagatatggtctcgcagcagcggtttttactcgagacttggataaggccatgtattttactcaggctctgcaggctggcacggtgtgggttaatacatataacattgtgacttgccacaccccttttggaggctttaaggagtccgggaacgggcgcgagctgggagaggacggcctgaaggcttataccgaagtgaagactgttacaattaaggtcccacagaaaaacagctag

SEQ ID NO: 14522 - DNA, 1554 bp, Artificial Sequence
  derived and/or modified sequence
atgctgcggtttttagcacccagactcttatcactccagggcaggactgctagatatagcagcgccgcagcgctgccttctcccatccttaatcccgacataccctacaatcaactgtttattaacaatgagtggcaggacgccgtgtccaaaaaaacctttcccactgtcaaccccactacaggcgaggtgataggccacgtggcggaaggggatagggccgacgtggaccgcgctgtgaaggccgcaagggaggcctttcgcttgggatcaccttggagacgaatggacgccagtgagcgcggacgcctgcttaacagattggctgacttagtggagagagatcgtgtttacctggcctctttggaaacccttgacaacggaaagccttttcaggagagctacgccttggatcttgacgaggtgattaaggtctaccggtattttgctggctgggccgacaagtggcatgggaaaactatccctatggacggccagcatttttgctttacaagacacgaacctgtgggagtctgtggccagatcattccctggaacttcccgctggtaatgcagggctggaagctcgcccctgcacttgctaccggaaataccgtggtcatgaaggtggctgagcaaacacctctgagtgctctgtatcttgcctctctgatcaaggaggcaggatttccaccaggcgtggtgaacattattactgggtatggccctacagccggagctgcgatcgctcagcacgtcgacgttgacaaggtggcattcaccggatccaccgaggtaggtcacttaattcaaaaggccgctggcgacagtaacctcaagcgagtgactctcgaattgggagggaaatcaccaagtattgtactggccgacgcagatatggaacacgctgtcgagcagtgtcatgaagcattgttctttaatatgggacaatgctgttgtgccggtagtcgtactttcgtggaagaatccatttacaatgaattcttagagcgcactgttgagaaagccaagcaacgcaaagtcggaaacccttttgagcttgatacgcaacaaggtccccaggtcgacaaggagcagtttgaacgagtacttgggtatatacagctcgggcagaaggaaggggctaagctcttatgcgggggtgagcgtttcggagagcgaggtttcttcatcaaacctacagtgttcggaggagtacaagatgatatgagaattgctaaggaagaaatctttggtcctgtgcaaccgctctttaaattcaaaaaaatcgaggaagtcgtggagcgagccaataacactcgttacggactggcggcagccgttttcactcgtgacctcgacaaggccatgtactttacacaggccctgcaagcaggaactgtctgggttaatacatacaacatcgttacctgtcacacaccatttggcggatttaaggaatctggaaatgggagagagctaggcgaagacgggttgaaagcctataccgaagtcaaaaccgtcacaattaaagttcctcaaaaaaattcatag

SEQ ID NO: 14523 - DNA, 657 bp, Artificial Sequence
  derived and/or modified sequence
atggaacacgccgttgaacagtgccacgaggccctctttttcaacatggggcagtgttgctgcgctggatctcggactttcgtggaagagtcaatatacaatgaattcttggagaggactgtggagaaagcaaaacagcggaaggtcgggaatccattcgagctagacactcaacagggaccgcaagttgataaggagcagttcgaacgtgttttgggctatattcaactgggacagaaggaaggcgcaaaactgctctgcggaggagagaggttcggcgagcggggtttcttcatcaaacccacggtgttcggcggtgtgcaagacgacatgcgcattgccaaggaggagatctttggcccagtgcagccactgttcaaattcaaaaaaatagaggaggtcgtggagagagccaataacacccggtacggtctggcagcagcagtatttactagggacttggataaggcaatgtatttcacccaagcactgcaggctggaacggtgtgggtgaatacctacaacatcgtgacatgccacactccatttggaggctttaaagagagcggcaacgggagagagctgggcgaggacggcctgaaggcctacacagaggtcaagaccgtgaccataaaggtaccccagaagaacagctag

SEQ ID NO: 14524 - DNA, 1554 bp, Artificial Sequence
  derived and/or modified sequence
atgctgagattcctggcccccagactgctgagcctgcagggcagaaccgccagatacagcagcgccgccgccctgcccagccccatcctgaaccccgacatcccctacaaccagctgttcatcaacaacgagtggcaggacgccgtgagcaagaagaccttccccaccgtgaaccccaccaccggcgaggtgatcggccacgtggccgagggcgacagagccgacgtggacagagccgtgaaggccgccagagaggccttcagactgggcagcccctggagaagaatggacgccagcgagagaggcagactgctgaacagactggccgacctggtggagagagacagagtgtacctggccagcctggagaccctggacaacggcaagcccttccaggagagctacgccctggacctggacgaggtgatcaaggtgtacagatacttcgccggctgggccgacaagtggcacggcaagaccatccccatggacggccagcacttctgcttcaccagacacgagcccgtgggcgtgtgcggccagatcatcccctggaacttccccctggtgatgcagggctggaagctggcccccgccctggccaccggcaacaccgtggtgatgaaggtggccgagcagacccccctgagcgccctgtacctggccagcctgatcaaggaggccggcttcccccccggcgtggtgaacatcatcaccggctacggccccaccgccggcgccgccatcgcccagcacgtggacgtggacaaggtggccttcaccggcagcaccgaggtgggccacctgatccagaaggccgccggcgacagcaacctgaagagagtgaccctggagctgggcggcaagagccccagcatcgtgctggccgacgccgacatggagcacgccgtggagcagtgccacgaggccctgttcttcaacatgggccagtgctgctgcgccggcagcagaaccttcgtggaggagagcatctacaacgagttcctggagagaaccgtggagaaggccaagcagagaaaggtgggcaaccccttcgagctggacacccagcagggcccccaggtggacaaggagcagttcgagagagtgctgggctacatccagctgggccagaaggagggcgccaagctgctgtgcggcggcgagagattcggcgagagaggcttcttcatcaagcccaccgtgttcggcggcgtgcaggacgacatgagaatcgccaaggaggagatcttcggccccgtgcagcccctgttcaagttcaagaagatcgaggaggtggtggagagagccaacaacaccagatacggcctggccgccgccgtgttcaccagagacctggacaaggccatgtacttcacccaggccctgcaggccggcaccgtgtgggtgaacacctacaacatcgtgacctgccacacccccttcggcggcttcaaggagagcggcaacggcagagagctgggcgaggacggcctgaaggcctacaccgaggtgaagaccgtgaccatcaaggtgccccagaagaacagctag

SEQ ID NO: 14525 - DNA, 657 bp, Artificial Sequence
  derived and/or modified sequence
atggagcacgccgtggagcagtgccacgaggccctgttcttcaacatgggccagtgctgctgcgccggcagcagaaccttcgtggaggagagcatctacaacgagttcctggagagaaccgtggagaaggccaagcagagaaaggtgggcaaccccttcgagctggacacccagcagggcccccaggtggacaaggagcagttcgagagagtgctgggctacatccagctgggccagaaggagggcgccaagctgctgtgcggcggcgagagattcggcgagagaggcttcttcatcaagcccaccgtgttcggcggcgtgcaggacgacatgagaatcgccaaggaggagatcttcggccccgtgcagcccctgttcaagttcaagaagatcgaggaggtggtggagagagccaacaacaccagatacggcctggccgccgccgtgttcaccagagacctggacaaggccatgtacttcacccaggccctgcaggccggcaccgtgtgggtgaacacctacaacatcgtgacctgccacacccccttcggcggcttcaaggagagcggcaacggcagagagctgggcgaggacggcctgaaggcctacaccgaggtgaagaccgtgaccatcaaggtgccccagaagaacagctag

SEQ ID NO: 14526 - protein, 512 aa, Artificial Sequence
  derived and/or modified sequence
MATANGAVENGQPDRKPPALPRPIRNLEVKFTKIFINNEWHESKSGKKFATCNPSTREQICEVEEGDKPDVDKAVEAAQVAFQRGSPWRRLDALSRGRLLHQLADLVERDRATLAALETMDTGKPFLHAFFIDLEGCIRTLRYFAGWADKIQGKTIPTDDNVVCFTRHEPIGVCGAITPWNFPLLMLVWKLAPALCCGNTMVLKPAEQTPLTALYLGSLIKEAGFPPGVVNIVPGFGPTVGAAISSHPQINKIAFTGSTEVGKLVKEAASRSNLKRVTLELGGKNPCIVCADADLDLAVECAHQGVFFNQGQCCTAASRVFVEEQVYSEFVRRSVEYAKKRPVGDPFDVKTEQGPQIDQKQFDKILELIESGKKEGAKLECGGSAMEDKGLFIKPTVFSEVTDNMRIAKEEIFGPVQPILKFKSIEEVIKRANSTDYGLTAAVFTKNLDKALKLASALESGTVWINCYNALYAQAPFGGFKMSGNGRELGEYALAEYTEVKTVTIKLGDKNP

SEQ ID NO: 14527 - protein, 151 aa, Artificial Sequence
  derived and/or modified sequence
MATANGAVENGQPDRKPPALPRPIRNLEVKFTKIFINNEWHESKSGKKFATCNPSTREQICEVEEGDKPDVDKAVEAAQVAFQRGSPWRRLDALSRGRLLHQLADLVERDRATLAALETMDTGKPFLHAFFIDLEGCIRTLRLIKSSSTKS

SEQ ID NO: 14528 - DNA, 1539 bp, Artificial Sequence
  derived and/or modified sequence
atggcaaccgcaaacggagcggtcgagaatggtcagcccgaccgcaaaccacccgccctgcctcgcccaataagaaacctagaagtgaagtttactaagatctttataaataacgaatggcatgaatctaagtctggcaagaagtttgcgacatgcaacccctccaccagggagcaaatctgtgaggtcgaggaaggcgataaacccgatgtcgataaggctgttgaagcggctcaagttgcttttcaaagaggaagcccatggcggagactcgatgcgctgtctagggggcggctgctgcatcagctcgccgacctagtggagagggaccgcgcaaccctggcagcgctggaaaccatggataccgggaagccctttttacatgccttttttattgacctggagggctgcattcgaaccctgcgttacttcgccgggtgggctgataagatccagggaaagactatccccaccgacgataatgtcgtctgttttacccgacatgagcctataggcgtgtgcggagctatcactccttggaactttccgttgctgatgctggtctggaagctggcccccgcactctgttgcggaaatactatggtgctaaagcccgctgagcagacgccgctcacagcactctatctggggagcttgattaaagaagctggttttccaccaggcgtagttaacatagtgccaggctttggccccaccgttggagccgctatttctagccatccacagatcaacaaaattgcttttaccggcagtaccgaggtggggaagctcgtgaaggaggccgcttcaaggtcgaatcttaaaagggtgacactagagttgggcgggaagaacccttgtatagtctgcgccgatgctgatttggatctggctgtcgaatgcgcacatcagggcgtgttcttcaatcagggtcagtgctgcaccgcggcatctagagtgttcgtggaagagcaagtgtattccgagtttgtgcgacgatcagtggaatatgccaaaaaaagacctgttggtgatcccttcgatgtgaagacagagcagggtccacaaatcgatcagaagcaattcgataagatacttgaattgatcgagtcagggaaaaaggaaggcgccaagctagagtgcggtggtagcgctatggaagataaaggactcttcatcaagcctaccgtttttagcgaggtaactgataatatgcgcattgccaaggaagaaatctttggtccagtgcagcccattctcaagttcaagtctatcgaggaggtgatcaagagggctaactccacagactatgggctcaccgccgccgtatttaccaagaatctggataaggcgctgaaactggccagtgcgctggaatcgggaaccgtgtggattaactgttacaacgcactgtacgctcaagcacccttcggcgggttcaaaatgtctggcaacggccgggagctcggcgaatacgcactggccgaatatactgaggtcaaaacagtgactatcaaactgggcgacaaaaatccctag

SEQ ID NO: 14529 - DNA, 456 bp, Artificial Sequence
  derived and/or modified sequence
atggctactgctaacggagctgtcgagaacggacagcccgacagaaagcccccggctcttccccgaccaatccggaatctcgaggtcaagtttacaaaaatatttattaacaatgagtggcacgagagtaagtccggaaagaagtttgctacctgcaacccaagtactcgggaacaaatctgtgaagtggaagagggggataaacctgatgtggataaggctgtggaggcagctcaggtcgcttttcagcgcggctcaccttggcggcgattggacgccttaagtcgcggacggctactgcatcaattggctgacctggttgaaagggatcgagccacccttgccgctctagagactatggacacaggcaaaccctttctgcacgcctttttcattgacctcgaaggatgcatcagaactctacggctgataaagtcttcctctacgaagtcgtag

SEQ ID NO: 14530 - DNA, 1539 bp, Artificial Sequence
  derived and/or modified sequence
atggccacagccaatggagctgtggagaatggccagcctgacaggaagcccccagccctgccccggcccatccggaacctggaggtgaagttcaccaagatcttcatcaacaatgagtggcatgagagcaagagcggcaagaagtttgccacctgcaaccccagcacccgggagcagatctgtgaggtggaggagggggacaagccagatgtggacaaggctgtggaggccgcccaggtggccttccagaggggcagcccctggaggcggctggatgccctgagccggggccgcctgctgcaccagctggccgacctggtggagcgggaccgggccaccctggccgccctggagaccatggacaccgggaagcccttcctgcacgccttcttcatcgacctggagggctgcatccgcaccctgcgctactttgctggctgggccgacaagatccagggcaagaccatccccacagatgacaacgtggtgtgcttcaccaggcatgagcccatcggcgtgtgtggggccatcaccccctggaacttccccctgctgatgctggtgtggaagctggccccagccctgtgctgcggcaacaccatggtgctgaagccagctgagcagacccccctgacagccctgtacctgggcagcctcatcaaggaggccggcttccccccaggagtggtgaacatcgtgcccggcttcggccccaccgtgggcgccgccatcagcagccacccccagatcaacaagatcgccttcaccggcagcacagaggtgggcaagctggtgaaggaggccgccagccgcagcaacctgaagagggtgaccctggagctgggcggcaagaacccctgcatcgtgtgtgctgatgctgacctggacctggccgtggagtgtgcccaccagggcgtcttcttcaaccagggccagtgctgcacagctgccagccgggtgtttgtggaggagcaggtgtacagcgagtttgtgcggcgctctgtggagtatgccaagaagaggcctgtgggggacccctttgatgtgaagacagagcagggcccccagattgaccagaagcagtttgacaagatcctggagctgattgaaagtggcaagaaggagggcgccaagctggagtgtggcggcagcgccatggaggacaagggcctcttcatcaagcccaccgtcttcagcgaggtgacagacaacatgagaattgccaaggaggagatctttggacctgtgcagcccatcctgaagttcaagagcattgaggaggtgatcaagagggccaacagcacagattatggcctgacagctgctgtgttcaccaagaacctggacaaggccctgaagctggccagcgccctggagagcggcaccgtgtggatcaactgctacaatgccctgtatgcccaggccccctttggaggcttcaagatgtctggaaatggccgggagctgggggagtatgccctggccgagtacacagaggtgaagacagtgaccatcaagctgggggacaagaacccctag

SEQ ID NO: 14531 - DNA, 456 bp, Artificial Sequence
  derived and/or modified sequence
atggccacagccaatggagctgtggagaatggccagcctgacaggaagcccccagccctgccccggcccatccggaacctggaggtgaagttcaccaagatcttcatcaacaatgagtggcatgagagcaagagcggcaagaagtttgccacctgcaaccccagcacccgggagcagatctgtgaggtggaggagggggacaagccagatgtggacaaggctgtggaggccgcccaggtggccttccagaggggcagcccctggaggcggctggatgccctgagccggggccgcctgctgcaccagctggccgacctggtggagcgggaccgggccaccctggccgccctggagaccatggacaccgggaagcccttcctgcacgccttcttcatcgacctggagggctgcatccgcaccctgcggctcatcaagagcagcagcaccaagagctag

SEQ ID NO: 14532 - DNA, 3924 bp, Artificial Sequence
  derived and/or modified sequence
attcccgagcgccgcgagccggccgaagtcgggcgagcgcgccgtgcggcggctgggagtgggctgcatgtgccgcgcggggagcccgcccgacttcggggaggcagcggggcgccgtggccccgcggctcagctccctgccgggtcgggtgtcccagccctgcgacttccggggcccggcggctcctcggggagctcgtccacaggcagcctccggggcgagagagcgcgcggcgcgggcgccgggacggtccgcggcacgcgggtggagccgccggcgctcgggctcccgcaggggcggcgggcggggcggggtgaggcgggccggccgccctcccctctcctccctcccgcagcccgccctcccttcctccggtcccgcagccaattaggcggccccctcgggcgggaggcgtggggcgctgcataaagcggcggggagctgccaccccgggagcgggctgcgcagtgtccgggccgagccggtgcgccgcagactagggcgcctcgggccagggagcgcggaggagccatggccaccgctaacggggccgtggaaaacgggcagccggacaggaagccgccggccctgccgcgccccatccgcaacctggaggtcaagttcaccaagatatttatcaacaatgaatggcacgaatccaagagtgggaaaaagtttgctacatgtaacccttcaactcgggagcaaatatgtgaagtggaagaaggagataagcccgacgtggacaaggctgtggaggctgcacaggttgccttccagaggggctcgccatggcgccggctggatgccctgagtcgtgggcggctgctgcaccagctggctgacctggtggagagggaccgcgccaccttggccgccctggagacgatggatacagggaagccatttcttcatgcttttttcatcgacctggagggctgtattagaaccctcagatactttgcagggtgggcagacaaaatccagggcaagaccatccccacagatgacaacgtcgtgtgcttcaccaggcatgagcccattggtgtctgtggggccatcactccatggaacttccccctgctgatgctggtgtggaagctggcacccgccctctgctgtgggaacaccatggtcctgaagcctgcggagcagacacctctcaccgccctttatctcggctctctgatcaaagaggccgggttccctccaggagtggtgaacattgtgccaggattcgggcccacagtgggagcagcaatttcttctcaccctcagatcaacaagatcgccttcaccggctccacagaggttggaaaactggttaaagaagctgcgtcccggagcaatctgaagcgggtgacgctggagctgggggggaagaacccctgcatcgtgtgtgcggacgctgacttggacttggcagtggagtgtgcccatcagggagtgttcttcaaccaaggccagtgttgcacggcagcctccagggtgttcgtggaggagcaggtctactctgagtttgtcaggcggagcgtggagtatgccaagaaacggcccgtgggagaccccttcgatgtcaaaacagaacaggggcctcagattgatcaaaagcagttcgacaaaatcttagagctgatcgagagtgggaagaaggaaggggccaagctggaatgcgggggctcagccatggaagacaaggggctcttcatcaaacccactgtcttctcagaagtcacagacaacatgcggattgccaaagaggagattttcgggccagtgcaaccaatactgaagttcaaaagtatcgaagaagtgataaaaagagcgaatagcaccgactatggactcacagcagccgtgttcacaaaaaatctcgacaaagccctgaagttggcttctgccttagagtctggaacggtctggatcaactgctacaacgccctctatgcacaggctccatttggtggctttaaaatgtcaggaaatggcagagaactaggtgaatacgctttggccgaatacacagaagtgaaaactgtcaccatcaaacttggcgacaagaacccctgaaggaaaggcggggctccttcctcaaacatcggacggcggaatgtggcagatgaaatgtgctggaggaaaaaaatgacatttctgaccttcccgggacacattcttctggaggctttacatctactggagttgaatgattgctgttttcctctcactctcctgtttattcaccagactggggatgcctataggttgtctgtgaaatcgcagtcctgcctggggagggagctgttggccatttctgtgtttccctttaaaccagatcctggagacagtgagatactcagggcgttgttaacagggagtggtatttgaagtgtccagcagttgcttgaaatgctttgccgaatctgactccagtaagaatgtgggaaaaccccctgtgtgttctgcaagcagggctcttgcaccagcggtctcctcagggtggacctgcttacagagcaagccacgcctctttccgaggtgaaggtgggaccattccttgggaaaggattcacagtaaggttttttggtttttgttttttgttttcttgtttttaaaaaaaggatttcacagtgagaaagttttggttagtgcataccgtggaagggcgccagggtctttgtggattgcatgttgacattgaccgtgagattcggcttcaaaccaatactgcctttggaatatgacagaatcaatagcccagagagcttagtcaaagacgatatcacggtctaccttaaccaaggcactttcttaagcagaaaatattgttgaggttacctttgctgctaaagatccaatcttctaacgccacaacagcatagcaaatcctaggataattcacctcctcatttgacaaatcagagctgtaattcgctttaacaaattacgcatttctatcacgttcactaacagcttatgataagtctgtgtagtcttccttttctccagttctgttacccaatttagattagtaaagcgtacacaactggaaagactgctgtaataacacagccttgttatttttaagtcctattttgatattaatttctgattagttagtaaataacacctggattctatggaggacctcggtcttcatccaagtggcctgagtatttcactggcaggttgtgaatttttcttttcctctttggggatccaaatgatgatgtgcaatttcatgttttaacttgggaaactgaaagtgttcccatatagcttcaaaaacaaaaacaaatgtgttatccgacggatacttttatggttactaactagtactttcctaattgggaaagtagtgcttaagtttgcaaattaagttggggagggcaataataaaatgagggcccgtaacagaaccagtgtgtgtataacgaaaaccatgtataaaatgggcctatcacccttgtcagagatataaattaccacatttgccttcccttcatcagctaacacttatcacttatactaccaataacttgttaaatcaggatttggcttcatacactgaattttcagtattttatctcaagtagatatagacactaaccttgatagtgatacgttagagggttcctattcttccattgtacgataatgtctttaatatgaaatgctacattatttataattggtagagttattgtatctttttatagttgtaagtacacagaggtggtatatttaaacttctgtaatatactgtatttagaaatggaaatatatatagtgttaggtttcacttcttttaaggtttacccctgtggtgtggtttaaaaatctataggcctgggaattccgatcctagctgcagatcgcatcccacaatgcgagaatgataaaataaaattggatatttgagaaa

SEQ ID NO: 14533 - DNA, 891 bp, Artificial Sequence
  derived and/or modified sequence
agcgggctgcgcagtgtccgggccgagccggtgcgccgcagactagggcgcctcgggccagggagcgcggaggagccatggccaccgctaacggggccgtggaaaacgggcagccggacaggaagccgccggccctgccgcgccccatccgcaacctggaggtcaagttcaccaagatatttatcaacaatgaatggcacgaatccaagagtgggaaaaagtttgctacatgtaacccttcaactcgggagcaaatatgtgaagtggaagaaggagataagcccgacgtggacaaggctgtggaggctgcacaggttgccttccagaggggctcgccatggcgccggctggatgccctgagtcgtgggcggctgctgcaccagctggctgacctggtggagagggaccgcgccaccttggccgccctggagacgatggatacagggaagccatttcttcatgcttttttcatcgacctggagggctgtattagaaccctcagattgatcaaaagcagttcgacaaaatcttagagctgatcgagagtgggaagaaggaaggggccaagctggaatgcgggggctcagccatggaagacaaggggctcttcatcaaacccactgtcttctcagaagtcacagacaacatgcggattgccaaagaggagattttcgggccagtgcaaccaatactgaagttcaaaagtatcgaagaagtgataaaaagagcgaatagcaccgactatggactcacagcagccgtgttcacaaaaaatctcgacaaagccctgaagttggcttctgccttagagtctggaacggtctggatcaactgctacaacgccctctatgcacaggctccatttggtggctttaaaatgtcaggaaatgg

SEQ ID NO: 14534 - DNA, 1539 bp, Artificial Sequence
  derived and/or modified sequence
atggccaccgccaacggcgccgtggagaacggccagcccgaccggaagcccccagccttaccccgccccattagaaatctggaagtgaaattcaccaagatcttcataaacaacgagtggcatgaaagcaaaagtggcaaaaaatttgccacatgcaacccgtccacacgcgagcagatctgcgaagtcgaagagggagataaacccgacgtcgataaggccgttgaagcggctcaagtggcctttcaaagaggcagtccctggcgcagactggatgcactatcacgcgggagattattgcaccagttggcagatttggtggagcgcgatagggccactctggcggcactcgaaaccatggacacaggcaaaccattcctgcatgcctttttcatcgatttggaaggctgtattcgtaccctgaggtacttcgctggctgggcggataagattcaagggaagaccataccaaccgatgacaatgtggtctgctttactagacatgaaccgatcggggtgtgcggcgccatcaccccctggaactttccactgctgatgttagtgtggaagctagccccggctttgtgctgcggtaatacgatggtgcttaaacctgccgaacagacacccctgacggctttgtatttagggtctctgatcaaggaggctgggtttcctcctggggttgtaaacattgttcccggtttcggccccacagtaggtgcagccatctctagccatccacagataaacaaaatcgctttcactggcagtactgaggtggggaagctcgtcaaggaggctgcctcaagaagtaacctcaagagggtgacattggaactcggcggaaaaaatccatgcatcgtgtgtgctgacgctgatctggacttggcggtcgagtgcgcacaccagggcgtgttctttaaccagggtcagtgttgcacagccgctagtcgcgtgttcgtcgaggagcaggtttactctgagttcgttcggagatccgtcgaatatgctaaaaagcggcccgtcggtgatccttttgatgtgaaaacagagcaggggccacagatcgatcagaaacagttcgataaaattctggaactgatcgagagtggaaaaaaggagggcgccaagttagagtgtggtggatctgctatggaagacaagggattgtttatcaagcccacagttttctctgaggttaccgataacatgagaatcgccaaagaggaaatcttcggccccgtgcagcctattctgaagttcaagagtattgaagaagtgatcaagagggccaactcaactgactacggtctgactgcagctgtctttactaagaacctggacaaggccctgaagcttgctagcgctctagagtctgggacggtttggatcaactgttacaacgctttgtatgctcaggctcccttcggtggctttaagatgtctggcaatggccgagagttgggcgagtacgccctagccgagtatacagaagtgaagactgtcacgataaaactgggggataaaaatccatag

SEQ ID NO: 14535 - DNA, 456 bp, Artificial Sequence
  derived and/or modified sequence
atggccaccgccaacggcgccgtggagaacggccagcccgaccggaaacctccagccttgccgcgccccattaggaatctggaggtaaagttcacaaaaatcttcattaataatgaatggcatgaatccaagtccggcaaaaaattcgccacgtgtaaccctagcaccagggagcaaatttgcgaggttgaggagggcgataaaccggacgttgataaggctgtggaagctgcacaggtcgcattccaaagaggtagcccttggcggcgtctggacgcgttgtctcgcgggagattgctgcatcagcttgcagatttagttgagagggaccgggctactctcgcagcactggagaccatggatactggcaagccttttttgcacgctttttttatcgacctggaaggttgtatcaggacgctgagacttatcaaaagctcttctacaaaatcttag

SEQ ID NO: 14536 - DNA, 1539 bp, Artificial Sequence
  derived and/or modified sequence
atggccacggcaaacggggcagtggagaacggacagcccgaccgtaagccccctgctctcccacggcctattaggaacctggaggttaaatttaccaagattttcattaacaatgagtggcacgagagcaagagtggcaaaaaatttgctacttgtaacccttccactcgggagcaaatatgcgaggtggaggagggtgacaagcctgacgttgacaaggcggtggaggctgctcaggttgcatttcagagggggtctccctggcgacgcttggacgccctgtccaggggcagattactgcatcagctggctgacctcgtggagcgggaccgtgcaacactcgctgccttagaaaccatggacacagggaaaccattcttacatgccttctttatagacctcgagggatgcatacgcactctgcgctacttcgccggatgggctgacaagattcagggcaaaacaatccctacagatgacaacgtcgtctgttttacaagacatgagcctataggcgtgtgcggagccatcaccccttggaattttcctcttctgatgttggtgtggaagctggcccctgctttgtgttgcggaaatactatggtattaaagcccgctgaacagacccctctgacagctctatatctaggctctctcataaaggaggccggatttccgcctggagtagtgaatatcgtgccgggtttcgggccaaccgtgggggctgctataagcagccacccgcaaatcaataagatagctttcactggcagcaccgaagtggggaagctggtgaaggaagcagccagtcgctcaaacctgaaaagagtgaccctcgagctggggggaaaaaacccatgtattgtgtgcgccgatgcggacctcgatttagctgtagagtgtgcacaccagggggtgttcttcaatcaaggacaatgttgcactgccgcttcgcgagtatttgtggaggagcaggtctactccgagttcgtacgccgttctgttgaatatgccaaaaagcgacccgttggggatccgttcgatgtgaagaccgaacagggacctcagattgatcagaagcagtttgataaaattctcgagctgattgaaagcggcaagaaagaaggtgccaaactggagtgtgggggtagcgctatggaggacaagggcctgtttatcaaacccaccgtgtttagtgaggtcaccgacaacatgcgtattgcgaaggaagaaatctttggacccgtccagccaatcctaaaattcaagagtatcgaagaagttataaaaagagccaatagtaccgattatggccttaccgctgcagtcttcaccaaaaacctggacaaagctctgaaactggcttccgcgctggaatctggaacagtctggatcaactgttataacgccctgtatgcccaggccccattcggcggattcaagatgtctggcaacggtcgggagctcggtgagtatgctcttgcagagtacaccgaagtcaagaccgtgactatcaaattaggtgacaagaacccttag

SEQ ID NO: 14537 - DNA, 456 bp, Artificial Sequence
  derived and/or modified sequence
atggccacagccaatggagctgttgagaatgggcaacccgaccgaaaacctcctgccctgcctagacctattagaaacctcgaggtcaaattcacgaagatattcatcaacaacgagtggcatgagtcaaagtcgggtaagaagtttgctacatgcaatccatctactagagagcagatctgtgaagtggaggagggcgacaagcctgacgtggacaaagccgtcgaagccgctcaggtggcctttcagcgcggatctccatggcgcagactggacgcgctgagtcgtggccgtctgctacatcagctcgcagacctggtcgagagggaccgggcaacactagcggctctcgagaccatggacaccggaaagccttttctgcacgcgtttttcatcgacctggaaggctgtatcagaacactgcggttaataaaaagcagcagcaccaagagttag

SEQ ID NO: 14538 - DNA, 1539 bp, Artificial Sequence
  derived and/or modified sequence
atggccaccgccaacggcgccgtggagaacggccagcccgacagaaagccccccgccctgcccagacccatcagaaacctggaggtgaagttcaccaagatcttcatcaacaacgagtggcacgagagcaagagcggcaagaagttcgccacctgcaaccccagcaccagagagcagatctgcgaggtggaggagggcgacaagcccgacgtggacaaggccgtggaggccgcccaggtggccttccagagaggcagcccctggagaagactggacgccctgagcagaggcagactgctgcaccagctggccgacctggtggagagagacagagccaccctggccgccctggagaccatggacaccggcaagcccttcctgcacgccttcttcatcgacctggagggctgcatcagaaccctgagatacttcgccggctgggccgacaagatccagggcaagaccatccccaccgacgacaacgtggtgtgcttcaccagacacgagcccatcggcgtgtgcggcgccatcaccccctggaacttccccctgctgatgctggtgtggaagctggcccccgccctgtgctgcggcaacaccatggtgctgaagcccgccgagcagacccccctgaccgccctgtacctgggcagcctgatcaaggaggccggcttcccccccggcgtggtgaacatcgtgcccggcttcggccccaccgtgggcgccgccatcagcagccacccccagatcaacaagatcgccttcaccggcagcaccgaggtgggcaagctggtgaaggaggccgccagcagaagcaacctgaagagagtgaccctggagctgggcggcaagaacccctgcatcgtgtgcgccgacgccgacctggacctggccgtggagtgcgcccaccagggcgtgttcttcaaccagggccagtgctgcaccgccgccagcagagtgttcgtggaggagcaggtgtacagcgagttcgtgagaagaagcgtggagtacgccaagaagagacccgtgggcgaccccttcgacgtgaagaccgagcagggcccccagatcgaccagaagcagttcgacaagatcctggagctgatcgagagcggcaagaaggagggcgccaagctggagtgcggcggcagcgccatggaggacaagggcctgttcatcaagcccaccgtgttcagcgaggtgaccgacaacatgagaatcgccaaggaggagatcttcggccccgtgcagcccatcctgaagttcaagagcatcgaggaggtgatcaagagagccaacagcaccgactacggcctgaccgccgccgtgttcaccaagaacctggacaaggccctgaagctggccagcgccctggagagcggcaccgtgtggatcaactgctacaacgccctgtacgcccaggcccccttcggcggcttcaagatgagcggcaacggcagagagctgggcgagtacgccctggccgagtacaccgaggtgaagaccgtgaccatcaagctgggcgacaagaacccctag

SEQ ID NO: 14539 - DNA, 456 bp, Artificial Sequence
  derived and/or modified sequence
atggccaccgccaacggcgccgtggagaacggccagcccgacagaaagccccccgccctgcccagacccatcagaaacctggaggtgaagttcaccaagatcttcatcaacaacgagtggcacgagagcaagagcggcaagaagttcgccacctgcaaccccagcaccagagagcagatctgcgaggtggaggagggcgacaagcccgacgtggacaaggccgtggaggccgcccaggtggccttccagagaggcagcccctggagaagactggacgccctgagcagaggcagactgctgcaccagctggccgacctggtggagagagacagagccaccctggccgccctggagaccatggacaccggcaagcccttcctgcacgccttcttcatcgacctggagggctgcatcagaaccctgagactgatcaagagcagcagcaccaagagctag

SEQ ID NO: 14540 - DNA, 726 bp, Artificial Sequence
  derived and/or modified sequence
agacaccgagcagctataggtcctggcagtgagacaagggatggaccccttcgaggacacgctgcggcggctgcgtgaggccttcaactgagggcgcacgcggccggccgagttccgggctgcgcagctccagggcctgggccacttccttcaagaaaacaagcagcttctgcgcgacgtgctggcccaggacctgcataagccagctttcgaggcagacatatctgagctcatcctttgccagaacgaggttgactacgctctcaagaacctgcaggcctggatgaaggatgaaccacggtccacgaacctgttcatgaagctggactcggtcttcatctggaaggaaccctttggcctggtcctcatcatcgcaccctggaactacccactgaacctgaccctggtgctcctggtgggcgccctcgccgcagggagttgcgtggtgctgaagccgtcagaaatcagccagggcacagagaaggtcctggctgaggtgctgccccagtacctggaccagagctgctttgccgtggtgctgggcggaccccaggagacagggcagctgctagagcacaagttggactacatcttcttcacagggagccctcgtgtgggcaagattgtcatgactgctgccaccaagcacctgacgcctgtcaccctggagctggggggcaagaacccctgctacgtggacgacaactgcgacccccagaccgtggc

SEQ ID NO: 14541 - DNA, 561 bp, Artificial Sequence
  derived and/or modified sequence
gagctgggatggtgggcagcagggtcacccgaggatggaccccttcgaggacacgctgcggcggctgcgtgaggccttcaactgagggcgcacgcggccggccgagttccgggctgcgcagctccagggcctgggccacttccttcaagaaaacaagcagcttctgcgcgacgtgctggcccaggacctgcataagccagctttcgaggcagacatatctgagctcatcctttgccagaacgaggttgactacgctctcaagaacctgcaggcctggatgaaggatgaaccacggtccacgaacctgttcatgaagctggactcggtcttcatctggaaggaaccctttggcctggtcctcatcatcgcaccctggaactacccactgaacctgaccctggtgctcctggtgggcgccctcgccgcagggagttgcgtggtgctgaagccgtcagaaatcagccagggcacagagaaggtcctggctgaggtgctgccccagtacctggaccagagctgctttgccgtggtgctgggcggaccccaggagacagggcagct

SEQ ID NO: 14542 - protein, 518 aa, Artificial Sequence
  derived and/or modified sequence
MFLRAGLAALSPLLRSLRPSPVAAMSTGTFVVSQPLNYRGGARVEPADASGTEKAFEPATGRVIATFTCSGEKEVNLAVQNAKAAFKIWSQKSGMERCRILLEAARIIREREDEIATMECINNGKSIFEARLDIDISWQCLEYYAGLAASMAGEHIQLPGGSFGYTRREPLGVCVGIGAWNYPFQIASWKSAPALACGNAMVFKPSPFTPVSALLLAEIYSEAGVPPGLFNVVQGGAATGQFLCQHPDVAKVSFTGSVPTGMKIMEMSAKGIKPVTLELGGKSPLIIFSDCDMNNAVKGALMANFLTQGQVCCNGTRVFVQKEILDKFTEEVVKQTQRIKIGDPLLEDTRMGPLINRPHLERVLGFVKVAKEQGAKVLCGGDIYVPEDPKLKDGYYMRPCVLTNCRDDMTCVKEEIFGPVMSILSFDTEAEVLERANDTTFGLAAGVFTRDIQRAHRVVAELQAGTCFINNYNVSPVELPFGGYKKSGFGRENGRVTIEYYSQLKTVCVEMGDVESAF

SEQ ID NO: 14543 - protein, 424 aa, Artificial Sequence
  derived and/or modified sequence
MERCRILLEAARIIREREDEIATMECINNGKSIFEARLDIDISWQCLEYYAGLAASMAGEHIQLPGGSFGYTRREPLGVCVGIGAWNYPFQIASWKSAPALACGNAMVFKPSPFTPVSALLLAEIYSEAGVPPGLFNVVQGGAATGQFLCQHPDVAKVSFTGSVPTGMKIMEMSAKGIKPVTLELGGKSPLIIFSDCDMNNAVKGALMANFLTQGQVCCNGTRVFVQKEILDKFTEEVVKQTQRIKIGDPLLEDTRMGPLINRPHLERVLGFVKVAKEQGAKVLCGGDIYVPEDPKLKDGYYMRPCVLTNCRDDMTCVKEEIFGPVMSILSFDTEAEVLERANDTTFGLAAGVFTRDIQRAHRVVAELQAGTCFINNYNVSPVELPFGGYKKSGFGRENGRVTIEYYSQLKTVCVEMGDVESAF

SEQ ID NO: 14544 - DNA, 1557 bp, Artificial Sequence
  derived and/or modified sequence
atgtttctacgggccgggttagctgcgctgagcccattgctgcggagcttgcggccatctccagtcgccgcgatgtctacggggaccttcgtggtgtcacagccccttaattatagaggaggcgctagagtggagccggcagacgcctccgggactgagaaggcgttcgagcccgctacagggcgggtgatcgcaacgttcacatgcagtggggaaaaggaagttaacctggcggttcagaatgcgaaagccgcttttaaaatttggtcccagaagtccggtatggagagatgcaggattctgttggaggccgccagaatcataagggagcgcgaggatgagatcgcaacaatggagtgtataaacaacggtaagagcatttttgaggcacggcttgatattgatatttcctggcagtgcctggagtattacgctggtttggctgcatcgatggccggcgagcatatccagctaccagggggcagttttggctacactcgccgggagccattaggggtttgtgtgggaatcggcgcttggaactatccatttcaaattgccagttggaagagcgccccggcactagcctgtggaaatgctatggtgtttaagccttccccgttcactccagtaagcgcactccttctggctgaaatttattctgaagcaggcgtgccacctggactctttaacgttgttcaaggcggagccgccaccggtcagtttctatgtcaacatccagacgtggctaaggtgtcatttaccggcagtgttccaaccgggatgaagattatggagatgtccgctaagggaatcaagccagtcactttggagctgggcgggaaatcccccctaataatttttagcgattgcgatatgaacaatgcggttaagggggcacttatggccaatttcttgactcaggggcaggtgtgctgcaacggtactagagtgtttgtccaaaaggagatcttggataagtttaccgaggaggtcgtgaaacagacacagcgcatcaaaatcggtgacccattgctcgaagatacaaggatgggacccctgataaacaggccccatttggagagggtgctcggcttcgtaaaagttgcaaaggaacaaggagccaaagttctttgcgggggggatatctatgtgccagaagaccccaagcttaaggacggctactacatgagaccctgtgtcctcactaactgtagagatgatatgacctgcgtgaaggaggagatatttggtcctgttatgtccatcctatcgttcgacactgaagcagaggtattggaacgggccaacgatacgacattcgggctggctgccggtgtttttacaagggatatccagcgtgctcacagggtggttgcagaattgcaggccggtacttgtttcattaacaattacaatgtgtcacccgttgagctccctttcggcggatacaagaagagcggattcggaagagagaatgggagagttacaatcgagtattatagccaactgaagactgtttgcgtcgagatgggcgacgtggagagcgcgttctag

SEQ ID NO: 14545 - DNA, 1557 bp, Artificial Sequence
  derived and/or modified sequence
atgttcctgcgggccggcctggccgccctgagccccctgctgcggagcctgcggcccagccctgtggccgccatgagcacaggcacctttgtggtgtcccagcccctgaactaccggggcggggcccgggtggagccagcagatgccagcggcacagagaaggcctttgagcccgccaccggccgggtcatcgccaccttcacctgcagcggggagaaggaggtgaacctggccgtgcagaatgccaaggccgccttcaagatctggagccagaagagcggcatggagcgctgccgcatcctgctggaggccgcccgcatcatccgggagcgggaggatgaaattgccaccatggagtgcatcaacaacgggaagagcatctttgaggcccggctggacatcgacatctcctggcagtgcctggagtactatgccggcctggccgcctccatggccggggagcacatccagctgcccggcggcagctttggctacacccggcgggagcccctgggcgtgtgtgtgggcattggagcctggaactaccccttccagatcgcctcctggaagagcgccccagccctggcctgtggaaatgccatggtgttcaagcccagccccttcacccctgtgtctgccctgctgctggccgagatctacagcgaggccggcgtgcccccaggcctcttcaacgtggtgcagggcggggccgccaccggccagttcctgtgccagcacccagatgtggccaaggtgtccttcaccggctctgtgcccaccggcatgaagatcatggagatgtctgccaagggcatcaagcctgtgaccctggagctgggcggcaagagccccctcatcatcttcagtgactgtgacatgaacaatgctgtgaagggggccctgatggccaacttcctgacccagggccaggtgtgctgcaatggcaccagggtgtttgtgcagaaggagatcctggacaagttcacagaggaggtggtgaagcagacccagaggatcaagattggagaccccctgctggaggacaccaggatgggccccctcatcaaccggccccacctggagcgggtgctgggctttgtgaaggtggccaaggagcagggcgccaaggtgctgtgtggcggggacatctacgtgcctgaggaccccaagctgaaggatggctactacatgaggccctgtgtgctgaccaactgcagagatgacatgacctgtgtgaaggaggagatctttggacctgtgatgagcatcctgagctttgacacagaggccgaggtgctggagcgggccaatgacaccaccttcggcctggccgccggggtcttcacccgggacatccagagggcccaccgggtggtggccgagctgcaggccggcacctgcttcatcaacaactacaacgtgtcccctgtggagctgccctttggaggctacaagaagagcggcttcggccgggagaatggccgggtgaccatcgagtactacagccagctgaagacagtgtgtgtggagatgggagatgtggagagcgccttctag

SEQ ID NO: 14546 - DNA, 2696 bp, Artificial Sequence
  derived and/or modified sequence
ggatcctaggatgcttacatgcaatgatgaacccgaaaacacttgcaaagtgctacgcaaatattgatcacgaagaaggaagtcctcttcccgcctggagactgtgtggggtatggcggggtggtggggagaatgtggtgtcttgctccaccctcctggcgaggggagggcctggcctggaccgcagaggaatcgagtgactgcccctaaaatctcctagaaccgatcccgcggccccgcccctcccgcggccccgcccctcccgcggcccgtcagcctctgccgcggagctgcgtccgccactcatgtttctccgagcaggcctggccgcgctctccccgcttcttcgcagtcttcggccctctcctgtcgccgccatgagcactggcaccttcgtcgtgtcgcagccgctcaattaccgcggcggggcccgcgtggagccggcggacgcctccggtaccgagaaagctttcgagccagcaaccggccgagtgatagctactttcacatgttcaggagaaaaggaagtaaatttggctgttcaaaatgcaaaggctgcttttaaaatatggagtcaaaaatctggcatggagcgttgccgaatccttttggaggctgccaggataataagggaacgggaggatgaaattgctactatggagtgcatcaacaatggcaagtccatctttgaggcccgcttggacattgacatttcctggcagtgcctggagtattatgcgggcttggctgcatccatggctggtgaacacatccagctcccaggtggatcgtttggttataccagaagagaaccacttggggtatgtgtgggaataggagcatggaactacccctttcagattgcctcttggaagtcggctccagcattagcctgtggtaatgccatggtctttaaaccttctccctttacacctgtttctgcattgctactggctgaaatctacagtgaggctggtgtacctcctgggctcttcaatgtggtgcagggaggggctgccacaggccagtttctgtgtcagcatcccgatgtggccaaagtctccttcactggaagtgtgcccactggcatgaagatcatggagatgtcagctaaaggaatcaaacctgttaccttggaacttggaggcaaatctccactcatcatcttctcagactgtgatatgaacaatgctgtaaagggggcgctgatggccaacttcctcacacaaggccaggtttgctgtaatggcacaagagtatttgtgcagaaagaaattcttgataaatttacagaggaagtggtgaaacagacccaaaggattaaaattggagatccccttctggaagatacaaggatgggtccactcatcaaccgaccacacctggagcgagtccttgggtttgtcaaagtggcaaaggagcagggtgctaaagtgttatgtggtggagatatatatgtacctgaagatcccaaattaaaggatggatattacatgagaccttgtgtattaactaattgcagagacgacatgacctgtgtgaaggaagagatctttgggcctgttatgtccattttatcatttgacactgaagctgaggttctagaaagagccaatgataccacttttggactagcagctggcgtctttaccagggacatccaacgggctcatagagtggtagctgagcttcaggctgggacgtgcttcattaacaactataacgtcagcccagtggagttgccctttggtggatataagaagtcaggatttggcagagagaacggccgtgtgacaatcgaatattattcacagctgaagactgtgtgtgtggagatgggtgatgtggaatctgctttttgaaaacctgcagtgaaacctattgacatggccacgctgtggaatgatgtgaattggccctgtttacagaggcagtacaactgaatgttattttacatccagaattttggcgttcagtataagagaatggttcatgttactctttctctctccatcagcttcctcactgaaaatgtgcattaagtgccttgtagatactaatcaagaaagctgtgattctcctcaaagcgtatttttgtgaaatcttttaagagccagtaacatacttctagagaacaggaaaagagactaggataatacatcttccacacatttggcccactgataatgttaattctctggcgtatttcaaagaacttgttcctggctgatccaagtgcagtggtatttacaactaattgatcacaaccagtttgtagatttctttgttccttctccattcccactgcttcacttgcctagtcttgaagaaaaaaaacaaaaaacaaaaaaaaaccttgttcctttataggttcctggtagaatcagtagagatgatttcagctcattgacatttttttaagctatatccccttgtcattccattgagaaagctgacaactgggatagggaggggattagataatagatggggtcaaattctgtgtgaatgtgaacttgcctagtaagcactttgtctctgttcactactgcgatagaggaaatctatctccctatcttgggtccttgaactacagcctgctgtcttacaccagtggagctaccctttaaatgtacaaattatttgtatgctaatgtaatatggtgaaattaaaataaatcacactgttaattgtt

SEQ ID NO: 14547 - DNA, 1674 bp, Artificial Sequence
  derived and/or modified sequence
gtttcctgtgttctgcagcgttgacttgagcacaagacagtgacagtggagagtctaaggccgagtgatagctactttcacatgttcaggagaaaaggaagtaaatttggctgttcaaaatgcaaaggctgcttttaaaatatggagtcaaaaatctggcatggagcgttgccgaatccttttggaggctgccaggataataagggaacgggaggatgaaattgctactatggagtgcatcaacaatggcaagtccatctttgaggcccgcttggacattgacatttcctggcagtgcctggagtattatgcgggcttggctgcatccatggctggtgaacacatccagctcccaggtggatcgtttggttataccagaagagaaccacttggggtatgtgtgggaataggagcatggaactacccctttcagattgcctcttggaagtcggctccagcattagcctgtggtaatgccatggtctttaaaccttctccctttacacctgtttctgcattgctactggctgaaatctacagtgaggctggtgtacctcctgggctcttcaatgtggtgcagggaggggctgccacaggccagtttctgtgtcagcatcccgatgtggccaaagtctccttcactggaagtgtgcccactggcatgaagatcatggagatgtcagctaaaggaatcaaacctgttaccttggaacttggaggcaaatctccactcatcatcttctcagactgtgatatgaacaatgctgtaaagggggcgctgatggccaacttcctcacacaaggccaggtttgctgtaatggcacaagagtatttgtgcagaaagaaattcttgataaatttacagaggaagtggtgaaacagacccaaaggattaaaattggagatccccttctggaagatacaaggatgggtccactcatcaaccgaccacacctggagcgagtccttgggtttgtcaaagtggcaaaggagcagggtgctaaagtgttatgtggtggagatatatatgtacctgaagatcccaaattaaaggatggatattacatgagaccttgtgtattaactaattgcagagacgacatgacctgtgtgaaggaagagatctttgggcctgttatgtccattttatcatttgacactgaagctgaggttctagaaagagccaatgataccacttttggactagcagctggcgtctttaccagggacatccaacgggctcatagagtggtagctgagcttcaggctgggacgtgcttcattaacaactataacgtcagcccagtggagttgccctttggtggatataagaagtcaggatttggcagagagaacggccgtgtgacaatcgaatattattcacagctgaagactgtgtgtgtggagatgggtgatgtggaatctgctttttgaaaacctgcagtgaaacctattgacatggccacgctgtggaatgatgtgaattggccctgtttacagaggcagtacaactgaatgttattttacatccagaattttggcgttcagtataagagaatggttcatgttactctttctctctccatcagcttcctcactgaaaatgtgcattaagtgccttgtagatactaatcaagaaagctgtgattctcctcaaagcgtatttttgtgaa

SEQ ID NO: 14548 - DNA, 1557 bp, Artificial Sequence
  derived and/or modified sequence
atgttcctgcgggccggcctggccgccctgagccccctgctgcggtcgctgcgtccttctccagtggcggccatgagcacaggaacctttgttgtttcccagcccctgaattatcggggaggcgcccgagtggaaccagctgatgcctcaggcacggaaaaggcttttgagccagccaccggccgtgtgatcgcaactttcacgtgctcgggagagaaagaggtcaatctcgccgttcagaacgcaaaggcagcattcaagatctggtctcagaagtctggcatggaacggtgtagaatattactggaggctgccaggataatcagggagcgagaggatgaaatcgctaccatggaatgtattaataatggcaagtccatctttgaagctcgcctggacatagacatctcatggcagtgcctggagtactacgccggattggccgccagtatggcaggagaacacattcaactgccaggcgggagtttcgggtatacccggcgggaacccttgggcgtttgcgttggcattggagcctggaactatcccttccaaattgcctcttggaagtcagctcctgccctcgcgtgtggaaatgcaatggtcttcaaaccatcccccttcacgcccgtgagcgcactgttactggcagagatctattccgaggctggcgtgcctcctggcctctttaacgtggtccagggaggagctgcgacaggccaatttttatgtcagcatcccgatgtcgccaaggttagcttcaccggctccgttcccacggggatgaaaatcatggagatgagcgctaaagggattaagcccgtcaccctcgagttgggcggaaaatcgcctcttattatcttctccgactgcgacatgaataacgccgtcaagggggccctgatggctaatttcctgacacaaggccaggtttgttgcaatggaacccgagtgtttgttcaaaaggagatcctagataagtttacggaggaagtggttaagcaaacacaacggatcaaaataggggatccccttctggaagatacccgcatgggacctctgattaaccggccacatttagaacgtgtattagggtttgttaaagtagcaaaggagcaaggggccaaagtcctgtgcggaggagacatttatgtccctgaagaccccaaattgaaggatggctactacatgcggccttgtgtgttgactaattgtcgggacgatatgacttgtgttaaagaagagatatttggtcctgttatgtctattctgtcgtttgacacagaagctgaagttcttgagcgcgccaacgacaccacatttgggcttgccgctggcgtttttacacgcgacatacagcgggcgcatcgagtcgttgcagagctccaagcaggcacatgcttcataaataattacaacgtcagcccagtggagctgccgttcggaggctacaagaaaagcgggtttggccgggaaaacggcagggtgacaattgagtattattcccagctcaagaccgtgtgcgttgagatgggagatgtagaaagcgcattctag

SEQ ID NO: 14549 - DNA, 1557 bp, Artificial Sequence
  derived and/or modified sequence
atgtttttacgcgctgggctcgctgcactgtctcctctgcttaggagcctccggccatcacccgttgcggctatgagtactgggacctttgtggtttctcagccccttaattatcggggtggagccagggtcgagcctgcggacgccagcggaacggagaaagctttcgaaccggcaaccggacgtgtgatcgcaactttcacttgctccggagagaaagaagtaaatctcgctgtacagaacgctaaagccgctttcaaaatttggtcgcaaaagagcggcatggagcgatgtagaattcttctggaagcggcaaggattattcgcgagagagaggacgagatcgccactatggagtgcattaataacgggaagtcaatctttgaagctcggctcgatatcgatatcagctggcaatgcctggaatactacgccggtttagctgcaagcatggcaggggagcacatacagttgcctgggggaagcttcgggtatactagacgggaacctctgggcgtttgcgtcggcattggggcatggaactatccctttcagattgctagctggaaaagtgcccctgcgctagcttgtgggaatgccatggtatttaagccgagcccttttacccctgtgagtgccttactcctggcagagatctactccgaggcaggggtccctcccggactgttcaatgtggtgcaggggggagctgctactggccagttcctctgccagcatccagatgtcgcaaaggtgagcttcacaggtagtgtgccgactggaatgaaaatcatggagatgtccgcgaaggggatcaaacccgtgaccctggaattggggggaaagagccccctcatcatcttttccgactgcgacatgaacaacgctgtgaaaggggcactcatggcaaattttctgacacagggccaggtgtgctgtaacgggactagggtgtttgtgcagaaagagatcctggacaaattcactgaggaggtggttaagcaaacccagcgtataaagattggagaccctctactcgaggacacgcgcatgggacctttgataaaccgccctcacctggagagggtgctgggatttgtgaaagtggcaaaagaacagggcgctaaggtcctgtgcggcggagatatctacgtacccgaggaccctaaattgaaggacgggtactacatgaggccctgcgttctgaccaactgtcgcgacgacatgacatgcgtgaaagaagagatcttcggaccggttatgtctatcctgagcttcgacacagaggccgaagtgcttgagcgggctaacgacaccacctttggactggctgccggtgtgtttactcgggacatccagagggcccacagggtggtcgcagaactgcaggccggtacctgctttatcaacaattataacgttagccctgtagagctccctttcggcggatacaagaagtccggcttcggacgcgaaaacggacgagttacaattgaatactactcacagctgaagaccgtgtgtgtggaaatgggagacgttgagagcgccttttag

SEQ ID NO: 14550 - DNA, 1557 bp, Artificial Sequence
  derived and/or modified sequence
atgttcctgagagccggcctggccgccctgagccccctgctgagaagcctgagacccagccccgtggccgccatgagcaccggcaccttcgtggtgagccagcccctgaactacagaggcggcgccagagtggagcccgccgacgccagcggcaccgagaaggccttcgagcccgccaccggcagagtgatcgccaccttcacctgcagcggcgagaaggaggtgaacctggccgtgcagaacgccaaggccgccttcaagatctggagccagaagagcggcatggagagatgcagaatcctgctggaggccgccagaatcatcagagagagagaggacgagatcgccaccatggagtgcatcaacaacggcaagagcatcttcgaggccagactggacatcgacatcagctggcagtgcctggagtactacgccggcctggccgccagcatggccggcgagcacatccagctgcccggcggcagcttcggctacaccagaagagagcccctgggcgtgtgcgtgggcatcggcgcctggaactaccccttccagatcgccagctggaagagcgcccccgccctggcctgcggcaacgccatggtgttcaagcccagccccttcacccccgtgagcgccctgctgctggccgagatctacagcgaggccggcgtgccccccggcctgttcaacgtggtgcagggcggcgccgccaccggccagttcctgtgccagcaccccgacgtggccaaggtgagcttcaccggcagcgtgcccaccggcatgaagatcatggagatgagcgccaagggcatcaagcccgtgaccctggagctgggcggcaagagccccctgatcatcttcagcgactgcgacatgaacaacgccgtgaagggcgccctgatggccaacttcctgacccagggccaggtgtgctgcaacggcaccagagtgttcgtgcagaaggagatcctggacaagttcaccgaggaggtggtgaagcagacccagagaatcaagatcggcgaccccctgctggaggacaccagaatgggccccctgatcaacagaccccacctggagagagtgctgggcttcgtgaaggtggccaaggagcagggcgccaaggtgctgtgcggcggcgacatctacgtgcccgaggaccccaagctgaaggacggctactacatgagaccctgcgtgctgaccaactgcagagacgacatgacctgcgtgaaggaggagatcttcggccccgtgatgagcatcctgagcttcgacaccgaggccgaggtgctggagagagccaacgacaccaccttcggcctggccgccggcgtgttcaccagagacatccagagagcccacagagtggtggccgagctgcaggccggcacctgcttcatcaacaactacaacgtgagccccgtggagctgcccttcggcggctacaagaagagcggcttcggcagagagaacggcagagtgaccatcgagtactacagccagctgaagaccgtgtgcgtggagatgggcgacgtggagagcgccttctag

SEQ ID NO: 14551 - protein, 663 aa, Artificial Sequence
  derived and/or modified sequence
MGRYRIRVATGAWLFSGSYNRVQLWLVGTRGEAELELQLRPARGEEEEFDHDVAEDLGLLQFVRLRKHHWLVDDAWFCDRITVQGPGACAEVAFPCYRWVQGEDILSLPEGTARLPGDNALDMFQKHREKELKDRQQIYCWATWKEGLPLTIAADRKDDLPPNMRFHEEKRLDFEWTLKAGALEMALKRVYTLLSSWNCLEDFDQIFWGQKSALAEKVRQCWQDDELFSYQFLNGANPMLLRRSTSLPSRLVLPSGMEELQAQLEKELQNGSLFEADFILLDGIPANVIRGEKQYLAAPLVMLKMEPNGKLQPMVIQIQPPNPSSPTPTLFLPSDPPLAWLLAKSWVRNSDFQLHEIQYHLLNTHLVAEVIAVATMRCLPGLHPIFKFLIPHIRYTMEINTRARTQLISDGGIFDKAVSTGGGGHVQLLRRAAAQLTYCSLCPPDDLADRGLLGLPGALYAHDALRLWEIIARYVEGIVHLFYQRDDIVKGDPELQAWCREITEVGLCQAQDRGFPVSFQSQSQLCHFLTMCVFTCTAQHAAINQGQLDWYAWVPNAPCTMRMPPPTTKEDVTMATVMGSLPDVRQACLQMAISWHLSRRQPDMVPLGHHKEKYFSGPKPKAVLNQFRTDLEKLEKEITARNEQLDWPYEYLKPSCIENSVTI

SEQ ID NO: 14552 - DNA, 1992 bp, Artificial Sequence
  derived and/or modified sequence
atgggccggtatcgtataagggtagcgactggcgcatggctgttttcaggcagttacaatcgggttcaactctggctggtgggtacccgtggggaagccgaacttgagcttcagcttaggcctgcccgcggcgaggaagaagaattcgaccatgatgtggccgaggatctgggcttgctgcaatttgttcgtctgcgaaaacaccactggctggttgacgacgcttggttttgtgacagaataactgtccaaggaccaggcgcatgcgcagaagtagcttttccatgctataggtgggtgcagggggaggacatcttgagccttcctgagggcaccgcaagactgcccggcgacaacgcactggatatgttccaaaaacaccgagagaaagaactgaaagaccgacagcaaatctactgctgggctacctggaaggaaggcctgccgctgaccatcgctgcagatagaaaagacgatcttccgccgaacatgcggttccacgaggagaaacggctcgattttgaatggactctaaaggctggggcattggaaatggcgctcaagagagtttatactctgctgtcgagttggaactgtcttgaagacttcgaccagatattctggggacagaagtcagccctggcggaaaaagttcgacagtgctggcaggacgatgaactattctcttaccagttccttaatggcgcaaatcctatgctgctgagacgcagcacctctctgccctcacgcctggtgctccccagtggaatggaggagttgcaggcacagctggaaaaggagctccagaacggctccttatttgaagccgatttcatccttttagacggtattccagccaatgtcattcgtggagagaaacagtacctcgccgcacccctcgtcatgctcaagatggaacccaacggaaagctgcagccaatggtgattcaaatccagccaccgaatccatccagccctacccctaccctgtttcttccctcagacccacctctggcttggctgctggcgaaatcttgggtcagaaactccgatttccagttgcacgaaattcagtaccatctgttgaatactcacttggtagccgaagtgatcgctgtcgcaaccatgcggtgcttgccagggctgcatccgatatttaagtttctaatcccacatatccgatacactatggaaatcaacacccgggcccgaacgcagttgatcagcgacggcggcatattcgataaagctgtgagcaccgggggggggggacacgtacagctcttacgccgggctgctgcccagttaacctattgttctctctgtccacccgacgacttggccgaccgagggctattaggcttacccggagcattgtacgcgcacgatgcactccgcctttgggaaattattgctcgctacgtcgaaggaattgtccacctgttctaccagagggatgatattgtgaaaggcgaccccgaattgcaggcatggtgccgcgagatcaccgaagtgggcctctgccaagcccaagacaggggatttcctgtgtccttccaaagtcagtcacagctgtgtcacttccttaccatgtgtgtgtttacgtgcaccgcccagcatgccgccattaaccagggtcagctggactggtacgcctgggtcccgaacgcaccatgcacaatgagaatgccacctcccacgaccaaggaggatgttacaatggctactgttatggggagcttacccgatgttcggcaggcatgtttgcagatggctatcagctggcacttgagtaggcgccagccggacatggtccccctcggacatcacaaggagaagtatttctccggtcccaagccaaaggcagtgttgaatcagttccggaccgaccttgagaaactggagaaagagatcaccgcccggaacgaacagttggattggccctatgagtacctgaagccctcctgcatcgaaaattcagtcacaatctag

SEQ ID NO: 14553 - DNA, 1992 bp, Artificial Sequence
  derived and/or modified sequence
atgggccgctaccgcatccgggtggccaccggggcctggctgttcagcggcagctacaacagagtgcagctgtggctggtgggcaccagaggagaggccgagctggagctgcagctgcggcctgcccggggggaggaggaggagtttgaccatgatgtggccgaggacctgggcctgctgcagtttgtgcggctgaggaagcaccactggctggtggatgatgcctggttctgtgaccgcatcaccgtgcagggccctggggcctgtgccgaggtggccttcccctgctaccgctgggtgcagggcgaggacatcctgagcctgcctgagggcacagcccggctgcccggggacaatgccctggacatgttccagaagcaccgggagaaggagctgaaggaccggcagcagatctactgctgggccacctggaaggagggcctgcccctgaccatcgctgctgacaggaaggatgacctgccccccaacatgaggttccacgaggagaagaggctggactttgagtggaccctgaaggccggggccctggagatggccctgaagagggtgtacaccctgctgagctcctggaactgcctggaggactttgaccagatcttctggggccagaagagcgccctggccgagaaggtgcggcagtgctggcaggatgatgagctgttctcctaccagttcctgaatggagccaaccccatgctgctgcggcgcagcaccagcctgcccagccggctggtgctgcccagcggcatggaggagctgcaggcccagctggagaaggagctgcagaatggcagcctgtttgaggccgacttcatcctgctggatggcatcccagccaacgtcatccggggggagaagcagtacctggccgcccccctggtgatgctgaagatggagcccaacgggaagctgcagcccatggtgatccagatccagccccccaaccccagcagccccacccccaccctcttcctgcccagcgacccccccctggcctggctgctggccaagtcctgggtgaggaacagcgacttccagctgcacgagatccagtaccacctgctgaacacccacctggtggccgaggtgattgctgtggccaccatgcgctgcctgcccggcctgcaccccatcttcaagttcctgatcccccacatccgctacaccatggagatcaacacccgggcccggacccagctgatcagtgatggcggcatctttgacaaggctgtgtccactggaggcggcggccacgtgcagctgctgcggcgggctgctgcccagctgacctactgcagcctgtgccccccagatgacctggccgaccggggcctgctgggcctgcccggggccctgtatgcccatgatgccctgcggctgtgggagatcatcgcccgctacgtggagggcatcgtgcacctgttctaccagagagatgacatcgtgaagggggaccctgagctgcaggcctggtgccgggagatcacagaggtgggcctgtgccaggcccaggaccggggcttccctgtgtccttccagagccagagccagctgtgccacttcctgaccatgtgtgtgttcacctgcacagcccagcacgccgccatcaaccagggccagctggactggtacgcctgggtgcccaatgccccctgcaccatgaggatgcccccacccaccaccaaggaggatgtgaccatggccaccgtgatgggcagcctgcctgatgtgcggcaggcctgcctgcagatggccatctcctggcacctgagccggcggcagcctgacatggtgcccctgggccaccacaaggagaagtacttcagcggccccaagcccaaggctgtgctgaaccagttcagaacagacctggagaagctggagaaggagatcacagccagaaatgagcagctggactggccctatgagtacctgaagcccagctgcatcgagaacagcgtgaccatctag

SEQ ID NO: 14554 - DNA, 1992 bp, Artificial Sequence
  derived and/or modified sequence
atgggccggtaccggatccgggtggccaccggcgcctggctgttctccggaagctataaccgagtgcagctatggcttgtcggaacaaggggagaggccgagctcgagctccagttgaggcctgcccgcggcgaagaggaagagttcgatcatgacgttgccgaggacctgggtttacttcagttcgttcgcttgcggaaacaccactggctcgtggatgatgcttggttctgcgataggattaccgtccagggccccggagcctgtgcggaggtcgcctttccatgctatagatgggtccagggggaggacatattgtctctgccggagggaactgcccggctgcccggggataacgcactagatatgttccagaagcatagagaaaaggagttgaaagatcgccagcagatctattgttgggctacctggaaggaggggcttcccctcaccattgccgctgaccgcaaagatgatctgcctcctaacatgcgattccatgaagaaaaacggcttgacttcgagtggactcttaaagccggtgcattggaaatggcactgaagagggtgtacacactgctctccagttggaactgtctggaggacttcgatcaaatcttttggggtcagaaatccgcgctggcagaaaaggtgagacagtgctggcaagacgatgaactgttcagttatcagttcttaaacggcgctaacccgatgttgctgaggagatccactagcctgccatcacgcctggttctgccctccggaatggaagaactccaggcccaactcgaaaaggagctacagaacgggtcccttttcgaagccgacttcattcttttggacgggattcccgccaacgtcattaggggagagaaacaatacttggccgcccctctggtgatgttaaagatggagccgaatggcaagcttcagcccatggtgatccagatccagcccccaaacccgtcttctcccactccaactttgtttctcccctctgacccccccctggcttggctcctcgccaagtcatgggtgcggaatagcgattttcagttacatgaaattcagtatcacctcctgaacacccacttagtggcagaagtgattgccgtggctaccatgcggtgtttacctggcctgcaccctatctttaaattcttaatccctcatatccgatacaccatggagattaatactcgtgccaggacccagctgatttccgacggaggaatctttgacaaggcagttagcaccggtggtggaggccatgtgcaactcctgcgccgagctgctgcccaattaacctattgttccttgtgccccccggacgacctggccgacaggggactcctcggtttgccaggtgccctgtatgcccatgatgccttgcgactgtgggagatcattgcacgatatgtggaaggaatcgtgcatttgttctaccagagagacgatatagtgaaaggggatcccgaactccaggcttggtgcagagagattactgaagtgggcctgtgccaggcacaagataggggctttcccgtaagcttccagagtcagagccagttgtgtcatttcctcaccatgtgcgtgtttacttgtacggcacagcatgctgctattaatcaggggcaactagattggtacgcatgggtacccaacgcgccatgtacaatgcgaatgccgcctcccaccactaaggaggatgtcaccatggcgactgtgatgggctcattgccagacgtgcgccaggcttgtttacaaatggcgatttcctggcacctgtcccgtaggcagccagacatggtccctctggggcatcataaggaaaaatatttcagcggaccgaaacccaaggccgttctaaaccagttccgcactgaccttgaaaagctcgagaaggagatcaccgcccgcaatgagcagcttgattggccatatgaatacttaaaaccgagttgcatcgaaaatagtgtgactatctag

SEQ ID NO: 14555 - DNA, 1992 bp, Artificial Sequence
  derived and/or modified sequence
atggggaggtataggattagagtcgccacaggcgcttggctctttagcggtagctataatagggtgcagctctggctggtaggcacgagaggggaagcggaactggaattgcaactcaggcctgccaggggagaggaagaggagttcgaccacgacgtggctgaggacctggggcttctgcagttcgtgagactccgaaaacaccattggttggtcgatgatgcctggttctgtgacagaatcacggtccagggtcccggtgcatgcgctgaagtcgcgttcccatgctatcgttgggtccagggagaagatattctctcattgccggagggcaccgcaagattgccaggggataacgcacttgatatgttccaaaaacatagggagaaggagctcaaggacagacagcagatctactgttgggccacctggaaagagggactgccgctgaccatagcagctgaccgaaaggatgatctgccacccaacatgaggttccacgaggaaaaaaggcttgatttcgaatggactctgaaagcaggggcacttgagatggctctgaaaagggtgtacaccctgctcagcagttggaattgcttagaagacttcgatcagatcttctggggccagaaaagtgcccttgccgagaaggttcggcagtgttggcaggatgacgagttgttctcctatcagttcttaaacggtgccaacccaatgttgttgagaagatctactagcctgccatcccggctcgtcctgcctagtggaatggaggaacttcaggctcagctggagaaggagctgcagaatggcagcctattcgaggcagacttcattctgctggatggaattcccgctaatgtcatccggggagagaagcagtatcttgccgcaccgctggtaatgctgaaaatggaaccaaatggcaaactccagccaatggttatccagattcagccccctaacccaagctccccaactccaacgctgttcctcccctcagacccccctctggcatggttacttgcaaagtcctgggtgcggaactccgatttccagctccacgagatccaataccatcttctcaacactcatctggtggccgaggtgatagcagtggctacaatgcggtgtcttcccggactgcaccctatcttcaaattcctaattccacacattcggtacactatggaaatcaataccagagcgagaactcagctaatctccgatgggggtattttcgacaaggccgtgagcaccggcggagggggtcacgttcagttgctgcgtagagccgcagctcagctcacatattgcagtctgtgtcctcccgacgacctcgctgacaggggacttctgggcctgcccggtgctttgtacgcccacgatgctcttcggctgtgggagatcattgccaggtatgtggagggaattgtgcacctgttttatcagcgggacgacatcgttaagggggatccggaactgcaagcctggtgccgagagatcacagaggtgggcctgtgccaggcccaggaccgtgggttccctgtgagctttcagagccagtcccaactgtgccactttctgactatgtgtgtatttacatgtactgctcagcatgccgcaatcaatcagggacagttagattggtatgcgtgggtgccaaacgcaccatgtactatgcgtatgccgcctcccacgacaaaagaggatgtgacgatggccacagtgatgggcagtctccccgatgtgcgccaggcctgcttgcagatggctatcagttggcatctgtctcgccgacaaccagacatggtccccttggggcatcataaagagaaatattttagtggacccaagcctaaagctgttttaaaccagtttcgcactgacctggagaaacttgagaaagaaattacagctcgaaatgaacagctcgattggccctatgagtatctgaaacccagttgtattgaaaatagcgtgactatctag

SEQ ID NO: 14556 - DNA, 2358 bp, Artificial Sequence
  derived and/or modified sequence
cccgggaatcgcacaggacccggctcccctcgcctaagctgctggggggcgccatgggccgctaccgcatccgcgtggccaccggggcctggctcttctccgggtcgtacaaccgcgtgcagctttggctggtcgggacgcgcggggaggcggagctggagctgcagctgcggcccgcgcggggcgaggaggaggagtttgatcatgacgttgcagaggacttggggctcctgcagttcgtgaggctgcgcaagcaccactggctggtggacgacgcgtggttctgcgaccgcatcacggtgcagggccctggagcctgcgcggaggtggccttcccgtgctaccgctgggtgcagggcgaggacatcctgagcctgcccgagggcaccgcccgcctgccaggagacaatgctttggacatgttccagaagcatcgagagaaggaactgaaagacagacagcagatctactgctgggccacctggaaggaagggttacccctgaccatcgctgcagaccgtaaggatgatctacctccaaatatgagattccatgaggagaagaggctggactttgaatggacactgaaggcaggggctctggagatggccctcaaacgtgtttacaccctcctgagctcctggaactgcctagaagactttgatcagatcttctggggccagaagagtgccctggctgagaaggttcgccagtgctggcaggatgatgagttgttcagctaccagttcctcaatggtgccaaccccatgctgttgagacgctcgacctctctgccctccaggctagtgctgccctcggggatggaagagcttcaggctcaactggagaaagaacttcagaatggttccctgtttgaagctgacttcatccttctggatggaattccagccaacgtgatccgaggagagaagcaatacctggctgcccccctcgttatgctgaagatggagcccaatgggaagctgcagcccatggtcatccagattcagcctcccaaccccagctctccaaccccaacactgttcctgccctcagaccccccacttgcctggctcctggcaaagtcctgggtccgaaattcagatttccaactgcacgagatccagtatcacttgctgaacactcacctggtggctgaggtcatcgctgtcgccaccatgcggtgcctcccaggactgcaccccatcttcaagttcctgatcccccatatccgctacaccatggaaatcaacacccgggcccggacccaactcatctcagatggaggaatttttgataaggcagtgagcacaggtggagggggccatgtacagttgctccgtcgggcggcagctcagctgacctactgctccctctgtcctcctgacgacctggctgaccggggcctgctgggactcccaggtgctctctatgcccatgatgctttacggctctgggagatcattgccaggtatgtggaggggatcgtccacctcttctaccaaagggatgacatagtgaagggggaccctgagctgcaggcctggtgtcgggagatcacggaggtggggctgtgccaggcccaggaccgaggtttccctgtctccttccagtcccagagtcaactctgccatttcctcaccatgtgcgtcttcacgtgcactgcccagcatgccgccatcaaccagggccagctggactggtatgcctgggtccctaatgctccatgcacaatgcggatgcccccacccaccaccaaggaagatgtgacgatggccacagtgatggggtcactacctgatgtccggcaggcctgtcttcaaatggccatctcatggcatctgagtcgccgccagccagacatggtgcctctggggcaccacaaagaaaaatatttctcaggccccaagcccaaagctgtgctaaaccaattccgaacagatttggaaaagctggaaaaggagattacagcccggaatgagcaacttgactggccctatgaatatctgaagcccagctgcatagagaacagtgtcaccatctgagccctagagtgactctacctgcaagatttcacatcagctttaggactgacatttctatcttgaatttcatgctttcctaaagtctctgctgctaaggctctatttcctcccccagttaaaccccctacattagtatcccactagcccaggggagcagtaaactttctctgcaaagactagatccttttttacgctttgcagaccgcatagtcactgtctcaactactcagctctcctgctgcagcatgaaggcagccacagacaacatggaaatgagtgtgactatgttccaataaaactttatggacactga

SEQ ID NO: 14557 - DNA, 1992 bp, Artificial Sequence
  derived and/or modified sequence
atgggcagatacagaatcagagtggccaccggcgcctggctgttcagcggcagctacaacagagtgcagctgtggctggtgggcaccagaggcgaggccgagctggagctgcagctgagacccgccagaggcgaggaggaggagttcgaccacgacgtggccgaggacctgggcctgctgcagttcgtgagactgagaaagcaccactggctggtggacgacgcctggttctgcgacagaatcaccgtgcagggccccggcgcctgcgccgaggtggccttcccctgctacagatgggtgcagggcgaggacatcctgagcctgcccgagggcaccgccagactgcccggcgacaacgccctggacatgttccagaagcacagagagaaggagctgaaggacagacagcagatctactgctgggccacctggaaggagggcctgcccctgaccatcgccgccgacagaaaggacgacctgccccccaacatgagattccacgaggagaagagactggacttcgagtggaccctgaaggccggcgccctggagatggccctgaagagagtgtacaccctgctgagcagctggaactgcctggaggacttcgaccagatcttctggggccagaagagcgccctggccgagaaggtgagacagtgctggcaggacgacgagctgttcagctaccagttcctgaacggcgccaaccccatgctgctgagaagaagcaccagcctgcccagcagactggtgctgcccagcggcatggaggagctgcaggcccagctggagaaggagctgcagaacggcagcctgttcgaggccgacttcatcctgctggacggcatccccgccaacgtgatcagaggcgagaagcagtacctggccgcccccctggtgatgctgaagatggagcccaacggcaagctgcagcccatggtgatccagatccagccccccaaccccagcagccccacccccaccctgttcctgcccagcgacccccccctggcctggctgctggccaagagctgggtgagaaacagcgacttccagctgcacgagatccagtaccacctgctgaacacccacctggtggccgaggtgatcgccgtggccaccatgagatgcctgcccggcctgcaccccatcttcaagttcctgatcccccacatcagatacaccatggagatcaacaccagagccagaacccagctgatcagcgacggcggcatcttcgacaaggccgtgagcaccggcggcggcggccacgtgcagctgctgagaagagccgccgcccagctgacctactgcagcctgtgcccccccgacgacctggccgacagaggcctgctgggcctgcccggcgccctgtacgcccacgacgccctgagactgtgggagatcatcgccagatacgtggagggcatcgtgcacctgttctaccagagagacgacatcgtgaagggcgaccccgagctgcaggcctggtgcagagagatcaccgaggtgggcctgtgccaggcccaggacagaggcttccccgtgagcttccagagccagagccagctgtgccacttcctgaccatgtgcgtgttcacctgcaccgcccagcacgccgccatcaaccagggccagctggactggtacgcctgggtgcccaacgccccctgcaccatgagaatgcccccccccaccaccaaggaggacgtgaccatggccaccgtgatgggcagcctgcccgacgtgagacaggcctgcctgcagatggccatcagctggcacctgagcagaagacagcccgacatggtgcccctgggccaccacaaggagaagtacttcagcggccccaagcccaaggccgtgctgaaccagttcagaaccgacctggagaagctggagaaggagatcaccgccagaaacgagcagctggactggccctacgagtacctgaagcccagctgcatcgagaacagcgtgaccatctag

SEQ ID NO: 14558 - protein, 674 aa, Artificial Sequence
  derived and/or modified sequence
MPSYTVTVATGSQWFAGTDDYIYLSLVGSAGCSEKHLLDKPFYNDFERGAVDSYDVTVDEELGEIQLVRIEKRKYWLNDDWYLKYITLKTPHGDYIEFPCYRWITGDVEVVLRDGRAKLARDDQIHILKQHRRKELETRQKQYRWMEWNPGFPLSIDAKCHKDLPRDIQFDSEKGVDFVLNYSKAMENLFINRFMHMFQSSWNDFADFEKIFVKISNTISERVMNHWQEDLMFGYQFLNGCNPVLIRRCTELPEKLPVTTEMVECSLERQLSLEQEVQQGNIFIVDFELLDGIDANKTDPCTLQFLAAPICLLYKNLANKIVPIAIQLNQIPGDENPIFLPSDAKYDWLLAKIWVRSSDFHVHQTITHLLRTHLVSEVFGIAMYRQLPAVHPIFKLLVAHVRFTIAINTKAREQLICECGLFDKANATGGGGHVQMVQRAMKDLTYASLCFPEAIKARGMESKEDIPYYFYRDDGLLVWEAIRTFTAEVVDIYYEGDQVVEEDPELQDFVNDVYVYGMRGRKSSGFPKSVKSREQLSEYLTVVIFTASAQHAAVNFGQYDWCSWIPNAPPTMRAPPPTAKGVVTIEQIVDTLPDRGRSCWHLGAVWALSQFQENELFLGMYPEEHFIEKPVKEAMARFRKNLEAIVSVIAERNKKKQLPYYYLSPDRIPNSVAI

SEQ ID NO: 14559 - DNA, 2025 bp, Artificial Sequence
  derived and/or modified sequence
atgccctcatacaccgtgactgtcgctactggatcacagtggtttgctggtacggacgactatatctatctgtctttggttggctctgcaggctgttccgagaagcacttacttgacaagcccttttacaacgatttcgaaagaggtgccgtggatagctatgatgtgacagttgacgaagaattgggcgaaattcagctcgttcggattgagaagcgcaaatattggctgaacgacgattggtaccttaagtacatcacactaaagaccccccacggcgattatattgagttcccatgctatagatggattaccggagatgtggaagtggtgctgagggacggcagagccaagttggcaagggatgaccagatccacatcttgaagcagcaccggcgcaaagaactcgaaacaaggcagaaacagtaccgctggatggaatggaatcctggtttccccttgtcaattgatgcgaagtgtcataaggacctgccacgggacatacagtttgattccgagaaaggcgttgacttcgttctgaactactcaaaggccatggaaaacctgttcattaaccgatttatgcatatgtttcagtcgtcctggaatgattttgcagattttgaaaagatattcgtaaaaatctcaaataccattagtgagagagtgatgaatcactggcaagaggatctcatgttcggctatcagtttctgaacggctgtaatcccgtgcttatcaggcgatgcaccgaactgcctgaaaaactccctgtgacaacagaaatggttgaatgttccttggaacgacagctctcccttgagcaggaggtgcaacagggcaacatttttatcgtggacttcgaactattagacggtatcgacgcgaacaagactgacccatgtaccctccagttcctggccgctcccatatgtcttctgtacaagaacctggccaacaaaatcgtgcctattgccatccaactaaatcagattcccggcgatgagaaccccatcttccttcctagcgatgctaagtacgattggcttctggcaaaaatatgggttagaagctccgactttcacgtgcaccagactattacccacctgttgagaacccatctggtgtcagaggtcttcgggatcgcaatgtataggcagctgcctgccgtgcaccctatttttaaactgctggtggcccacgttcgcttcactattgccatcaataccaaagcacgtgaacagttgatttgcgagtgcggactctttgataaagcaaatgctaccggtggcgggggacatgtgcagatggtacagcgcgccatgaaggaccttacgtacgcatcactctgtttcccagaggcaataaaagcacgggggatggaaagtaaggaggacataccctactacttttatcgagacgatggtctactggtgtgggaagccatacgcacatttacagccgaggttgttgacatctattacgagggagatcaagtcgttgaagaggatccagagctccaggattttgtcaatgacgtttacgtctatgggatgaggggccggaaatcctctggttttccgaagtccgtgaagtcacgggaacagctcagcgaatacttgaccgtggtgatatttacggcctcagcccagcacgccgctgtgaactttggccagtacgactggtgctcctggatccccaatgcaccccccaccatgcgagccccaccacctaccgctaaaggtgttgtgacaattgagcaaattgtcgacacgctccccgacagaggccggtcctgttggcatctcggtgcagtatgggcgctcagccaattccaggagaatgagctgtttcttggcatgtaccccgaggagcactttatcgagaagccagtgaaagaagcgatggctcgattcaggaagaacttggaagctattgtgtcggttatcgcagagcgaaacaaaaagaaacagttgccctactactatttatcacccgacaggatcccgaacagtgttgcgatctag

SEQ ID NO: 14560 - DNA, 2025 bp, Artificial Sequence
  derived and/or modified sequence
atgcccagctacacagtgacagtggccaccggcagccagtggtttgctggaacagatgactacatctacctgagcctggtgggcagcgctggctgcagcgagaagcacctgctggacaagcccttctacaatgactttgaaagaggagctgtggacagctatgatgtgacagtggatgaggagctgggggagatccagctggtgcgcatcgagaagaggaagtactggctgaatgatgactggtacctgaagtacatcaccctgaagaccccccacggggactacatcgagttcccctgctaccgctggatcactggagatgtggaggtggtgctgagagatggccgggccaagctggccagagatgaccagatccacatcctgaagcagcacaggaggaaggagctggagacccggcagaagcagtaccgctggatggagtggaaccctggcttccccctgagcattgatgccaagtgccacaaggacctgccccgggacatccagtttgacagcgagaagggcgtggactttgtgctgaactacagcaaggccatggagaacctcttcatcaaccgcttcatgcacatgttccagagctcctggaatgactttgctgactttgagaagatctttgtgaagatcagcaacaccatcagcgagcgggtgatgaaccactggcaggaggacctgatgtttggctaccagttcctgaatggctgcaaccctgtgctgatccgccgctgcacagagctgcctgagaagctgcctgtgaccacagagatggtggagtgcagcctggagcggcagctgagcctggagcaggaggtgcagcagggcaacatcttcatcgtggactttgagctgctggatggcattgatgccaacaagacagacccctgcaccctgcagttcctggccgcccccatctgcctgctgtacaagaacctggccaacaagatcgtgcccatcgccatccagctgaaccagatccctggagatgagaaccccatcttcctgcccagtgatgccaagtatgactggctgctggccaagatctgggtgcgcagcagtgacttccacgtgcaccagaccatcacccacctgctgcggacccacctggtgtctgaggtgtttggaattgccatgtaccggcagctgcctgctgtgcaccccatcttcaagctgctggtggcccacgtgcgcttcaccatcgccatcaacaccaaggcccgggagcagctgatctgtgaatgtggcctgtttgacaaggccaatgccaccggcggcggcggccacgtgcagatggtgcagagggccatgaaggacctgacctacgccagcctgtgcttccctgaggccatcaaggcccggggcatggagagcaaggaggacatcccctactacttctacagagatgatggcctgctggtgtgggaggccatccgcaccttcaccgctgaggtggtggacatctactatgaaggagaccaggtggtggaggaggaccctgagctgcaggactttgtgaatgatgtgtatgtgtatggcatgaggggcaggaagagcagcggcttccccaagtctgtgaagagccgggagcagctgtctgagtacctgactgtggtgatcttcaccgccagcgcccagcacgccgctgtgaactttggccagtatgactggtgctcctggatccccaatgccccacccaccatgagggcccccccacccacagccaagggcgtggtgaccatcgagcagatcgtggacaccctgcctgaccggggccgcagctgctggcacctgggcgctgtgtgggccctgagccagttccaggagaatgagctgttcctgggcatgtacccagaggagcacttcatcgagaagcctgtgaaggaggccatggcccgcttcaggaagaacctggaggccatcgtgtctgtgattgctgagaggaacaagaagaagcagctgccctactactacctgagcccagaccgcatccccaacagcgtggccatctag

SEQ ID NO: 14561 - DNA, 2025 bp, Artificial Sequence
  derived and/or modified sequence
atgcccagctacaccgtgaccgtggccaccggcagccagtggttcgcagggaccgatgattatatatatctgagcttggtgggatccgccggatgctccgaaaagcatctccttgataagccattctacaatgactttgaaaggggagccgtcgactcctatgacgtgacagtcgacgaagaactgggcgaaatccaactggtccgaatcgaaaagcgcaagtattggctgaatgatgattggtatctcaagtacattaccctcaagactccccatggcgattatattgaatttccgtgctatagatggattactggggacgtcgaagtagtgctgcgtgacgggcgagcaaagctcgctagggacgatcagattcacatactcaagcagcaccgcagaaaagagcttgagacaagacagaaacagtacagatggatggaatggaatccaggttttccactgagcattgatgcaaagtgccataaggaccttcctcgagacattcaattcgattccgaaaagggtgtggattttgtcttgaactacagtaaggccatggaaaatctgttcataaaccggtttatgcatatgtttcagtcctcatggaatgatttcgccgactttgaaaaaattttcgtcaagataagcaacactattagcgaaagagtgatgaatcactggcaggaggacctaatgtttggctatcagttcctgaacggatgcaatccagtgcttatccgcaggtgcaccgagctccccgagaagttgcccgtgacgaccgaaatggtggaatgctctctcgaacggcaactgagcctggagcaggaggtgcagcaaggaaatatctttatcgtggacttcgagttactagatggcatagacgccaataagacagatccatgtactttgcagtttctggctgcgcctatctgtttgttgtacaaaaatcttgctaataagattgttccgatcgcaatccagttaaaccagatccctggggatgagaacccaatattcctgcctagcgacgccaagtatgactggctgctggccaaaatttgggtcagatcttccgactttcatgtgcatcagaccattactcacctgctgaggactcacttggtgtccgaggtgtttggcattgctatgtacaggcaactacccgctgtgcacccaatttttaaacttctggtcgcacatgtcagattcacgattgctataaacaccaaagctagagagcagcttatctgtgagtgcggactatttgataaggcaaatgcgactggtggcggagggcacgtgcaaatggttcagagggccatgaaggacctgacctacgctagtttatgctttcctgaggcaattaaagcccgcggcatggaatcaaaggaggacatcccatactacttctatagggatgacggcctgctcgtttgggaggccattcggacgttcacggcagaggtcgtcgatatatactacgaaggcgaccaggtagttgaggaagatcctgagctgcaggatttcgttaatgacgtatacgtttacggcatgcggggacgaaaatccagcgggtttcctaaatcagtcaagtcccgggagcaattgtctgagtacttgaccgtagtgatctttactgcatctgcacaacatgccgcagtgaattttgggcagtatgattggtgctcatggatccccaatgctcctcctaccatgcgggcccctcccccaacagccaagggcgtggttaccatagaacagattgtagatacactgccagaccgaggtcgttcatgctggcaccttggtgcagtgtgggcactttcacagttccaggagaacgaactgttcctgggcatgtaccctgaagaacatttcatcgaaaaaccagttaaggaagcgatggctcggtttagaaagaatctggaagcgatcgtctcagttatagcagaacgtaacaagaagaaacagctcccctactactacctgagtccggatagaatccctaactccgtagcaatctag

SEQ ID NO: 14562 - DNA, 2025 bp, Artificial Sequence
  derived and/or modified sequence
atgccatcttacaccgttacggtcgctaccgggagccagtggttcgccggtactgatgactatatctacctatccctggtaggaagtgcaggttgttccgagaagcacctgttggataagccgttttataatgatttcgagaggggcgctgtagattcttacgatgtcaccgtggatgaagagcttggcgagatacagctggtacgaatagagaagcgaaaatattggttgaatgatgattggtacctcaaatacatcacactgaaaaccccccatggggactatattgaattcccatgttataggtggataacaggggatgtggaggtggtactgagggatggtcgcgcaaagctggccagagatgatcaaattcatatcctcaagcagcatagaagaaaagagctagaaacaagacagaagcaatatagatggatggagtggaaccctgggttccctctcagtattgatgccaagtgtcataaggacctccctagagacattcagttcgactccgaaaaaggcgtagattttgttttaaactatagcaaagcaatggaaaatctctttatcaataggttcatgcatatgttccaaagctcatggaatgacttcgcggacttcgaaaagatttttgtgaagatctctaatactatatcagaaagagtgatgaatcactggcaagaagatttgatgtttggctaccaatttcttaacgggtgcaatcctgtcctgatccgccgttgtacagagcttccagaaaaattgccagtgacaaccgagatggtagagtgctctcttgaaaggcaattgagtctggaacaggaggtccagcagggtaacatttttatagttgacttcgagctcctggacgggattgacgccaataaaactgatccctgcacactccagttcctggcggcacctatatgcctgctttacaaaaacttagcaaacaaaatcgtccctatcgccattcagctcaatcagattccaggcgatgaaaatccaatctttctacccagcgacgcgaagtacgactggctgctggcaaagatatgggtccgctcctctgattttcacgttcatcagaccattacccacctactccgtactcatctcgtttctgaggtatttggtatcgccatgtatagacagttaccagcagtgcacccaatcttcaaactcctggtggctcacgtacggtttacaatcgcgatcaacactaaggccagggagcagctgatctgcgaatgcggactgttcgacaaagcaaacgctacgggcggaggtgggcacgtccagatggttcaacgagcgatgaaagacctgacctacgcctctctctgttttcccgaggctattaaggctcgcggaatggaaagtaaagaagatatcccctactacttctatcgggacgatgggctgctggtctgggaagcaatacggacctttacagcagaagtcgttgacatctactatgaaggggaccaggtggtagaggaggacccagagctacaagattttgtaaacgatgtgtatgtgtacggcatgcggggaagaaagtctagcggctttccgaaatccgtgaaatccagggagcaactgagtgaatatttgacagtggtgatttttactgcgtcagctcaacacgctgctgtgaattttggtcaatacgattggtgctcatggatccccaacgccccaccaacaatgcgggctccacccccaacggcaaagggggtcgtgactattgagcaaatcgttgatacactcccggacagaggccgaagttgttggcaccttggcgcagtttgggccctgtcgcagttccaggagaatgaactgttccttgggatgtatccagaggagcacttcatcgagaagccggtgaaagaggccatggcccgtttccggaaaaatctggaggctatcgtgtccgtgattgctgagcgaaacaaaaaaaagcagctgccatattactatctttcccctgatcgcatcccaaattccgtggccatttag

SEQ ID NO: 14563 - DNA, 2504 bp, Artificial Sequence
  derived and/or modified sequence
cctggaccgccgcgccgaggctcccggcgctcgctgctcccgcggcccgcgccatgccctcctacacggtcaccgtggccactggcagccagtggttcgccggcactgacgactacatctacctcagcctcgtgggctcggcgggctgcagcgagaagcacctgctggacaagcccttctacaacgacttcgagcgtggcgcggtggattcatacgacgtgactgtggacgaggaactgggcgagatccagctggtcagaatcgagaagcgcaagtactggctgaatgacgactggtacctgaagtacatcacgctgaagacgccccacggggactacatcgagttcccctgctaccgctggatcaccggcgatgtcgaggttgtcctgagggatggacgcgcaaagttggcccgagatgaccaaattcacattctcaagcaacaccgacgtaaagaactggaaacacggcaaaaacaatatcgatggatggagtggaaccctggcttccccttgagcatcgatgccaaatgccacaaggatttaccccgtgatatccagtttgatagtgaaaaaggagtggactttgttctgaattactccaaagcgatggagaacctgttcatcaaccgcttcatgcacatgttccagtcttcttggaatgacttcgccgactttgagaaaatctttgtcaagatcagcaacactatttctgagcgggtcatgaatcactggcaggaagacctgatgtttggctaccagttcctgaatggctgcaaccctgtgttgatccggcgctgcacagagctgcccgagaagctcccggtgaccacggagatggtagagtgcagcctggagcggcagctcagcttggagcaggaggtccagcaagggaacattttcatcgtggactttgagctgctggatggcatcgatgccaacaaaacagacccctgcacactccagttcctggccgctcccatctgcttgctgtataagaacctggccaacaagattgtccccattgccatccagctcaaccaaatcccgggagatgagaaccctattttcctcccttcggatgcaaaatacgactggcttttggccaaaatctgggtgcgttccagtgacttccacgtccaccagaccatcacccaccttctgcgaacacatctggtgtctgaggtttttggcattgcaatgtaccgccagctgcctgctgtgcaccccattttcaagctgctggtggcacacgtgagattcaccattgcaatcaacaccaaggcccgtgagcagctcatctgcgagtgtggcctctttgacaaggccaacgccacagggggcggtgggcacgtgcagatggtgcagagggccatgaaggacctgacctatgcctccctgtgctttcccgaggccatcaaggcccggggcatggagagcaaagaagacatcccctactacttctaccgggacgacgggctcctggtgtgggaagccatcaggacgttcacggccgaggtggtagacatctactacgagggcgaccaggtggtggaggaggacccggagctgcaggacttcgtgaacgatgtctacgtgtacggcatgcggggccgcaagtcctcaggcttccccaagtcggtcaagagccgggagcagctgtcggagtacctgaccgtggtgatcttcaccgcctccgcccagcacgccgcggtcaacttcggccagtacgactggtgctcctggatccccaatgcgcccccaaccatgcgagccccgccaccgactgccaagggcgtggtgaccattgagcagatcgtggacacgctgcccgaccgcggccgctcctgctggcatctgggtgcagtgtgggcgctgagccagttccaggaaaacgagctgttcctgggcatgtacccagaagagcattttatcgagaagcctgtgaaggaagccatggcccgattccgcaagaacctcgaggccattgtcagcgtgattgctgagcgcaacaagaagaagcagctgccatattactacttgtccccagaccggattccgaacagtgtggccatctgagcacactgccagtctcactgtgggaaggccagctgccccagccagatggactccagcctgcctggcaggctgtctggccaggcctcttggcagtcacatctcttcctccgaggccagtacctttccatttattctttgatcttcagggaactgcatagattgatcaaagtgtaaacaccatagggacccattctacacagagcaggactgcacagcgtcctgtccacacccagctcagcatttccacaccaagcagcaacagcaaatcacgaccactgatagatgtctattcttgttggagacatgggatgattattttctgttctatttgtgcttagtccaattccttgcacatagtaggtacccaattcaattactattgaatgaattaagaattggttgccataaaaataaatcagttcattt

SEQ ID NO: 14564 - DNA, 2025 bp, Artificial Sequence
  derived and/or modified sequence
atgcccagctacaccgtgaccgtggccaccggcagccagtggttcgccggcaccgacgactacatctacctgagcctggtgggcagcgccggctgcagcgagaagcacctgctggacaagcccttctacaacgacttcgagagaggcgccgtggacagctacgacgtgaccgtggacgaggagctgggcgagatccagctggtgagaatcgagaagagaaagtactggctgaacgacgactggtacctgaagtacatcaccctgaagaccccccacggcgactacatcgagttcccctgctacagatggatcaccggcgacgtggaggtggtgctgagagacggcagagccaagctggccagagacgaccagatccacatcctgaagcagcacagaagaaaggagctggagaccagacagaagcagtacagatggatggagtggaaccccggcttccccctgagcatcgacgccaagtgccacaaggacctgcccagagacatccagttcgacagcgagaagggcgtggacttcgtgctgaactacagcaaggccatggagaacctgttcatcaacagattcatgcacatgttccagagcagctggaacgacttcgccgacttcgagaagatcttcgtgaagatcagcaacaccatcagcgagagagtgatgaaccactggcaggaggacctgatgttcggctaccagttcctgaacggctgcaaccccgtgctgatcagaagatgcaccgagctgcccgagaagctgcccgtgaccaccgagatggtggagtgcagcctggagagacagctgagcctggagcaggaggtgcagcagggcaacatcttcatcgtggacttcgagctgctggacggcatcgacgccaacaagaccgacccctgcaccctgcagttcctggccgcccccatctgcctgctgtacaagaacctggccaacaagatcgtgcccatcgccatccagctgaaccagatccccggcgacgagaaccccatcttcctgcccagcgacgccaagtacgactggctgctggccaagatctgggtgagaagcagcgacttccacgtgcaccagaccatcacccacctgctgagaacccacctggtgagcgaggtgttcggcatcgccatgtacagacagctgcccgccgtgcaccccatcttcaagctgctggtggcccacgtgagattcaccatcgccatcaacaccaaggccagagagcagctgatctgcgagtgcggcctgttcgacaaggccaacgccaccggcggcggcggccacgtgcagatggtgcagagagccatgaaggacctgacctacgccagcctgtgcttccccgaggccatcaaggccagaggcatggagagcaaggaggacatcccctactacttctacagagacgacggcctgctggtgtgggaggccatcagaaccttcaccgccgaggtggtggacatctactacgagggcgaccaggtggtggaggaggaccccgagctgcaggacttcgtgaacgacgtgtacgtgtacggcatgagaggcagaaagagcagcggcttccccaagagcgtgaagagcagagagcagctgagcgagtacctgaccgtggtgatcttcaccgccagcgcccagcacgccgccgtgaacttcggccagtacgactggtgcagctggatccccaacgccccccccaccatgagagcccccccccccaccgccaagggcgtggtgaccatcgagcagatcgtggacaccctgcccgacagaggcagaagctgctggcacctgggcgccgtgtgggccctgagccagttccaggagaacgagctgttcctgggcatgtaccccgaggagcacttcatcgagaagcccgtgaaggaggccatggccagattcagaaagaacctggaggccatcgtgagcgtgatcgccgagagaaacaagaagaagcagctgccctactactacctgagccccgacagaatccccaacagcgtggccatctag

SEQ ID NO: 14565 - protein, 1020 aa, Artificial Sequence
  derived and/or modified sequence
MGRGAGREYSPAATTAENGGGKKKQKEKELDELKKEVAMDDHKLSLDELGRKYQVDLSKGLTNQRAQDVLARDGPNALTPPPTTPEWVKFCRQLFGGFSILLWIGAILCFLAYGIQAAMEDEPSNDNLYLGVVLAAVVIVTGCFSYYQEAKSSKIMDSFKNMVPQQALVIREGEKMQINAEEVVVGDLVEVKGGDRVPADLRIISSHGCKVDNSSLTGESEPQTRSPEFTHENPLETRNICFFSTNCVEGTARGIVIATGDRTVMGRIATLASGLEVGRTPIAMEIEHFIQLITGVAVFLGVSFFVLSLILGYSWLEAVIFLIGIIVANVPEGLLATVTVCLTLTAKRMARKNCLVKNLEAVETLGSTSTICSDKTGTLTQNRMTVAHMWFDNQIHEADTTEDQSGATFDKRSPTWTALSRIAGLCNRAVFKAGQENISVSKRDTAGDASESALLKCIELSCGSVRKMRDRNPKVAEIPFNSTNKYQLSIHEREDSPQSHVLVMKGAPERILDRCSTILVQGKEIPLDKEMQDAFQNAYMELGGLGERVLGFCQLNLPSGKFPRGFKFDTDELNFPTEKLCFVGLMSMIDPPRAAVPDAVGKCRSAGIKVIMVTGDHPITAKAIAKGVGIISEGNETVEDIAARLNIPMSQVNPREAKACVVHGSDLKDMTSEQLDEILKNHTEIVFARTSPQQKLIIVEGCQRQGAIVAVTGDGVNDSPALKKADIGIAMGISGSDVSKQAADMILLDDNFASIVTGVEEGRLIFDNLKKSIAYTLTSNIPEITPFLLFIIANIPLPLGTVTILCIDLGTDMVPAISLAYEAAESDIMKRQPRNSQTDKLVNERLISMAYGQIGMIQALGGFFTYFVILAENGFLPSRLLGIRLDWDDRTMNDLEDSYGQEWTYEQRKVVEFTCHTAFFASIVVVQWADLIICKTRRNSVFQQGMKNKILIFGLLEETALAAFLSYCPGMGVALRMYPLKVTWWFCAFPYSLLIFIYDEVRKLILRRYPGGWVEKETYY

SEQ ID NO: 14566 - protein, 1009 aa, Artificial Sequence
  derived and/or modified sequence
MGRGAGREYSPAATTAENGGGKKKQKEKELDELKKEVAMDDHKLSLDELGRKYQVDLSKGLTNQRAQDVLARDGPNALTPPPTTPEWVKFCRQLFGGFSILLWIGAILCFLAYGIQAAMEDEPSNDNLYLGVVLAAVVIVTGCFSYYQEAKSSKIMDSFKNMVPQQALVIREGEKMQINAEEVVVGDLVEVKGGDRVPADLRIISSHGCKVDNSSLTGESEPQTRSPEFTHENPLETRNICFFSTNCVEGTARGIVIATGDRTVMGRIATLASGLEVGRTPIAMEIEHFIQLITGVAVFLGVSFFVLSLILGYSWLEAVIFLIGIIVANVPEGLLATVTVCLTLTAKRMARKNCLVKNLEAVETLGSTSTICSDKTGTLTQNRMTVAHMWFDNQIHEADTTEDQSGATFDKRSPTWTALSRIAGLCNRAVFKAGQENISVSKRDTAGDASESALLKCIELSCGSVRKMRDRNPKVAEIPFNSTNKYQLSIHEREDSPQSHVLVMKGAPERILDRCSTILVQGKEIPLDKEMQDAFQNAYMELGGLGERVLGFCQLNLPSGKFPRGFKFDTDELNFPTEKLCFVGLMSMIDPPRAAVPDAVGKCRSAGIKVIMVTGDHPITAKAIAKGVGIISEGNETVEDIAARLNIPMSQVNPREAKACVVHGSDLKDMTSEQLDEILKNHTEIVFARTSPQQKLIIVEGCQRQGAIVAVTGDGVNDSPALKKADIGIAMGISGSDVSKQAADMILLDDNFASIVTGVEEGRLIFDNLKKSIAYTLTSNIPEITPFLLFIIANIPLPLGTVTILCIDLGTDMVPAISLAYEAAESDIMKRQPRNSQTDKLVNERLISMAYGQIGMIQALGGFFTYFVILAENGFLPSRLLGIRLDWDDRTMNDLEDSYGQEWTYEQRKVVEFTCHTAFFASIVVVQWADLIICKTRRNSVFQQGMKNKILIFGLLEETALAAFLSYCPGMGVALRMYPLNLLIFIYDEVRKLILRRYPGGWVEKETYY

SEQ ID NO: 14567 - protein, 723 aa, Artificial Sequence
  derived and/or modified sequence
MLSSALALSGALVKRLKPPNGHFILTDTHDLNTSKIEHSLFTVCLTLTAKRMARKNCLVKNLEAVETLGSTSTICSDKTGTLTQNRMTVAHMWFDNQIHEADTTEDQSGATFDKRSPTWTALSRIAGLCNRAVFKAGQENISVSKRDTAGDASESALLKCIELSCGSVRKMRDRNPKVAEIPFNSTNKYQLSIHEREDSPQSHVLVMKGAPERILDRCSTILVQGKEIPLDKEMQDAFQNAYMELGGLGERVLGFCQLNLPSGKFPRGFKFDTDELNFPTEKLCFVGLMSMIDPPRAAVPDAVGKCRSAGIKVIMVTGDHPITAKAIAKGVGIISEGNETVEDIAARLNIPMSQVNPREAKACVVHGSDLKDMTSEQLDEILKNHTEIVFARTSPQQKLIIVEGCQRQGAIVAVTGDGVNDSPALKKADIGIAMGISGSDVSKQAADMILLDDNFASIVTGVEEGRLIFDNLKKSIAYTLTSNIPEITPFLLFIIANIPLPLGTVTILCIDLGTDMVPAISLAYEAAESDIMKRQPRNSQTDKLVNERLISMAYGQIGMIQALGGFFTYFVILAENGFLPSRLLGIRLDWDDRTMNDLEDSYGQEWTYEQRKVVEFTCHTAFFASIVVVQWADLIICKTRRNSVFQQGMKNKILIFGLLEETALAAFLSYCPGMGVALRMYPLKVTWWFCAFPYSLLIFIYDEVRKLILRRYPGGWVEKETYY

SEQ ID NO: 14568 - protein, 714 aa, Artificial Sequence
  derived and/or modified sequence
  misc_feature (1)..(1): Xaa can be any naturally occurring amino acid
XQLITGVAVFLGVSFFVLSLILGYSWLEAVIFLIGIIVANVPEGLLATVTVCLTLTAKRMARKNCLVKNLEAVETLGSTSTICSDKTGTLTQNRMTVAHMWFDNQIHEADTTEDQSGATFDKRSPTWTALSRIAGLCNRAVFKAGQENISVSKRDTAGDASESALLKCIELSCGSVRKMRDRNPKVAEIPFNSTNKYQLSIHEREDSPQSHVLVMKGAPERILDRCSTILVQGKEIPLDKEMQDAFQNAYMELGGLGERVLGFCQLNLPSGKFPRGFKFDTDELNFPTEKLCFVGLMSMIDPPRAAVPDAVGKCRSAGIKVIMVTGDHPITAKAIAKGVGIISEGNETVEDIAARLNIPMSQVNPREAKACVVHGSDLKDMTSEQLDEILKNHTEIVFARTSPQQKLIIVEGCQRQGAIVAVTGDGVNDSPALKKADIGIAMGISGSDVSKQAADMILLDDNFASIVTGVEEGRLIFDNLKKSIAYTLTSNIPEITPFLLFIIANIPLPLGTVTILCIDLGTDMVPAISLAYEAAESDIMKRQPRNSQTDKLVNERLISMAYGQIENGFLPSRLLGIRLDWDDRTMNDLEDSYGQEWTYEQRKVVEFTCHTAFFASIVVVQWADLIICKTRRNSVFQQGMKNKILIFGLLEETALAAFLSYCPGMGVALRMYPLKVTWWFCAFPYSLLIFIYDEVRKLILRRYPGGWVEKETYY

SEQ ID NO: 14569 - protein, 272 aa, Artificial Sequence
  derived and/or modified sequence
MDSFKNMVPQQALVIREGEKMQINAEEVVVGDLVEVKGGDRVPADLRIISSHGCKVDNSSLTGESEPQTRSPEFTHENPLETRNICFFSTNCVEGTARGIVIATGDRTVMGRIATLASGLEVGRTPIAMEIEHFIQLITGVAVFLGVSFFVLSLILGYSWLEAVIFLIGIIVANVPEGLLATVTVCLTLTAKRMARKNCLVKNLEAVETLGSTSTICSDKTGTLTQNRMTVAHMWFDNQIHEADTTEDQSGDWVLQRGWIGLEEAEGSGVVG

SEQ ID NO: 14570 - DNA, 3063 bp, Artificial Sequence
  derived and/or modified sequence
atgggcaggggcgccggtcgcgaatacagcccggccgctaccaccgccgaaaatggaggtgggaagaagaagcagaaggagaaagagctagacgaattaaagaaagaggtcgcgatggatgaccataaactgtctctggacgagctgggcaggaaatatcaggtcgacctctctaaggggcttactaatcagcgcgcccaagacgtgctcgccagagacggaccgaatgccctgacccctccaccgaccacccctgaatgggttaagttttgtaggcagctgtttggcgggtttagcatcctattgtggatcggcgccatactgtgtttcctggcctacggcatccaagcagccatggaagatgaaccatccaatgataatctctacctgggagtggtcctagctgcggttgttatcgtgacgggctgcttctcatattaccaagaagcaaagtctagcaagattatggatagctttaagaacatggtgcctcagcaggcccttgtcattagggaaggcgagaaaatgcagatcaacgccgaggaggtggttgtgggggatttggtggaagtgaaggggggagacagagtgccggccgacttgcggatcattagttcccatgggtgtaaggttgacaactcgagcttaactggggagtctgaacctcaaactcgttctcctgagttcacacacgaaaatccactggagacacgaaatatctgttttttcagcacgaattgtgtggagggtacagctcggggcatcgtcatcgcaaccggtgacaggacggtgatgggacgcattgcgaccctcgctagtgggctcgaggtcggcaggactcctatagctatggagatcgagcacttcatccagctgataacaggcgtggcagtgttcctaggagtatccttttttgtgctctccttgatcctgggatactcttggctggaggctgtgatttttctgatcgggattatagtcgcgaacgtccctgagggcctcctggcgaccgttaccgtctgtctgaccctgactgccaagcgtatggcgagaaaaaattgcctggtgaaaaatctggaggccgttgaaactctgggcagcacttcaaccatctgctcggataagacggggacactgacacagaacagaatgacagtggctcacatgtggttcgacaaccagatccatgaagctgacaccacggaggaccagtctggtgccacgtttgacaagcgcagccccacctggacagccctgtctcgcatcgccggactttgcaaccgcgcagtgtttaaggcgggacaggaaaatatcagcgtgtcaaagagagataccgccggagatgcgtctgaaagtgcactgttgaagtgtattgaattgtcctgcgggtccgttaggaagatgcgcgacagaaatcccaaagttgccgaaatcccctttaactctacaaacaagtaccagctcagcatccatgagagggaggacagtcctcagagccacgtgttggtgatgaagggggcacctgagcggattctcgaccgatgctcgacaatcttggtgcaaggcaaggagattcctctggacaaagaaatgcaggatgcattccagaatgcctacatggagctcggcggcctgggtgaacgtgttctcggcttctgccagcttaatctcccctccggcaagttccctagaggtttcaaattcgataccgacgaactgaatttccctactgaaaaattgtgctttgttggcctcatgtccatgatcgacccacccagagctgccgtgcccgacgcagtcggaaaatgccgttccgccggtatcaaggtgatcatggtaacaggggaccaccccatcaccgcaaaagccattgctaagggggtagggattatcagcgaaggaaacgagacagtcgaggacatcgccgcgcgcctaaatataccaatgagccaggtgaacccgcgtgaggcaaaggcatgtgttgtccatggttcggacctgaaggacatgacctcagaacagctggatgagatactgaagaatcataccgaaatcgtttttgctaggacgtcccctcagcagaagctaatcatagtcgagggctgccagagacaaggcgctatcgtggcagtgacgggtgacggggttaacgacagtcctgcactcaaaaaagctgacataggcattgctatgggtatttccgggtctgatgtcagcaaacaggcagcagacatgattttgttggacgacaactttgcctcaatcgtgaccggcgtcgaagagggcaggctgatctttgacaacttgaaaaaatctatcgcttacactttaacgtccaatatacccgaaatcacaccttttctactgttcatcattgccaacatccccctacctctgggtacagtgaccattctgtgtatcgacttggggaccgatatggtaccggccattagcctcgcatacgaagcggcagaatcagacataatgaagcgccaacccaggaatagccagaccgacaaacttgtcaacgagcgcttgatcagcatggcatacgggcagatcggcatgatacaggcactaggcggtttctttacttatttcgtgattttggcggagaatggatttctgccctctcgcctactggggattcggttggactgggatgaccgcaccatgaatgatctagaagattcatacggacaggaatggacctatgagcagagaaaagtcgtggaattcacttgtcacaccgccttctttgcttccatcgtggtggtgcagtgggcggatttaattatctgcaaaactcgtcgtaattccgtatttcaacagggtatgaagaacaaaatactaatctttgggctattagaggaaaccgcccttgccgccttcctctcgtactgcccagggatgggcgttgctctgcgcatgtaccctctcaaggtgacctggtggttctgcgcctttccctacagcctcctgattttcatttacgacgaggtgcgcaaattgattcttagaaggtatcccggtggatgggttgaaaaggaaacatactactag

SEQ ID NO: 14571 - DNA, 3030 bp, Artificial Sequence
  derived and/or modified sequence
atgggtagaggggccgggcgagagtacagtcccgccgccacaacagctgagaacggggggggcaaaaagaaacagaaagagaaggaactggacgaattaaaaaaggaggtggcgatggatgaccataagttgtccctggacgaacttggtcgaaaatatcaggtcgacctctcgaaggggctcaccaaccagagagcccaagatgttctggcccgtgatgggccgaatgcgctgacacccccacccactacccccgagtgggtgaagttctgccgtcagttgtttggaggcttctctatacttctctggattggcgccattctctgcttcctggcctatggcatacaggccgctatggaggacgaaccatctaatgataacctttatctaggcgtagtcttagctgccgtggtgatcgtgaccggatgttttagttattatcaggaagcgaagtcgtcgaaaattatggacagcttcaagaatatggtaccccagcaagccctggttataagggagggagagaagatgcagatcaacgcagaggaagttgtcgtgggtgatttggtggaggtaaagggtggagatcgggtccccgctgacctcagaatcattagctctcacggctgcaaggttgacaacagctctcttactggggaatccgaacctcagacaagatctcccgaatttacccatgagaatccactcgagacccggaacatttgctttttttcgacgaattgtgttgaggggacagccaggggcattgtgatcgctaccggagaccggacagtaatggggcgtattgcgaccctggcctcggggctggaggtggggcgcacaccgatcgcaatggaaattgagcattttatccaactgattacaggtgtggccgtgttcctcggcgtgagtttctttgtcctaagcctaattctaggctattcatggctcgaggctgtcatcttcctgatcggcattatcgttgcaaatgtgcctgagggcttgctggctacagtaacagtgtgcctgactttgaccgccaagcggatggccagaaagaactgtctggtgaaaaatcttgaggccgtggagaccttaggctccacttcgaccatctgctccgacaagactggtactcttacccagaatcgcatgaccgtcgcacacatgtggtttgacaatcagatacacgaagccgacacaaccgaagaccagtccggcgccacatttgataaaagaagtccaacgtggaccgcgctaagcagaattgccggcttgtgtaacagagccgtgtttaaagccggccaggaaaacatctctgtgtccaagagagatacagccggagacgcatcagagagtgccctcctgaagtgcattgaactgtcttgtggcagcgtgagaaaaatgcgggacagaaacccaaaagtggccgagattccctttaatagtacaaacaagtatcaattgtccatacacgaacgagaggattctccacagtcccacgtcctcgtcatgaagggcgctccagagcgcatcctggaccggtgttcaaccatcctggtccaggggaaagagatccccttggacaaggagatgcaggatgcctttcaaaatgcgtatatggaattgggggggttgggggagagagttttgggattttgccagttaaatcttccctctggcaagtttccacggggcttcaaattcgacactgacgagctgaattttcccaccgaaaagctgtgctttgtaggcttgatgtccatgattgatcctccacgggccgccgtcccagacgctgtgggaaaatgtcggtctgctggcatcaaggtcattatggttaccggggaccatccgatcaccgctaaggctatcgccaagggagtggggatcataagcgagggcaatgaaaccgtggaggacatcgccgcacgactgaacattcccatgtcccaggtgaacccccgcgaggcaaaggcctgcgtggtgcacggctcagacctgaaagacatgacaagcgaacagctggacgaaattctgaaaaatcacaccgagatcgtcttcgcccggacatccccacagcagaagctgataatcgtggaggggtgtcaacgccagggggcaatcgtcgctgtgaccggtgacggcgtgaatgatagcccagcattgaagaaggctgacatcggaatagccatgggtatctccggttcggatgtttcgaaacaagcagcggacatgatcctgctggacgacaacttcgctagtatcgtgaccggcgtcgaggagggccgccttatcttcgacaatttgaaaaaaagtattgcgtacaccctgacaagtaacattcccgaaatcaccccctttttactgtttattatcgctaacattccactaccactgggtaccgtgaccattctgtgtatagacctgggcacagacatggtgccagccatatcactggcctacgaggctgctgagtctgacatcatgaagcgacagcctagaaactctcagacagacaagcttgtcaatgagcggcttatcagtatggcctatggtcagatcggcatgatccaggccctgggggggttctttacgtacttcgtaattctggccgagaatggcttcctacctagccgtctgctgggaattcggctggactgggacgaccggacaatgaatgacctagaagatagctacggacaggagtggacatacgaacagcggaaagtggtggagtttacgtgtcacaccgctttcttcgccagcattgtggtggtgcagtgggccgatctcatcatttgtaaaacaaggcggaactccgtgttccagcaagggatgaagaacaagatacttatctttggccttcttgaggagaccgctcttgcggccttcttgagttactgtccaggtatgggagtggccctgcgcatgtatccgctgaatctcttgatattcatctacgatgaggtgcgaaagctgatcctgcggcggtaccctgggggctgggttgagaaggagacctactattag

SEQ ID NO: 14572 - DNA, 2172 bp, Artificial Sequence
  derived and/or modified sequence
atgctgtcctccgcactggccttgagtggagcgctggtcaagcgtctcaagcctcccaatggacactttattctgactgacacccacgatctcaacaccagtaagattgagcactctctgttcacggtttgtctcaccctcaccgccaaaaggatggcgaggaaaaactgtttagtcaagaacttggaggcagtagaaacattaggaagcacctcaaccatctgtagtgacaaaactggtacccttactcagaatcggatgacagttgcacacatgtggtttgacaaccagatacatgaagcagataccactgaagatcagagcggggctacctttgacaaaagaagtcctacatggacagcactgagccggattgcaggcctgtgtaaccgcgctgtgtttaaggccggccaagaaaacattagcgtatcaaagagggataccgccggtgacgcttctgagagtgcacttctgaagtgcattgagctctcctgtggctctgtgcggaaaatgagggacagaaatccaaaggtcgccgaaatccccttcaacagcaccaataagtatcagctcagcattcatgaacgggaggatagcccacagagccatgttttggtgatgaaaggggcccccgagcggatacttgacaggtgcagtacaatcttagtccaggggaaggaaatacccctcgataaggaaatgcaagacgcttttcagaacgcctacatggaactcggggggctcggagagcgcgtcctgggcttttgccaattaaacttgccatctggcaagttcccacgcggattcaaattcgataccgacgagctgaactttcccactgaaaagctgtgcttcgtgggccttatgagcatgatcgatcctcctagggcggccgtccccgatgcagtgggcaagtgccggtcagccggcattaaggttataatggtcacgggagatcacccgattaccgccaaggccatcgccaagggcgtgggtatcatctccgagggaaacgaaactgtggaagatatcgccgcccgactaaatatccccatgtcccaggtgaatccccgcgaggccaaagcatgcgtggttcacggcagcgacctgaaagatatgaccagtgaacagctggatgaaatcctcaagaaccacacagaaatcgtgtttgctagaacatcccctcagcaaaaattgattatcgtggaaggttgccagaggcaaggcgctatcgtcgcagtaaccggagacggcgttaatgatagtcccgccctgaaaaaagccgatattggaatcgcaatgggtatatccggtagcgatgtgagcaagcaggcagcagatatgattctgttagatgataacttcgcctcgatcgttactggagtggaagaggggcgccttatcttcgacaatcttaagaaatccatcgcatacactctgacctcaaacataccagagatcacccccttcctgctgttcatcatcgcaaacataccccttccgcttggaacagtgacaatcctctgcattgacctagggaccgatatggtccctgcgatttctttagcctacgaggccgctgaatccgacatcatgaaaagacagcccaggaacagccagaccgacaagttggttaacgaacgcctgatctctatggcatatggacagattgggatgatccaggccctggggggcttcttcacttactttgtgattctagccgagaatggcttcctgccctcaagattactgggaatccgattggactgggatgaccggactatgaacgatctggaggatagctatgggcaggaatggacgtatgagcagcgcaaggtcgtggagttcacttgtcacacggctttctttgccagcatcgtggtggttcagtgggccgatcttataatatgcaaaactcgccgaaactctgtcttccaacagggcatgaagaacaaaatcctgatattcggcctccttgaggagacagcactggcggccttcttatcatactgccctggcatgggagtagcgctgaggatgtaccctctaaaagttacatggtggttttgcgctttcccctactcattacttattttcatttacgatgaagtgaggaagttaatcttacgaaggtatcctggcggctgggtcgagaaagaaacctattactag

SEQ ID NO: 14573 - DNA, 2145 bp, Artificial Sequence
  derived and/or modified sequence
tgacaactcataactggcgtggctgtctttctgggcgtgagcttcttcgtgttatccctgatcttggggtacagctggcttgaggctgtcattttcttgattgggatcatagtagccaatgttcccgaagggcttttagcaactgtcaccgtgtgtctcaccctgactgctaaacgcatggccagaaagaactgtcttgttaaaaacctggaagccgtcgaaacgctgggcagcactagcacaatttgctctgataaaacaggcacattgacccagaatcggatgacagtggcacacatgtggttcgacaaccagatccacgaggctgacaccacagaggatcagagtggagccacttttgataaacgttcccccacttggaccgctctttctagaatcgctgggttgtgtaatcgagctgtcttcaaggccggtcaggagaacatttcagtctccaagcgcgatactgctggtgatgcctcagaatctgcccttctcaaatgtattgagttgagttgcgggagcgttagaaaaatgcgggaccgcaaccccaaggtcgccgaaatcccgttcaacagtaccaacaagtaccagctctctattcacgaacgtgaggactcaccccagagtcacgttttggtgatgaaaggagcccctgaacgcatactggaccgatgcagcacgatcctagtgcaaggaaaggagattcctcttgataaggaaatgcaggatgcgttccagaacgcctatatggagctgggggggctgggcgaacgggtgttagggttttgccagttgaacctgccatcaggtaagtttcctcgagggtttaaatttgacactgacgaactcaatttccctacagaaaaattatgctttgtgggtttaatgtccatgattgatcctcctcgcgccgcagtgcccgacgcagtgggaaagtgtcgaagcgcaggcataaaagtgattatggtcacgggcgaccatcccatcaccgccaaagcgattgctaagggggtggggattatcagtgaaggcaacgaaaccgtggaagatattgcagctaggcttaatatccccatgtctcaagtcaatccacgggaggcgaaggcctgtgtggttcacgggtccgatctgaaagacatgacctctgagcagcttgatgagatactgaagaaccacactgaaattgtgtttgctcgtaccagtccacaacagaagctgatcatcgtggagggttgtcaaagacaaggagctatagtcgctgtaaccggggatggagttaacgattctccggctctgaaaaaagctgacataggcatcgctatgggcattagcgggagtgacgtaagtaagcaggccgctgacatgatccttctggatgataattttgcctcaatcgtaactggagtcgaggagggacgacttatttttgacaaccttaagaaaagcatagcatatactctgacctcaaatatccccgaaatcaccccctttctgcttttcataattgctaatatcccactacctctcggaacggtgacaattctgtgtattgatctcggcacagatatggttccagccataagcctggcctacgaggccgccgaatccgacatcatgaagcgccaaccccggaattcccagaccgacaagttggtgaacgagaggctgatctcgatggcttatggccagatcgaaaatggctttctgcctagccgcctgctcggaatcaggctggattgggacgataggacgatgaatgatttagaggacagctatggccaggagtggacatacgagcagcggaaagttgtcgaattcacctgtcacacagcctttttcgcatccatcgtggtggtgcagtgggcggatttaatcatatgtaagacacgccgtaatagtgtgtttcagcaaggcatgaaaaataagatccttatttttggcctgctcgaggaaactgcgttggctgcattcctgtcatactgccctggcatgggcgttgccctgcgtatgtacccgcttaaagtgacctggtggttctgtgcgttcccatatagtctactgatattcatctatgatgaggttcgcaaactcatccttcgtcgctatccaggaggctgggtcgagaaagagacttactactag

SEQ ID NO: 14574 - DNA, 819 bp, Artificial Sequence
  derived and/or modified sequence
atggactctttcaagaacatggtgcctcagcaggcgcttgtcattcgagagggagagaagatgcagatcaatgccgaagaagtggtggtgggtgatttggtagaggtgaaaggaggggatcgagttccagcagatttgcgtattatttcaagccatgggtgcaaagtcgacaattcaagcctgaccggtgagagcgagccccagacgcgcagcccagagtttacgcacgagaaccctctggagactcggaatatctgtttcttctccaccaactgtgtcgagggaaccgctcgcgggattgttattgctacaggcgatagaaccgtgatgggccggatcgccactctggcgtccggacttgaggtggggagaaccccaattgccatggaaattgagcacttcatacagctcattaccggtgtggcggtatttctcggcgtttctttttttgtgctcagtcttatacttgggtattcctggttggaggccgttatcttcttaatcggaataattgtagccaacgtgcccgagggactcctcgccacggtaaccgtgtgcctgacacttaccgctaagcgcatggccaggaaaaattgtctggtcaaaaatctcgaggcagtggagacattaggatccactagtaccatatgttctgataaaactgggacactcacccaaaatcgcatgacagttgcccacatgtggttcgacaatcagatacacgaagctgatacgaccgaggaccaatcaggcgattgggtgttgcaaagaggttggatcggcctggaagaggcggaaggatcgggggtggttggttag

SEQ ID NO: 14575 - DNA, 3063 bp, Artificial Sequence
  derived and/or modified sequence
atgggcagaggagctggccgggagtacagccctgctgccaccacagcagaaaatggaggcggcaagaagaagcagaaggagaaggagctggatgagctgaagaaggaggtggccatggatgaccacaagctgagcctggatgagctgggcaggaagtaccaggtggacctgagcaagggcctgaccaaccagagggcccaggatgtgctggccagagatggccccaatgccctgaccccaccacccaccaccccagagtgggtgaagttctgccggcagctgtttggaggcttcagcatcctgctgtggattggagccatcctgtgcttcctggcctacggcatccaggccgccatggaggatgagcccagcaatgacaacctgtacctgggcgtggtgctggccgctgtggtgattgtgacaggctgcttctcctactaccaggaggccaagagcagcaagatcatggacagcttcaagaacatggtgccccagcaggccctggtgatccgggagggggagaagatgcagatcaatgctgaggaggtggtggtgggggacctggtggaggtgaagggcggggacagagtgcctgctgacctgcgcatcatcagcagccacggctgcaaggtggacaacagcagcctgactggagagagcgagccccagaccaggagccctgagttcacccatgagaaccccctggagaccaggaacatctgcttcttcagcaccaactgtgtggagggcacagcccggggcatcgtgattgccactggagacagaacagtgatgggccgcatcgccaccctggccagcggcctggaggtgggccgcacccccatcgccatggagattgagcacttcatccagctgatcaccggggtggccgtgttcctgggcgtgtccttctttgtgctgagcctcatcctgggctacagctggctggaggccgtcatcttcctgattggcatcatcgtggccaacgtgcctgagggcctgctggccaccgtgacagtgtgcctgaccctgacagccaagaggatggccaggaagaactgcctggtgaagaacctggaggccgtggagaccctgggcagcaccagcaccatctgcagcgacaagacaggcaccctgacccagaacaggatgacagtggcccacatgtggtttgacaaccagatccacgaggccgacaccacagaggaccagagcggggccacctttgacaagaggagccccacctggacagccctgagcagaattgctggcctgtgcaacagagctgtgttcaaggccggccaggagaacatctctgtgtccaagagggacacagctggagatgccagcgagagcgccctgctgaagtgcatcgagctgagctgtggctctgtgaggaagatgagggacaggaaccccaaggtggccgagatccccttcaacagcaccaacaagtaccagctgagcatccacgagcgggaggacagcccccagagccacgtgctggtgatgaagggggcccctgagcgcatcctggaccgctgcagcaccatcctggtgcagggcaaggagatccccctggacaaggagatgcaggatgccttccagaatgcctacatggagctgggcggcctgggggagcgggtgctgggcttctgccagctgaacctgcccagcggcaagttcccccggggcttcaagtttgacacagatgagctgaacttccccacagagaagctgtgctttgtgggcctgatgtccatgattgatcctcccagggctgctgtgcctgatgctgtgggcaagtgccgctctgctggcatcaaggtgatcatggtgactggagaccaccccatcacagccaaggccatcgccaagggcgtgggcatcatcagcgagggcaatgaaacagtggaggacattgctgcccggctgaacatccccatgagccaggtgaacccccgggaggccaaggcctgtgtggtgcacggcagtgacctgaaggacatgaccagcgagcagctggatgagatcctgaagaaccacacagaaattgtgtttgcccggaccagcccccagcagaagctgatcatcgtggagggctgccagaggcagggcgccatcgtggccgtgactggagatggagtgaatgacagccctgccctgaagaaggctgacattggaattgccatgggcatcagcggcagtgatgtgtccaagcaggccgctgacatgatcctgctggatgacaactttgccagcatcgtgactggagtggaggagggccgcctcatctttgacaacctgaagaagagcatcgcctacaccctgaccagcaacatccctgagatcacccccttcctgctcttcatcatcgccaacatccccctgcccctgggcaccgtgaccatcctgtgcatcgacctgggcacagacatggtgcctgccatcagcctggcctatgaagctgctgagagtgacatcatgaagaggcagcccaggaacagccagacagacaagctggtgaatgaaagactcatctccatggcctacggccagatcggcatgatccaggccctgggcggcttcttcacctactttgtgatcctggccgagaatggcttcctgcccagccggctgctgggcatccggctggactgggatgacaggaccatgaatgacctggaggacagctatggccaggagtggacctatgagcagaggaaggtggtggagttcacctgccacacagccttctttgccagcatcgtggtggtgcagtgggccgacctgatcatctgcaagaccaggaggaacagcgtcttccagcagggcatgaagaacaagatcctgatcttcggcctgctggaggagacagccctggccgccttcctgagctactgccccggcatgggcgtggccctgaggatgtaccccctgaaggtgacctggtggttctgtgccttcccctacagcctgctgatcttcatctatgatgaggtgaggaagctgatcctgcggcgctacccaggcggctgggtggagaaggagacctactactag

SEQ ID NO: 14576 - DNA, 3030 bp, Artificial Sequence
  derived and/or modified sequence
atgggcagaggagctggccgggagtacagccctgctgccaccacagcagaaaatggaggcggcaagaagaagcagaaggagaaggagctggatgagctgaagaaggaggtggccatggatgaccacaagctgagcctggatgagctgggcaggaagtaccaggtggacctgagcaagggcctgaccaaccagagggcccaggatgtgctggccagagatggccccaatgccctgaccccaccacccaccaccccagagtgggtgaagttctgccggcagctgtttggaggcttcagcatcctgctgtggattggagccatcctgtgcttcctggcctacggcatccaggccgccatggaggatgagcccagcaatgacaacctgtacctgggcgtggtgctggccgctgtggtgattgtgacaggctgcttctcctactaccaggaggccaagagcagcaagatcatggacagcttcaagaacatggtgccccagcaggccctggtgatccgggagggggagaagatgcagatcaatgctgaggaggtggtggtgggggacctggtggaggtgaagggcggggacagagtgcctgctgacctgcgcatcatcagcagccacggctgcaaggtggacaacagcagcctgactggagagagcgagccccagaccaggagccctgagttcacccatgagaaccccctggagaccaggaacatctgcttcttcagcaccaactgtgtggagggcacagcccggggcatcgtgattgccactggagacagaacagtgatgggccgcatcgccaccctggccagcggcctggaggtgggccgcacccccatcgccatggagattgagcacttcatccagctgatcaccggggtggccgtgttcctgggcgtgtccttctttgtgctgagcctcatcctgggctacagctggctggaggccgtcatcttcctgattggcatcatcgtggccaacgtgcctgagggcctgctggccaccgtgacagtgtgcctgaccctgacagccaagaggatggccaggaagaactgcctggtgaagaacctggaggccgtggagaccctgggcagcaccagcaccatctgcagcgacaagacaggcaccctgacccagaacaggatgacagtggcccacatgtggtttgacaaccagatccacgaggccgacaccacagaggaccagagcggggccacctttgacaagaggagccccacctggacagccctgagcagaattgctggcctgtgcaacagagctgtgttcaaggccggccaggagaacatctctgtgtccaagagggacacagctggagatgccagcgagagcgccctgctgaagtgcatcgagctgagctgtggctctgtgaggaagatgagggacaggaaccccaaggtggccgagatccccttcaacagcaccaacaagtaccagctgagcatccacgagcgggaggacagcccccagagccacgtgctggtgatgaagggggcccctgagcgcatcctggaccgctgcagcaccatcctggtgcagggcaaggagatccccctggacaaggagatgcaggatgccttccagaatgcctacatggagctgggcggcctgggggagcgggtgctgggcttctgccagctgaacctgcccagcggcaagttcccccggggcttcaagtttgacacagatgagctgaacttccccacagagaagctgtgctttgtgggcctgatgtccatgattgatcctcccagggctgctgtgcctgatgctgtgggcaagtgccgctctgctggcatcaaggtgatcatggtgactggagaccaccccatcacagccaaggccatcgccaagggcgtgggcatcatcagcgagggcaatgaaacagtggaggacattgctgcccggctgaacatccccatgagccaggtgaacccccgggaggccaaggcctgtgtggtgcacggcagtgacctgaaggacatgaccagcgagcagctggatgagatcctgaagaaccacacagaaattgtgtttgcccggaccagcccccagcagaagctgatcatcgtggagggctgccagaggcagggcgccatcgtggccgtgactggagatggagtgaatgacagccctgccctgaagaaggctgacattggaattgccatgggcatcagcggcagtgatgtgtccaagcaggccgctgacatgatcctgctggatgacaactttgccagcatcgtgactggagtggaggagggccgcctcatctttgacaacctgaagaagagcatcgcctacaccctgaccagcaacatccctgagatcacccccttcctgctcttcatcatcgccaacatccccctgcccctgggcaccgtgaccatcctgtgcatcgacctgggcacagacatggtgcctgccatcagcctggcctatgaagctgctgagagtgacatcatgaagaggcagcccaggaacagccagacagacaagctggtgaatgaaagactcatctccatggcctacggccagatcggcatgatccaggccctgggcggcttcttcacctactttgtgatcctggccgagaatggcttcctgcccagccggctgctgggcatccggctggactgggatgacaggaccatgaatgacctggaggacagctatggccaggagtggacctatgagcagaggaaggtggtggagttcacctgccacacagccttctttgccagcatcgtggtggtgcagtgggccgacctgatcatctgcaagaccaggaggaacagcgtcttccagcagggcatgaagaacaagatcctgatcttcggcctgctggaggagacagccctggccgccttcctgagctactgccccggcatgggcgtggccctgaggatgtaccccctgaacctgctgatcttcatctatgatgaggtgaggaagctgatcctgcggcgctacccaggcggctgggtggagaaggagacctactactag

SEQ ID NO: 14577 - DNA, 2172 bp, Artificial Sequence
  derived and/or modified sequence
atgctgagcagcgccctggccctgagcggggccctggtgaagaggctgaagccacccaacggccacttcatcctgacagacacccatgacctgaacaccagcaagattgagcacagcctcttcaccgtgtgcctgaccctgacagccaagaggatggccaggaagaactgcctggtgaagaacctggaggccgtggagaccctgggcagcaccagcaccatctgcagcgacaagacaggcaccctgacccagaacaggatgacagtggcccacatgtggtttgacaaccagatccatgaagctgacaccacagaggaccagagcggggccacctttgacaagaggagccccacctggacagccctgagcagaattgctggcctgtgcaacagagctgtgttcaaggccggccaggagaacatctctgtgtccaagagggacacagctggagatgccagcgagagcgccctgctgaagtgcatcgagctgagctgtggctctgtgaggaagatgagggacaggaaccccaaggtggccgagatccccttcaacagcaccaacaagtaccagctgagcatccacgagcgggaggacagcccccagagccacgtgctggtgatgaagggggcccctgagcgcatcctggaccgctgcagcaccatcctggtgcagggcaaggagatccccctggacaaggagatgcaggatgccttccagaatgcctacatggagctgggcggcctgggggagcgggtgctgggcttctgccagctgaacctgcccagcggcaagttcccccggggcttcaagtttgacacagatgagctgaacttccccacagagaagctgtgctttgtgggcctgatgtccatgattgacccccccagggctgctgtgcctgatgctgtgggcaaatgtagatctgctggcatcaaggtgatcatggtgactggagaccaccccatcacagccaaggccatcgccaagggcgtgggcatcatcagcgagggcaatgagaccgtggaggacattgctgcccggctgaacatccccatgagccaggtgaacccccgggaggccaaggcctgtgtggtgcacggcagtgacctgaaggacatgaccagcgagcagctggatgagatcctgaagaaccacacagagatcgtgtttgcccggaccagcccccagcagaagctgatcatcgtggagggctgccagaggcagggcgccatcgtggccgtgactggagatggagtgaatgacagccctgccctgaagaaggctgacatcggcatcgccatgggcatcagcggcagtgatgtgtccaagcaggccgctgacatgatcctgctggatgacaactttgccagcatcgtgactggagtggaggagggccgcctcatctttgacaacctgaagaagagcatcgcctacaccctgaccagcaacatccctgagatcacccccttcctgctcttcatcatcgccaacatccccctgcccctgggcaccgtgaccatcctgtgcatcgacctgggcacagacatggtgcctgccatcagcctggcctatgaggccgctgagagtgacatcatgaagaggcagcccaggaacagccagacagacaagctggtgaatgaaagactcatctccatggcctacggccagatcggcatgatccaggccctgggcggcttcttcacctacttcgtcatcctggctgaaaatggcttcctgcccagccggctgctgggcatccggctggactgggatgacaggaccatgaatgacctggaggacagctatggccaggagtggacctatgagcagaggaaggtggtggagttcacctgccacacagccttctttgccagcatcgtggtggtgcagtgggccgacctgatcatctgcaagaccaggagaaattctgtgttccagcagggcatgaagaacaagatcctgatcttcggcctgctggaggagacagccctggccgccttcctgagctactgccccggcatgggcgtggccctgaggatgtaccccctgaaggtgacctggtggttctgtgccttcccctacagcctgctgatcttcatctatgatgaggtgaggaagctgatcctgcggcgctacccaggcggctgggtggagaaggagacctactactag

SEQ ID NO: 14578 - DNA, 2145 bp, Artificial Sequence
  derived and/or modified sequence
tgacagctgatcactggagtggccgtgttcctgggcgtgtccttctttgtgctgagcctcatcctgggctacagctggctggaggccgtcatcttcctgattggcatcatcgtggccaacgtgcctgagggcctgctggccaccgtgacagtgtgcctgaccctgacagccaagaggatggccaggaagaactgcctggtgaagaacctggaggccgtggagaccctgggcagcaccagcaccatctgcagcgacaagacaggcaccctgacccagaacaggatgacagtggcccacatgtggtttgacaaccagatccatgaagctgacaccacagaggaccagagcggggccacctttgacaagaggagccccacctggacagccctgagcagaattgctggcctgtgcaacagagctgtgttcaaggccggccaggagaacatctctgtgtccaagagggacacagctggagatgccagcgagagcgccctgctgaagtgcatcgagctgagctgtggctctgtgaggaagatgagggacaggaaccccaaggtggccgagatccccttcaacagcaccaacaagtaccagctgagcatccacgagcgggaggacagcccccagagccacgtgctggtgatgaagggggcccctgagcgcatcctggaccgctgcagcaccatcctggtgcagggcaaggagatccccctggacaaggagatgcaggatgccttccagaatgcctacatggagctgggcggcctgggggagcgggtgctgggcttctgccagctgaacctgcccagcggcaagttcccccggggcttcaagtttgacacagatgagctgaacttccccacagagaagctgtgctttgtgggcctgatgtccatgattgacccccccagggctgctgtgcctgatgctgtgggcaaatgtagatctgctggcatcaaggtgatcatggtgactggagaccaccccatcacagccaaggccatcgccaagggcgtgggcatcatcagcgagggcaatgagaccgtggaggacattgctgcccggctgaacatccccatgagccaggtgaacccccgggaggccaaggcctgtgtggtgcacggcagtgacctgaaggacatgaccagcgagcagctggatgagatcctgaagaaccacacagagatcgtgtttgcccggaccagcccccagcagaagctgatcatcgtggagggctgccagaggcagggcgccatcgtggccgtgactggagatggagtgaatgacagccctgccctgaagaaggctgacatcggcatcgccatgggcatcagcggcagtgatgtgtccaagcaggccgctgacatgatcctgctggatgacaactttgccagcatcgtgactggagtggaggagggccgcctcatctttgacaacctgaagaagagcatcgcctacaccctgaccagcaacatccctgagatcacccccttcctgctcttcatcatcgccaacatccccctgcccctgggcaccgtgaccatcctgtgcatcgacctgggcacagacatggtgcctgccatcagcctggcctatgaggccgctgagagtgacatcatgaagaggcagcccaggaacagccagacagacaagctggtgaatgaaagactcatctccatggcctacggccagattgaaaatggcttcctgcccagccggctgctgggcatccggctggactgggatgacaggaccatgaatgacctggaggacagctatggccaggagtggacctatgagcagaggaaggtggtggagttcacctgccacacagccttctttgccagcatcgtggtggtgcagtgggccgacctgatcatctgcaagaccaggaggaacagcgtcttccagcagggcatgaagaacaagatcctgatcttcggcctgctggaggagacagccctggccgccttcctgagctactgccccggcatgggcgtggccctgaggatgtaccccctgaaggtgacctggtggttctgtgccttcccctacagcctgctgatcttcatctatgatgaggtgaggaagctgatcctgcggcgctacccaggcggctgggtggagaaggagacctactactag

SEQ ID NO: 14579 - DNA, 819 bp, Artificial Sequence
  derived and/or modified sequence
atggacagcttcaagaacatggtgccccagcaggccctggtgatccgggagggggagaagatgcagatcaatgctgaggaggtggtggtgggggacctggtggaggtgaagggcggggacagagtgcctgctgacctgcgcatcatcagcagccacggctgcaaggtggacaacagcagcctgaccggggagagcgagccccagaccaggagccctgagttcacccatgagaaccccctggagaccaggaacatctgcttcttcagcaccaactgtgtggagggcacagcccggggcatcgtcatcgccaccggggacagaacagtgatgggcagaattgccaccctggccagcggcctggaggtgggccgcacccccatcgccatggagattgagcacttcatccagctgatcactggagtggccgtgttcctgggcgtgtccttctttgtgctgagcctcatcctgggctacagctggctggaggccgtcatcttcctgattggcatcatcgtggccaacgtgcctgagggcctgctggccaccgtgacagtgtgcctgaccctgacagccaagaggatggccaggaagaactgcctggtgaagaacctggaggccgtggagaccctgggcagcaccagcaccatctgcagcgacaagacaggcaccctgacccagaacaggatgacagtggcccacatgtggtttgacaaccagatccatgaagctgacaccacagaggaccagagcggggactgggtgctgcagaggggctggattggcctggaggaggccgagggcagcggcgtggtgggctag

SEQ ID NO: 14580 - DNA, 3063 bp, Artificial Sequence
  derived and/or modified sequence
atgggccggggcgccggccgggagtacagccccgccgccaccaccgctgagaacggcggcgggaagaaaaagcagaaagagaaggagctggatgagctcaagaaggaagtggctatggacgaccacaagctctccttagacgaattaggccgcaaataccaggttgacctcagcaaagggctaaccaatcagagggcacaggacgtgctagcaagggatggtccaaacgcactcacacctccgcccacgactcccgagtgggtgaagttctgtcggcaactgtttggcggattttccatcctgctatggatcggcgctattctctgctttctggcctacgggattcaggcagccatggaagatgagccatcaaacgacaatctctacctgggcgtcgtcctggccgcggtcgtcattgtcactggctgtttcagctactaccaggaagctaagtcttccaaaataatggacagcttcaagaatatggtaccccagcaggccctcgttatccgggagggggagaaaatgcaaattaatgccgaagaagtcgtggtgggcgacctggtggaagtgaagggaggtgacagagtgcccgctgacctgcggatcatatcctcacatgggtgtaaagtggacaactcttccttgactggagaaagtgagccgcaaactaggagcccagaatttacacacgagaaccccttagaaacccggaatatctgttttttcagcaccaattgcgttgagggcactgcaaggggtatagtgatcgcaaccggcgatagaacggtcatgggtcgtattgccacactcgctagcggtctggaggtcggacggactcctatcgctatggagatcgagcacttcattcaactgatcacgggcgtagccgtgtttctgggtgtgtcgttttttgtcctgagtctgattctaggatactcctggctggaagccgtgatcttcctgattggaataatcgtggccaacgtgcccgaaggtcttctcgccacagtgaccgtgtgcctaacactgacagctaaacgaatggcaaggaaaaactgccttgtgaagaatcttgaagcagtagaaaccctcgggtctacctccaccatttgttccgataaaaccggcacgttgactcagaataggatgacggtggctcatatgtggttcgacaatcagatccatgaggcagatactaccgaagaccagtccggggctacatttgacaaaaggtcccctacctggacagcactttcaaggatagcagggctctgtaaccgggccgtttttaaggctgggcaagagaatatttccgtgtctaagcgggacaccgccggggacgcgtccgaaagtgccctgttaaagtgtatcgagctgtcctgtggctctgtgcgaaagatgcgcgaccggaatcctaaggtcgcggagattccgtttaacagtaccaacaagtatcaacttagcattcatgaacgggaggactctccccaaagtcacgtgctggttatgaagggagcaccggaaagaattctcgataggtgcagcaccatactggtccaggggaaagagatacccttggataaggaaatgcaggacgctttccagaacgcctatatggagcttggtggtctgggagagcgtgtgttaggcttttgccagctgaacttgcccagtggcaagttccctcgcggctttaaatttgatacagatgaacttaacttcccaactgagaagctttgcttcgtcggcctgatgtccatgattgatcccccccgagccgctgtgccagatgcagtgggcaaatgcagaagcgcggggattaaggtcatcatggtgactggcgaccacccgatcaccgcaaaagctattgcaaaaggagtcggcattatatcagagggcaatgagacagttgaagacatcgccgcccggctgaatatccctatgagccaggttaaccctcgtgaagccaaagcttgtgtagttcacggatccgatctgaaagacatgacatcggagcaattggacgagatcctcaagaaccacaccgagatcgtcttcgcccgaactagtccgcaacagaaactcattatcgtcgaaggctgtcagcggcagggcgccatcgtggctgtgacaggcgacggggtgaacgacagccccgcactcaaaaaggccgatatcggtatcgccatggggatttctggttccgacgtgtcaaagcaggcagccgacatgattctgctcgatgacaatttcgcaagtattgtcactggcgtcgaagagggaagactaatattcgataacctgaaaaaaagtatagcatacaccttgacctcaaacatccccgagattacacctttcttgttgttcatcatagctaatattcccctgcctttaggaacagtcacgatactgtgtattgacctggggaccgacatggtcccggcgatatcattagcatatgaggcggcagagagcgacattatgaagagacagccccgcaattctcagacagacaagctcgtcaacgaacggctcatctctatggcttacggacagattggaatgatccaggcgcttggggggttcttcacgtatttcgtgattctagctgagaacgggttcctcccaagtaggctattgggtatacggctggactgggatgaccgtacgatgaacgatctggaggactcctacggccaggagtggacctatgagcaacgcaaggtggtcgaattcacctgccataccgcgtttttcgcgtccatagttgtggtacagtgggcggacttgatcatatgtaaaacacggcgcaactccgtttttcaacagggaatgaaaaataaaatcctgatattcggattactggaggagacggctttggccgcttttctcagctattgcccgggcatgggagtcgccttgcgcatgtacccattgaaggtgacgtggtggttttgcgcttttccttacagtcttctcatcttcatttatgatgaggtgcgtaagctgattcttaggcgctaccccggcgggtgggtggaaaaggagacctactactag

SEQ ID NO: 14581 - DNA, 3030 bp, Artificial Sequence
  derived and/or modified sequence
atgggccggggcgccggccgggagtacagccccgccgccaccaccgcggaaaatggaggagggaaaaaaaagcaaaaagagaaagaattagatgaactgaaaaaggaggtcgcaatggacgaccataaactatctttggatgagttgggaagaaagtatcaagttgaccttagcaaggggttaaccaaccagcgcgcccaggatgtgctggctcgggatggaccgaacgccttaacacccccccctacaacccctgaatgggtgaagttctgtaggcagttatttggcggcttctctatcctgctatggatcggagccatcctttgtttcctcgcctacgggattcaggctgctatggaagatgagccaagtaatgataacctgtatctcggagttgttttagccgccgtggtgatagtcaccggctgctttagctattatcaggaggcaaagtcatctaagattatggactcattcaaaaacatggtcccccagcaggcgctggttatacgagagggcgagaagatgcagattaatgctgaagaagttgttgttggagacttggtcgaagtaaagggcggtgatcgggtccctgctgacttgaggattatatcctcccatggatgcaaggtggacaacagcagcttgacaggggagtcggaaccccagacgcgcagccccgagttcactcacgaaaaccctctggagaccagaaacatctgctttttctccactaattgcgttgaaggaaccgcccgggggatagtgatcgcaactggcgataggaccgtgatgggacggattgcaactctggcatccggcctggaagtgggcaggactcccatcgccatggagatagagcatttcatccagcttatcaccggggtggccgtctttctcggagtgtccttcttcgtgttgtctcttattctgggctacagttggttggaggccgtgattttcctgattggaataatcgtggctaacgtgcccgagggcctactcgccacagtgaccgtatgtcttacattgactgctaagcggatggcccggaagaattgtctggtgaaaaacctcgaggctgtggagactttgggctctacatccactatttgcagtgacaagacaggaacactgactcaaaacagaatgactgtcgctcacatgtggtttgacaaccagatacacgaagccgatacaacagaagatcaatcaggcgccacctttgacaagcgctcccccacgtggaccgctctctcacgcatcgctggcctatgtaacagggccgtatttaaagcaggacaggagaacatttccgtgagcaagcgcgataccgctggcgacgctagtgagtcggctctgctgaagtgcatcgaactatcctgcggcagtgtgagaaagatgagagaccgtaatccaaaagtagctgagattcccttcaattcgacaaacaaatatcagttgagtatccacgagcgagaagacagtccccagtctcatgtcctggtgatgaagggcgcccccgagcgaatcctggacaggtgctcaacaatactggtgcaggggaaggaaatcccactcgataaggaaatgcaagacgcattccagaatgcatacatggaactcggtggtcttggagaaagagtgctcgggttttgccagctgaatctcccctcagggaagttcccacgcggttttaaatttgacaccgacgaattgaacttccccaccgaaaagctgtgtttcgtcggtttgatgtccatgatcgacccaccacgcgccgccgtgcctgacgccgttgggaaatgtcgctccgctggtatcaaggtgattatggtaaccggcgaccaccccatcaccgccaaagccatcgcaaagggcgtgggtattatttccgaaggtaacgaaacagtcgaggacattgcggcgcggctcaatatccctatgtcccaggtcaatcccagggaggccaaggcctgcgtggtacatgggtccgatctaaaggatatgacaagcgagcagctggatgagattctgaaaaaccacaccgagatcgtgtttgccaggacaagcccacagcagaagctcatcatcgttgagggatgccaaagacagggcgcaattgtggccgtcaccggggatggcgtgaacgattccccagcattgaaaaaggcagatatcggcattgcgatgggaatctccggcagtgacgtgtccaagcaggctgccgatatgattctgttggacgacaatttcgcctcaatagtaaccggcgtcgaagaagggcgtctgatatttgataatcttaaaaagtccatcgcgtacacattaacctcgaacattcccgagataacacctttcctcttgtttatcattgcaaacatccccctccccctcggtaccgtgactattctctgtatcgacttggggacggacatggtacctgctatcagcctggcgtatgaagccgccgaatccgatattatgaaacgccaaccccgcaacagtcagacagataaactcgtcaatgaaagactcattagcatggcctatggtcagatcggcatgattcaggcccttggggggttttttacatacttcgtgattctcgctgagaatggcttcttgcctagcagactgctgggaatcaggcttgactgggatgacagaacaatgaacgatttggaggattcatacgggcaagagtggacctacgagcagcggaaggtggtcgaattcacttgtcacaccgccttctttgccagcatcgtggtggtccagtgggctgaccttatcatttgtaaaactagacgcaactctgtgttccaacaaggcatgaaaaataagattctgatcttcggattactagaggaaacagctttggccgcattcctgagctattgccctggtatgggtgtcgccctgcgcatgtatcctctgaacctgctgattttcatctacgacgaggtgagaaaactcattttgagacgctatcccggtgggtgggtggagaaagagacgtactactag

SEQ ID NO: 14582 - DNA, 2172 bp, Artificial Sequence
  derived and/or modified sequence
atgctgagcagcgccctggccctgagcggcgccctggtgaagcggctaaagccacccaacggacattttatcctcaccgatactcatgatcttaacacgtccaaaattgaacattcactctttaccgtctgcctgactttgacagccaagaggatggctcggaaaaattgtcttgttaagaacctggaggcagtcgaaacgctaggttcaactagcaccatctgtagcgacaagacaggaaccctcacgcaaaaccgcatgacagtggcccacatgtggtttgataaccaaatccatgaggccgacacaacagaggaccaatccggtgccacctttgataaacgatctcctacctggacggcactgtcacgtattgcgggcctatgcaacagggctgtatttaaggccgggcaagagaacatttctgtttcaaaacgggataccgctggcgacgcctcagagtctgcgctgctgaaatgcatcgagctgtcatgtggttcagtgagaaagatgagggatcgaaaccctaaggtggccgagatccctttcaacagtacgaataagtaccagctgtctatccacgagcgtgaagactcaccccagtcccatgtcttggtgatgaaaggtgcgcctgaacgaatactcgataggtgttccactattctcgtacaggggaaggagattcccctagataaggagatgcaagacgccttccaaaacgcatatatggagttgggtgggcttggggagcgcgttctcggcttttgtcagctcaatctcccttcagggaagtttccaaggggcttcaagttcgacacggatgaattgaatttccccactgaaaaactttgtttcgtcgggttgatgtctatgatagatccgcccagagccgctgtgcctgatgccgtaggaaagtgcaggagtgctggtataaaggtgataatggttaccggggaccaccccattacagctaaggcaattgccaagggtgtgggcatcatttctgaaggaaacgagacggtcgaggacattgccgcacgcctgaatatccccatgtcacaggtgaatcccagagaagctaaggcgtgtgtggtacatgggagcgacttaaaggacatgacaagtgagcagctcgacgaaatcttaaagaatcacaccgagatagtgttcgcgcgcacatcgcctcaacaaaagctgataatcgtcgaaggctgccaaagacaaggcgccattgtggccgtgaccggcgacggcgttaatgactcaccagctctcaagaaggccgatatcggtatagcaatgggtatcagtgggtctgatgtctcaaaacaggcagccgacatgatcctgctcgacgataatttcgcttccattgtgacaggcgtggaggaaggtcgcctgatctttgacaaccttaagaagagcattgcatatactttgacaagtaacatccctgagattacacctttcctgctctttatcatcgccaatattccactacccctaggcacagtgactatcctgtgcatcgacctgggcaccgatatggtcccagctatcagtctggcttacgaagcagccgagagcgacattatgaaaagacagccacgtaattcacagacggacaagctggtcaatgagcggctcatctcaatggcctacgggcaaattggcatgatccaggcactcggcggcttcttcacttatttcgttattttggcggagaacggttttctgccctcccggcttttaggtataaggctcgattgggacgacaggaccatgaacgatctggaagactcgtatggtcaggagtggacttatgagcaaagaaaggtggtggaattcacctgccacactgctttcttcgccagcatcgtcgtagttcaatgggccgaccttatcatatgcaagacgaggagaaattctgtctttcagcaggggatgaagaataagatcttaattttcggcttacttgaggagacagcacttgcagccttcctgtcatactgccccggcatgggtgtcgctttgagaatgtacccgctaaaggtcacctggtggttctgtgcctttccatattcgctgctcatctttatctacgatgaagttcgaaaactgatcctgagaagataccctggaggttgggtggagaaggaaacatactattag

SEQ ID NO: 14583 - DNA, 2145 bp, Artificial Sequence
  derived and/or modified sequence
tgacagctgatcaccggcgtggccgtgttcctgggcgtgagcttcttcgtcttatcacttatccttggctattcctggctggaagcggtgatcttcctgattggaatcattgtcgctaacgtgcccgagggtctgctggccaccgtaacagtatgcctgacgctcaccgccaagcgaatggcccgcaaaaactgtttggtaaagaatctcgaagcggtggagacactgggcagcacatccacaatctgttcagataagacgggtaccctcacacagaatcggatgactgtggcccacatgtggttcgataaccaaattcacgaagccgataccactgaggatcagtccggagctacatttgataaacggagcccaacatggaccgccctcagtagaatcgccgggctgtgcaaccgtgcagttttcaaagcggggcaggagaatatctccgtatcaaaacgagatacagccggcgatgcgtccgagtccgcactgctgaaatgtatagaactgtcctgtggctcagtgaggaagatgagagacagaaatccgaaggttgccgagattccatttaactcaactaataagtatcagctcagcattcatgaaagagaagacagtccccagtcacacgtcctggtaatgaagggagctcctgagcgcattttagaccgatgcagtacaatactggttcaggggaaggaaattcctctggacaaggagatgcaggacgcatttcaaaatgcatacatggaactcggtggccttggagagcgtgtgcttggtttctgccagctgaacttgccatctggaaaatttcccaggggcttcaaatttgacactgacgagctgaacttcccgacagaaaaattgtgttttgtcggactgatgtctatgattgatccaccaagagcagccgtgccagatgctgttggaaagtgcagaagcgcaggtattaaagtgattatggtgacaggagaccaccccattaccgccaaagctattgccaagggagtcggcatcatttcggaggggaacgaaaccgttgaagatattgccgccaggctcaatatccctatgtctcaagtgaatccacgcgaagcaaaggcatgcgtagtgcatggttccgacttgaaggatatgactagcgagcaactggatgagatcctcaagaaccacaccgagattgtgttcgcccggaccagtcctcagcagaagcttatcattgtggaggggtgccagaggcagggcgccatcgtggctgttaccggcgatggagtgaatgattcccctgccctcaaaaaggctgatatagggatcgctatggggatctctgggagtgacgtgtccaaacaagctgccgatatgattctactggacgacaactttgccagtattgttacaggcgtggaggaaggtaggcttatttttgataaccttaagaagagcattgcctatacactaaccagcaacattccagaaatcaccccctttcttctgtttatcatcgctaacatccctctgcctttgggaacggtgaccatcctttgcatcgacctaggaactgacatggtgcctgccatctccctagcgtacgaggccgcagagtccgacataatgaagcgacagccgcgtaattcccagaccgacaaactggtaaatgagcggctcatatcaatggcttacggacagatagagaatggcttcctcccaagccggctgttgggcatacgactcgattgggatgacagaaccatgaatgacctggaggattcctacggccaggagtggacttacgaacagcgcaaggtggtggaatttacatgccataccgccttttttgcctctattgtcgtggtgcaatgggcagatttgattatctgtaaaacgaggcgaaatagtgttttccagcagggtatgaaaaacaaaatcctgatctttggcctactggaagaaaccgcgcttgcagctttcctgtcttattgcccagggatgggagtggcattgcgtatgtatcctctgaaagtgacttggtggttctgcgcctttccatactccctcttaatttttatctatgatgaagtgaggaagctcattctgcggagatatccaggaggctgggttgaaaaagaaacttactactag

SEQ ID NO: 14584 - DNA, 819 bp, Artificial Sequence
  derived and/or modified sequence
atggacagcttcaagaacatggtgccccagcaggccctggtgatccgcgaaggagagaagatgcagatcaacgccgaagaggtggtggttggagacctcgtggaggtcaaaggcggtgaccgcgtgcctgccgacctgaggatcataagttctcacggctgcaaagtagataacagcagcttgacaggcgagagtgagcctcagacaagaagccctgagtttacacatgaaaatccattagagactagaaacatttgctttttttccacgaattgtgtggaaggcacagcgaggggtattgtaatcgctacaggcgaccgtactgtgatgggtcgaattgccacgcttgcatcaggcctggaggtgggcaggacaccaatcgctatggagatcgaacatttcatacaactgattacaggagtcgctgtgttcttgggagtctcgttctttgtactctctctcattctgggctacagctggctggaagccgtcatctttctgatagggattatcgtggcaaatgtgcctgaaggtcttctcgcaaccgtgactgtgtgcctgactttgaccgccaagcggatggcccgtaaaaactgcctcgtgaaaaatctcgaagctgttgaaacactggggagtaccagcaccatctgctccgacaaaacagggaccctcacccagaaccggatgactgtggcccacatgtggtttgataatcagattcatgaagccgatacgaccgaggatcagtctggagactgggttctccagcggggctggataggtcttgaagaggccgagggctccggcgtcgtgggctag

SEQ ID NO: 14585 - DNA, 3063 bp, Artificial Sequence
  derived and/or modified sequence
atgggacggggagccggaagggagtacagccctgcggcaactaccgcggaaaacggagggggaaagaaaaagcagaaggaaaaggaactcgatgagctgaaaaaagaagtggctatggacgaccacaagctctccctggatgaactgggacgcaagtatcaggttgatctgtccaagggtctaacaaaccagcgagcccaagacgtgctagccagagacggcccaaatgctcttaccccccctcctacgactcccgagtgggttaaattctgtcgccagttattcggtggtttttcaatcctcttatggatcggggctattttgtgtttcttagcctacggcattcaggcagccatggaggatgagccctctaacgacaatctttatttgggagttgtgttggccgcagtcgtgattgtgacaggttgtttctcgtactatcaggaggctaagtctagcaagattatggactcatttaaaaacatggtgccccaacaggccctcgtcattcgcgaaggagaaaaaatgcagattaatgctgaggaggtggttgtgggggacctagtcgaagtcaagggcggagatcgcgtgccagccgacctgcggataatatcttcccacggttgcaaggttgataactcctctctaaccggcgaaagcgagccccagacacgtagccctgagtttactcacgagaacccactggagacgcgaaacatctgcttcttctctaccaattgtgtggagggcacagcacgcggaattgtgattgcaacgggagaccgcacagttatgggacgaatagccactcttgccagcggactcgaagtgggcaggacacctattgccatggaaattgagcacttcatacagctgatcacgggcgtcgctgtgttcctgggggtgtccttcttcgtcctttccctaatcttggggtattcttggctcgaggcggtgatatttctcattggcataattgtcgccaatgtccctgagggcctgctggcaacggttactgtgtgtctcaccctgacagcgaaacgcatggcgagaaagaactgcctggtgaaaaatttggaagctgtggaaacactgggtagtactagcacaatctgcagcgataaaactggcacactcacccagaataggatgacagtagcacatatgtggtttgataatcagatccacgaagctgatacaactgaggatcagagcggcgctaccttcgacaaacgcagccctacttggacggcacttagccgtatagcagggctgtgtaaccgagcagtgtttaaagccggtcaagaaaatatatctgtctctaaaagagacactgcaggtgatgcttctgaaagcgccctgctaaaatgtattgagctttcatgtggaagcgtcagaaagatgagggaccggaatcccaaagtagccgaaatccccttcaactccacgaacaagtaccagctgtccatccacgagcgggaggacagtccgcagagccatgtgcttgtgatgaaaggagcacccgaacgaattctcgacaggtgtagcacaatcttggtgcaaggtaaggaaatccctctcgataaggagatgcaggacgctttccaaaacgcctacatggagctgggaggcttaggggaacgggtgctgggattctgtcagctcaatctcccctcaggtaagtttcccaggggattcaagttcgatactgatgagctgaattttcccacagaaaagctctgttttgtcggtcttatgtccatgattgacccgcctagagctgctgtcccagatgctgtagggaaatgtcgctcagccggaattaaagtcattatggtgacaggtgatcatccaattactgcaaaggctattgcaaagggcgttggtatcatttcggaaggcaatgagaccgtggaggatattgctgcacggctcaacattccaatgagtcaggtgaacccacgggaggccaaagcttgcgttgtccacggaagcgacctcaaggatatgacctccgaacagctggatgaaatcttgaaaaaccacaccgagatcgttttcgcccgtacatctccccagcagaaactgattatcgtcgagggttgccaacgccagggagcaatcgtggccgtgaccggggatggcgtgaacgatagtccagcactcaagaaagctgacattggaattgcaatgggcatcagtgggagtgacgtctctaagcaagctgctgatatgatactgctcgacgataacttcgctagcatcgttaccggtgtcgaggagggacggctgatcttcgacaacttaaaaaagtccattgcctacaccctgactagtaacattccagagatcactccgttccttttatttatcattgcgaatatccctttaccactaggcactgtgactattctgtgtatagacctaggcactgatatggtgcccgcaatctcccttgcctacgaagctgcagagtccgatattatgaagcggcaaccacgaaatagtcaaacggacaagcttgtgaatgagaggcttattagtatggcttatgggcaaattggtatgatccaggccttagggggattttttacgtattttgtgatactcgccgaaaatgggtttctgcccagcaggctgttggggatcagattggattgggacgaccgaactatgaacgacctggaagatagctatggccaggaatggacttatgaacaaagaaaggtcgtggagttcacctgtcacacggcattcttcgcctcaatcgtggtcgtccagtgggctgatttaatcatctgtaagaccagacgcaacagcgttttccagcagggcatgaaaaataaaattctcatttttggacttctggaggaaacagctctggctgcgtttctgtcatattgtccaggtatgggcgtggcactcaggatgtaccctctcaaggtgacatggtggttttgtgctttcccctactcactgttgatcttcatttatgatgaggtaagaaaattgatcttacgccgatacccgggtgggtgggtggagaaagagacgtattactag

SEQ ID NO: 14586 - DNA, 3030 bp, Artificial Sequence
  derived and/or modified sequence
atgggtcgaggggcaggaagggagtacagcccagcggcaacaaccgcagagaacggtggaggcaaaaagaagcagaaagaaaaagagctggacgagctcaagaaggaagtggctatggatgatcacaagctctcccttgacgagctcgggaggaaataccaagtagacctgtctaaggggttgacaaatcaacgggctcaggatgtgctggccagagacggtcccaatgctctgacgcctccacctacaacccccgaatgggtgaaattttgcagacaactgtttgggggtttcagcattctgctatggatcggtgcgatcctgtgcttcctcgcatatggtatccaggcggctatggaggacgagccaagcaatgacaatctgtacctgggcgtggttctggcggctgtagtcatcgtgacagggtgtttctcctattatcaagaggccaagtcaagcaagatcatggattcattcaagaacatggttcctcaacaggctctggttattcgcgagggcgaaaagatgcagattaatgctgaggaagtggtggtgggagacttggttgaggtcaaaggtggggatagagtgcccgcagacctgagaatcatatcctctcatggttgcaaggtggataactcttccctcaccggcgaaagtgaacctcagacacgtagcccagaattcacacacgagaatcccctggaaactaggaacatctgcttcttctcaactaactgtgttgaagggaccgccaggggcattgtgattgccacaggggatcgcacggtcatgggacggattgcaacactggcatcaggccttgaagtgggccgaactcccatcgcaatggaaattgagcatttcatacagctcattacaggcgtggcagtgtttctcggcgtaagtttcttcgtactgtctctaattctgggttattcgtggctggaggccgttatcttccttataggcatcatagtggccaacgtaccagagggcctgttggcgaccgtgactgtgtgcctgactctcacagcaaagcgcatggctaggaaaaactgtcttgtgaagaatctggaagccgttgagaccttaggctccacctccactatctgcagcgataaaacaggcactctaactcagaacagaatgacggtagcccacatgtggttcgacaaccagattcacgaagctgacacaaccgaggatcagagcggcgctaccttcgacaaacgatcacccacgtggacagccctttcgcgaatagcgggattgtgtaacagagcagtgttcaaagccggacaggagaatatatccgttagtaaaagagacactgccggagatgcaagcgagagcgccctcctaaagtgcattgagcttagttgtggatcggtgaggaaaatgagagaccgaaacccaaaggtggctgagattccatttaattctactaacaagtatcagttaagcattcacgaacgcgaagatagccctcagtcacatgtgctcgtgatgaaaggcgcacctgagaggatacttgaccgctgttccaccatcttggtacagggcaaggagatccctctggataaggaaatgcaagacgcttttcagaatgcttacatggaactgggcggactcggcgaacgcgtgctcgggttttgccagctcaacttaccttctggtaaatttcctcgtggatttaaatttgacaccgacgagctgaacttcccaaccgagaagctgtgttttgtaggacttatgagcatgattgacccccctcgcgcagcagtaccagacgccgttggaaagtgtcggagcgccggaattaaggttatcatggtgacgggtgatcaccctatcacagcaaaagccattgccaagggagtggggatcatttccgaaggcaatgagacagtggaggacatcgccgcaagactgaatatccctatgtcacaggtaaatcccagagaggccaaagcctgtgtggtgcatggttctgatcttaaggatatgacaagcgagcagctcgatgaaattctcaagaaccacaccgaaatcgtgtttgcacggaccagcccacagcagaaacttataattgtggagggctgccagcggcagggcgctatcgtggccgtgaccggagacggtgtaaacgattctcctgccctcaaaaaggctgatataggtattgccatgggaatttcaggaagtgatgttagtaaacaagccgctgatatgattcttctggacgataactttgcaagcatagtgactggtgtcgaagagggccgactgattttcgacaatcttaaaaagagtattgcctacacactgacttcgaacattcccgagataacaccatttctgctgttcatcattgcaaatatacctttgcctctggggacggtgaccatcttgtgtattgatctgggcactgatatggtgcctgcgatcagcttggcctatgaagctgccgagtctgatataatgaagcgccagccacggaactctcagaccgataaactggtaaatgagcggcttatctccatggcatatggccagatcggcatgatccaggctctgggcggtttcttcacatactttgttatcctggccgagaacggtttcctgccatcccgcttattagggatacgcctggattgggatgaccggaccatgaacgacctcgaggatagctacggacaagaatggacttacgagcagcgcaaggttgttgaattcacctgtcacacagccttcttcgcttcaatcgtggtcgtgcagtgggcagatcttatcatttgtaaaactcgacgcaatagcgtattccaacaggggatgaaaaataagatcctcattttcggattactagaggaaacggccctcgccgcttttctaagctactgcccgggtatgggagtggccctgcgcatgtatcctctgaatctgctcatctttatctatgacgaagtacggaagctcattctacgcagatatccaggcggttgggtggaaaaagagacctattactag

SEQ ID NO: 14587 - DNA, 2172 bp, Artificial Sequence
  derived and/or modified sequence
atgcttagcagtgctctggccctgtccggagccctggttaagagactgaaaccgccaaacggccatttcattctgactgacacacacgatctgaacacctcaaaaatcgagcactctctgtttacggtgtgtctgactcttacggcaaagagaatggccagaaagaattgcttagtgaagaacttagaagctgttgagaccctgggctctacctcaacgatctgttccgataaaaccgggactctcacacagaacagaatgacggtggcccatatgtggtttgataatcaaatccacgaggcggataccacggaagatcaaagcggagcaacttttgataagcgcagcccaacctggacagccctctccaggatagcgggactgtgtaatcgggcagtgtttaaagccggtcaggaaaatatcagtgtgtcaaaacgggacaccgccggagatgccagcgagtcagcattattaaaatgcatcgagctttcctgcggttctgtgcggaaaatgcgggatcgtaatcctaaggtggcagagattccctttaacagtactaacaaataccagctctcaatccacgaacgagaggatagtccacagtcccatgtgctggtaatgaagggcgcaccagagaggatcctggatcgctgttccaccatcctcgtccaaggtaaggagatacccctggacaaagaaatgcaggatgccttccaaaatgcatatatggagttgggtggcctcggggaacgggtccttgggttttgtcagttgaacttgccgtctggtaaatttcccagagggttcaagtttgatacagatgagcttaacttcccaactgagaagctgtgcttcgtcggtcttatgtctatgatcgacccgccaagggctgctgtgcccgatgcagtcgggaagtgccggtccgccggaattaaggtgataatggtaactggcgaccaccccataacagcgaaagccattgcaaagggggtgggcatcatctctgaagggaacgaaacagtggaggacattgccgctcgcctgaatattccaatgtcacaagttaatcccagggaggcgaaagcatgcgtagtccacgggtcggacctgaaggacatgacctcggaacaactggacgagatcctcaagaatcacacggaaatcgtgttcgcgcgaacatcaccgcagcagaaacttattattgtagagggatgccagcgccagggtgccattgttgctgttactggtgatggcgtgaatgattcccccgctctgaagaaagccgatattggcatagccatgggcatctctggttccgatgtctccaagcaagccgctgatatgatactgctcgacgataacttcgcttcaatagttaccggtgtggaagaggggaggctaatctttgacaatcttaaaaagtcgattgcttatacgctgaccagcaacatcccagaaattactccctttttgctgttcatcattgctaacattcccctgcccttgggcaccgtaacaattctgtgtatcgacctcggcactgacatggtgcccgctatctccctggcatacgaggccgctgaatcagatattatgaagaggcaaccccgaaatagccaaactgataaactcgttaacgaacgcctgatatctatggcatacgggcagataggcatgatccaggcgctgggaggcttcttcacttattttgtgatattggccgagaatgggtttcttccctcacgcttgttaggtattagactggattgggatgataggaccatgaatgatctggaagactcatatggacaggagtggacttacgagcagagaaaagttgtcgaatttacttgccatacagccttttttgcctcaatcgttgtggtccaatgggcggacctaattatctgcaaaacaagaaggaactccgttttccagcaggggatgaagaacaaaatcctgatatttggtctgcttgaggagactgcgttggccgctttcctatcctattgccccggaatgggagttgccctgcggatgtatccattgaaagttacctggtggttttgtgcttttccgtattcgttgctgatctttatctacgacgaggtacgtaagctgatactgaggcgctaccccggtggatgggttgagaaagaaacttactattag

SEQ ID NO: 14588 - DNA, 2145 bp, Artificial Sequence
  derived and/or modified sequence
tgacagcttataactggggtggccgtgttcctaggtgtaagtttttttgtgctaagtttgatcttaggttatagttggttggaagccgtcatttttctcatcgggatcatcgtcgccaatgttcccgagggactactagctacagttacggtttgtctcacccttaccgccaaacggatggccaggaagaattgcctggtgaaaaaccttgaagccgttgagactctcgggagcacgagcacaatttgcagcgacaagacagggactctcacacaaaatcgcatgacggtagctcacatgtggttcgacaaccagattcatgaggccgatactaccgaagaccagagcggagccaccttcgataagaggtcccccacttggacagctctcagtagaattgctggtctgtgcaacagggccgtctttaaggcaggtcaagagaacatctcagtgtccaaacgggatacagccggtgatgcctccgagagtgccttattgaagtgtattgaactctcctgtggaagtgtgagaaaaatgagggacagaaacccaaaggtagccgaaattccgttcaacagcacaaataagtatcagctctccattcacgagcgggaagattctcctcagtcacatgtattggtgatgaagggggctccagagagaattttggaccggtgcagcacgatcctagtgcagggcaaagaaatacccctcgataaggagatgcaggacgcctttcagaacgcgtatatggaactgggcggattaggagagcgagtgttagggttttgccaactgaatttacccagtggcaaatttccgagaggttttaagtttgatacagatgagctcaatttccctacagagaaactgtgcttcgtcggcttaatgtcaatgatagatccccctcgcgctgcggtgccagatgccgtaggtaagtgtagaagtgcgggtataaaggtgattatggtgaccggggatcaccccattaccgcaaaggctatcgctaaaggagtagggattatctccgaggggaacgagacagtggaagatatcgcggctcgcttgaatataccaatgtcccaggtcaacccccgagaggctaaggcgtgtgttgtgcacggttctgacctgaaggatatgaccagcgagcagctcgacgaaatcctgaaaaatcacacagagatcgtgtttgctcgcacatcacctcagcagaaattgatcattgtcgaggggtgccagcggcaaggagccatagttgctgtgactggggatggggtcaacgactccccggcactgaaaaaagctgacatcggcatcgcaatgggcatctcgggatccgatgttagcaagcaagcggctgatatgatcctgctggacgataatttcgctagcattgtcacaggcgtggaagagggtcgtctcatttttgacaatttgaaaaagtcaatagcctatactctaacttctaacatcccagaaatcacccccttcctccttttcattatagcaaatatccctctgccactgggcaccgtgaccatactgtgtattgacctaggcacagatatggttcctgccatcagccttgcatacgaggcagccgagtccgacattatgaagaggcagcctagaaactcccaaactgacaaacttgttaacgagcgcctgatcagtatggcctacggccagatcgaaaatggatttttacctagccgtctgctaggcattcggttagattgggacgacaggaccatgaacgacctcgaagattcctatgggcaggagtggacatacgagcaacggaaagtggtcgagtttacctgtcacacagccttcttcgcctcaatcgttgtcgtacaatgggcggatctaattatctgtaaaaccaggagaaactcagtctttcagcagggcatgaaaaacaaaattctcatctttggcctgttagaggagactgctctggctgctttcttgtcatattgtccaggcatgggcgttgccttacgaatgtacccactgaaagtcacctggtggttttgtgcctttccgtacagcctgctgattttcatatatgatgaagtgcggaagctgattcttcgacggtacccaggtggatgggtagaaaaagagacatactattag

SEQ ID NO: 14589 - DNA, 819 bp, Artificial Sequence
  derived and/or modified sequence
atggattccttcaaaaacatggtcccacagcaggcactggtgattagggagggggaaaagatgcagattaatgcagaggaagtggtggttggggatttggtcgaagtcaaagggggagacagagtgcctgccgatctgaggattatatctagccacggatgcaaggtcgacaactcttcactcaccggagaaagcgagcctcagacgcggtcacccgagttcactcacgagaacccactggagacccgaaatatctgtttcttcagcacaaactgcgtggaaggaacggcgcgagggattgtcatagctaccggagaccgtacggtgatgggcagaattgctacgttagcctcaggactggaggtgggcagaacacccatagcaatggaaattgaacattttatccaactcattactggcgttgccgtgttcttgggggtatctttcttcgtactgagcctcatcctgggttacagctggctggaagctgtcattttcctgatcgggataatcgtggctaacgtgcctgagggcttgctcgctaccgtgaccgtctgcctcacactcacagcgaaaagaatggcaaggaaaaattgccttgtgaaaaatcttgaggccgtggaaacattggggagtacatccactatctgttctgacaaaaccggtacacttacccagaataggatgacagtagcacacatgtggtttgataaccaaatccatgaagccgataccacggaagaccagtcaggcgattgggtcctccagaggggatggatcggactggaagaagctgaaggctcaggtgtcgttggatag

SEQ ID NO: 14590 - DNA, 5421 bp, Artificial Sequence
  derived and/or modified sequence
gtctccgactgtcccagacgggctggtgtgggcttgggatcctcctggtgacctctcccgctaaggtccctcagccactctgccccaagatgggccgtggggctggccgtgagtactcacctgccgccaccacggcagagaatgggggcggcaagaagaaacagaaggagaaggaactggatgagctgaagaaggaggtggcaatggatgaccacaagctgtccttggatgagctgggccgcaaataccaagtggacctgtccaagggcctcaccaaccagcgggctcaggacgttctggctcgagatgggcccaacgccctcacaccacctcccacaacccctgagtgggtcaagttctgccgtcagcttttcggggggttctccatcctgctgtggattggggctatcctctgcttcctggcctacggcatccaggctgccatggaggatgaaccatccaacgacaatctatatctgggtgtggtgctggcagctgtggtcattgtcactggctgcttctcctactaccaggaggccaagagctccaagatcatggattccttcaagaacatggtacctcagcaagcccttgtgatccgggagggagagaagatgcagatcaacgcagaggaagtggtggtgggagacctggtggaggtgaagggtggagaccgcgtccctgctgacctccggatcatctcttctcatggctgtaaggtggataactcatccttaacaggagagtcggagccccagacccgctcccccgagttcacccatgagaaccccctggagacccgcaatatctgtttcttctccaccaactgtgttgaaggcactgccaggggcattgtgattgccacaggagaccggacggtgatgggccgcatagctactctcgcctcaggcctggaggttgggcggacacccatagcaatggagattgaacacttcatccagctgatcacaggggtcgctgtattcctgggggtctccttcttcgtgctctccctcatcctgggctacagctggctggaggcagtcatcttcctcatcggcatcatagtggccaacgtgcctgaggggcttctggccactgtcactgtgtgcctgaccctgacagccaagcgcatggcacggaagaactgcctggtgaagaacctggaggcggtggagacgctgggctccacgtccaccatctgctcggacaagacgggcaccctcacccagaaccgcatgaccgtcgcccacatgtggttcgacaaccaaatccatgaggctgacaccaccgaagatcagtctggggccacttttgacaaacgatcccctacgtggacggccctgtctcgaattgctggtctctgcaaccgcgccgtcttcaaggcaggacaggagaacatctccgtgtctaagcgggacacagctggtgatgcctctgagtcagctctgctcaagtgcattgagctctcctgtggctcagtgaggaaaatgagagacagaaaccccaaggtggcagagattcctttcaactctaccaacaagtaccagctgtctatccacgagcgagaagacagcccccagagccacgtgctggtgatgaagggggccccagagcgcattctggaccggtgctccaccatcctggtgcagggcaaggagatcccgctcgacaaggagatgcaagatgcctttcaaaatgcctacatggagctggggggacttggggagcgtgtgctgggattctgtcaactgaatctgccatctggaaagtttcctcggggcttcaaattcgacacggatgagctgaactttcccacggagaagctttgctttgtggggctcatgtctatgattgaccctccccgggctgctgtgccagatgctgtgggcaagtgccgaagcgcaggcatcaaggtgatcatggtaaccggggatcaccctatcacagccaaggccattgccaaaggcgtgggcatcatatcagagggtaacgagactgtggaggacattgcagcccggctcaacattcccatgagtcaagtcaaccccagagaagccaaggcatgcgtggtgcacggctctgacctgaaggacatgacatcggagcagctcgatgagatcctcaagaaccacacagagatcgtctttgctcgaacgtctccccagcagaagctcatcattgtggagggatgtcagaggcagggagccattgtggccgtgacgggtgacggggtgaacgactcccctgcattgaagaaggctgacattggcattgccatgggcatctctggctctgacgtctctaagcaggcagccgacatgatcctgctggatgacaactttgcctccatcgtcacgggggtggaggagggccgcctgatctttgacaacttgaagaaatccatcgcctacaccctgaccagcaacatccccgagatcacccccttcctgctgttcatcattgccaacatccccctacctctgggcactgtgaccatcctttgcattgacctgggcacagatatggtccctgccatctccttggcctatgaggcagctgagagtgatatcatgaagcggcagccacgaaactcccagacggacaagctggtgaatgagaggctcatcagcatggcctacggacagatcgggatgatccaggcactgggtggcttcttcacctactttgtgatcctggcagagaacggtttcctgccatcacggctactgggaatccgcctcgactgggatgaccggaccatgaatgatctggaggacagctatggacaggagtggacctatgagcagcggaaggtggtggagttcacgtgccacacggcattctttgccagcatcgtggtggtgcagtgggctgacctcatcatctgcaagacccgccgcaactcagtcttccagcagggcatgaagaacaagatcctgatttttgggctcctggaggagacggcgttggctgcctttctctcttactgcccaggcatgggtgtagccctccgcatgtacccgctcaaagtcacctggtggttctgcgccttcccctacagcctcctcatcttcatctatgatgaggtccgaaagctcatcctgcggcggtatcctggtggctgggtggagaaggagacatactactgaccccattggaagaagaaccaggcatggaaagatggggagctctggaggtgttgtggggatggtgatggagagggatggaaataacgggtggcattgggtggcaacatttggggagagataatgaggcaactcagcaggctaagttgcggggtatataaattggggtgatgaccccatagacctaactgtgaacaatcagattagacactatgtgttagagtccccccgaccagatccttttccatcccactccactatgttgtctattttttctgaggaattaagggttaccccaccctgcccactcccatcccttcaaccccacttcctactgtaatagatcagcatccaaaagcaggaacccatctaaaccagaaggaagccctctcagatcaccccagcctcactccatttcccacttccacccccgttagcttcctgcaggactctatccctggcttccccttcagaccttgcaatcacaaaaggttcttctggtgagtgcaagagcctgagactggaaaaggtggacttgtctcccagtcgaggctggtaagggaccttcagggagagctgggcagacaggtgggagatggaggtagggctggctggaggaaggaaacaacaaaggaagtgaggtagtgccaatgacaggacatttgacatgagtctccagatagatgtcgtggactccagctctacgtcccacattttagaataccccaccagcagaacaaactcagatctcatcagggtagcagcagaggcaggaccagaaggcaatcaagagcttccagaaatgccacacttgtgtgccacagagttccccgctgacccttggttaggggtcctcttagtccacaaggtccggatgtcactcatgtacttaataacacttcaccttctgtaatactaagtcctcagagctccatgctgttctgaaagggatggccacaagttctttcccagcctcttccattccctttcttttcatgcccatcccgatgaacctgcatcattccccgacactgccaagccaaccctggaaaaggagttcgctggccattggctagaatcagggtggagaagttccctgaaccttcctgtctcccagggacatgtatgcttccagggacaagcttaggtcatgaacatggtcagaacctttggacaagaggaaaaatactaagagatttgctttttctgggtgcggtggctcatgcctgtaatcccagcactttgggaggccgaggcaggtggatcatgaggtcaggagttcgaggcgagcctggccaacatggtgaaaccctgtctctactaaaagtacaaaaaattagccagtcatggtggcacacgcctgtaatctcagctactcaggaggctgaggcaggagaattgcttgaacctgtgaggaagaggttgcagtgagctgagatcgtgccattacactccagcctgggcgaaagggtgagactccatctcaaaaaaaaaaaaaatgatttgcttttgacgtcttaggtggcagggctgttccctccaggcaaatgcccttcaaaccgacgatcattgtgcccacttaccctgggctggagagttggtttcaggttcctacaggagatagctttctttcccttactccctatctaacacttttgctctgcaggcagccttgcccattctctaagcctggcttagaaggcactgggaatgtcctgtagagagagacctagataggtcatgcaagtgagaaagacatctgaggaaaatggaagacctaaggcagacaggaaggaagcacaaaagacaagcattgggtcagacccataaaccacctcccaaaggctgtcatttcattgcactggaattttgctttatcagaagcaaggaagtaagggagtcattgccttgggcctgggaatctaagtgggagacaatattaatttggatccgattaattggagattactaactgtggacaaaagtttatctttgcacaatcaataaaaatggcatttttttagtaaattaagagcataaacaatattgctagaggtggcatgtttagtctaccaaaaacaatacttttcaggcactttagaaatatccttttagaagcagcgagtgcatgggctaattatcatcaatctttatgtatttgttaaagaaacatctacaggatctttattggtgaccttttgtaagacattagtttgaggtactacctatgtacttgaaaataataaagtggcatttctttatgaaaaaaaaa

SEQ ID NO: 14591 - DNA, 3338 bp, Artificial Sequence
  derived and/or modified sequence
ccgactgtcccagacgggctggtgtgggcttgggatcctcctggtgacctctcccgctaaggtccctcagccactctgccccaagatgggccgtggggctggccgtgagtactcacctgccgccaccacggcagagaatgggggcggcaagaagaaacagaaggagaaggaactggatgagctgaagaaggaggtggcaatggatgaccacaagctgtccttggatgagctgggccgcaaataccaagtggacctgtccaagggcctcaccaaccagcgggctcaggacgttctggctcgagatgggcccaacgccctcacaccacctcccacaacccctgagtgggtcaagttctgccgtcagcttttcggggggttctccatcctgctgtggattggggctatcctctgcttcctggcctacggcatccaggctgccatggaggatgaaccatccaacgacaatctatatctgggtgtggtgctggcagctgtggtcattgtcactggctgcttctcctactaccaggaggccaagagctccaagatcatggattccttcaagaacatggtacctcagcaagcccttgtgatccgggagggagagaagatgcagatcaacgcagaggaagtggtggtgggagacctggtggaggtgaagggtggagaccgcgtccctgctgacctccggatcatctcttctcatggctgtaaggtggataactcatccttaacaggagagtcggagccccagacccgctcccccgagttcacccatgagaaccccctggagacccgcaatatctgtttcttctccaccaactgtgttgaaggcactgccaggggcattgtgattgccacaggagaccggacggtgatgggccgcatagctactctcgcctcaggcctggaggttgggcggacacccatagcaatggagattgaacacttcatccagctgatcacaggggtcgctgtattcctgggggtctccttcttcgtgctctccctcatcctgggctacagctggctggaggcagtcatcttcctcatcggcatcatagtggccaacgtgcctgaggggcttctggccactgtcactgtgtgcctgaccctgacagccaagcgcatggcacggaagaactgcctggtgaagaacctggaggcggtggagacgctgggctccacgtccaccatctgctcggacaagacgggcaccctcacccagaaccgcatgaccgtcgcccacatgtggttcgacaaccaaatccatgaggctgacaccaccgaagatcagtctggggccacttttgacaaacgatcccctacgtggacggccctgtctcgaattgctggtctctgcaaccgcgccgtcttcaaggcaggacaggagaacatctccgtgtctaagcgggacacagctggtgatgcctctgagtcagctctgctcaagtgcattgagctctcctgtggctcagtgaggaaaatgagagacagaaaccccaaggtggcagagattcctttcaactctaccaacaagtaccagctgtctatccacgagcgagaagacagcccccagagccacgtgctggtgatgaagggggccccagagcgcattctggaccggtgctccaccatcctggtgcagggcaaggagatcccgctcgacaaggagatgcaagatgcctttcaaaatgcctacatggagctggggggacttggggagcgtgtgctgggattctgtcaactgaatctgccatctggaaagtttcctcggggcttcaaattcgacacggatgagctgaactttcccacggagaagctttgctttgtggggctcatgtctatgattgaccctccccgggctgctgtgccagatgctgtgggcaagtgccgaagcgcaggcatcaaggtgatcatggtaaccggggatcaccctatcacagccaaggccattgccaaaggcgtgggcatcatatcagagggtaacgagactgtggaggacattgcagcccggctcaacattcccatgagtcaagtcaaccccagagaagccaaggcatgcgtggtgcacggctctgacctgaaggacatgacatcggagcagctcgatgagatcctcaagaaccacacagagatcgtctttgctcgaacgtctccccagcagaagctcatcattgtggagggatgtcagaggcagggagccattgtggccgtgacgggtgacggggtgaacgactcccctgcattgaagaaggctgacattggcattgccatgggcatctctggctctgacgtctctaagcaggcagccgacatgatcctgctggatgacaactttgcctccatcgtcacgggggtggaggagggccgcctgatctttgacaacttgaagaaatccatcgcctacaccctgaccagcaacatccccgagatcacccccttcctgctgttcatcattgccaacatccccctacctctgggcactgtgaccatcctttgcattgacctgggcacagatatggtccctgccatctccttggcctatgaggcagctgagagtgatatcatgaagcggcagccacgaaactcccagacggacaagctggtgaatgagaggctcatcagcatggcctacggacagatcgggatgatccaggcactgggtggcttcttcacctactttgtgatcctggcagagaacggtttcctgccatcacggctactgggaatccgcctcgactgggatgaccggaccatgaatgatctggaggacagctatggacaggagtggacctatgagcagcggaaggtggtggagttcacgtgccacacggcattctttgccagcatcgtggtggtgcagtgggctgacctcatcatctgcaagacccgccgcaactcagtcttccagcagggcatgaagaacaagatcctgatttttgggctcctggaggagacggcgttggctgcctttctctcttactgcccaggcatgggtgtagccctccgcatgtacccgctcaacctcctcatcttcatctatgatgaggtccgaaagctcatcctgcggcggtatcctggtggctgggtggagaaggagacatactactgaccccattggaagaagaaccaggcatggaaagatggggagctctggaggtgttgtggggatggtgatggagagggatggaaataacgggtggcattgggtggcaacatttggggagagataatgaggcaactcagcaggctaagttgcggggtatataaattggggtgatgaccccatagacctaactgtgaacaatcagattagacactatgtgttagagtcc

SEQ ID NO: 14592 - DNA, 2308 bp, Artificial Sequence
  derived and/or modified sequence
atgctcagctctgctctggccctctctggagctctagtcaaacgtcttaaaccccctaatgggcatttcatcttaacagatactcatgatctcaacacatctaaaattgaacattcattatttacagtgtgcctgaccctgacagccaagcgcatggcacggaagaactgcctggtgaagaacctggaggcggtggagacgctgggctccacgtccaccatctgctcggacaagacgggcaccctcacccagaaccgcatgaccgtcgcccacatgtggttcgacaaccaaatccatgaggctgacaccaccgaagatcagtctggggccacttttgacaaacgatcccctacgtggacggccctgtctcgaattgctggtctctgcaaccgcgccgtcttcaaggcaggacaggagaacatctccgtgtctaagcgggacacagctggtgatgcctctgagtcagctctgctcaagtgcattgagctctcctgtggctcagtgaggaaaatgagagacagaaaccccaaggtggcagagattcctttcaactctaccaacaagtaccagctgtctatccacgagcgagaagacagcccccagagccacgtgctggtgatgaagggggccccagagcgcattctggaccggtgctccaccatcctggtgcagggcaaggagatcccgctcgacaaggagatgcaagatgcctttcaaaatgcctacatggagctggggggacttggggagcgtgtgctgggattctgtcaactgaatctgccatctggaaagtttcctcggggcttcaaattcgacacggatgagctgaactttcccacggagaagctttgctttgtggggctcatgtctatgattgaccctccccgggctgctgtgccagatgctgtgggcaagtgccgaagcgcaggcatcaaggtgatcatggtaaccggggatcaccctatcacagccaaggccattgccaaaggcgtgggcatcatatcagagggtaacgagactgtggaggacattgcagcccggctcaacattcccatgagtcaagtcaaccccagagaagccaaggcatgcgtggtgcacggctctgacctgaaggacatgacatcggagcagctcgatgagatcctcaagaaccacacagagatcgtctttgctcgaacgtctccccagcagaagctcatcattgtggagggatgtcagaggcagggagccattgtggccgtgacgggtgacggggtgaacgactcccctgcattgaagaaggctgacattggcattgccatgggcatctctggctctgacgtctctaagcaggcagccgacatgatcctgctggatgacaactttgcctccatcgtcacgggggtggaggagggccgcctgatctttgacaacttgaagaaatccatcgcctacaccctgaccagcaacatccccgagatcacccccttcctgctgttcatcattgccaacatccccctacctctgggcactgtgaccatcctttgcattgacctgggcacagatatggtccctgccatctccttggcctatgaggcagctgagagtgatatcatgaagcggcagccacgaaactcccagacggacaagctggtgaatgagaggctcatcagcatggcctacggacagatcgggatgatccaggcactgggtggcttcttcacctactttgtgatcctggcagagaacggtttcctgccatcacggctactgggaatccgcctcgactgggatgaccggaccatgaatgatctggaggacagctatggacaggagtggacctatgagcagcggaaggtggtggagttcacgtgccacacggcattctttgccagcatcgtggtggtgcagtgggctgacctcatcatctgcaagacccgccgcaactcagtcttccagcagggcatgaagaacaagatcctgatttttgggctcctggaggagacggcgttggctgcctttctctcttactgcccaggcatgggtgtagccctccgcatgtacccgctcaaagtcacctggtggttctgcgccttcccctacagcctcctcatcttcatctatgatgaggtccgaaagctcatcctgcggcggtatcctggtggctgggtggagaaggagacatactactgaccccattggaagaagaaccaggcatggaaagatggggagctctggaggtgttgtggggatggtgatggagagggatggaaataacgggtggcattgggtggcaacatttggggagagataatgaggcaactcagca

SEQ ID NO: 14593 - DNA, 4413 bp, Artificial Sequence
  derived and/or modified sequence
tccagctgatcacaggggtcgctgtattcctgggggtctccttcttcgtgctctccctcatcctgggctacagctggctggaggcagtcatcttcctcatcggcatcatagtggccaacgtgcctgaggggcttctggccactgtcactgtgtgcctgaccctgacagccaagcgcatggcacggaagaactgcctggtgaagaacctggaggcggtggagacgctgggctccacgtccaccatctgctcggacaagacgggcaccctcacccagaaccgcatgaccgtcgcccacatgtggttcgacaaccaaatccatgaggctgacaccaccgaagatcagtctggggccacttttgacaaacgatcccctacgtggacggccctgtctcgaattgctggtctctgcaaccgcgccgtcttcaaggcaggacaggagaacatctccgtgtctaagcgggacacagctggtgatgcctctgagtcagctctgctcaagtgcattgagctctcctgtggctcagtgaggaaaatgagagacagaaaccccaaggtggcagagattcctttcaactctaccaacaagtaccagctgtctatccacgagcgagaagacagcccccagagccacgtgctggtgatgaagggggccccagagcgcattctggaccggtgctccaccatcctggtgcagggcaaggagatcccgctcgacaaggagatgcaagatgcctttcaaaatgcctacatggagctggggggacttggggagcgtgtgctgggattctgtcaactgaatctgccatctggaaagtttcctcggggcttcaaattcgacacggatgagctgaactttcccacggagaagctttgctttgtggggctcatgtctatgattgaccctccccgggctgctgtgccagatgctgtgggcaagtgccgaagcgcaggcatcaaggtgatcatggtaaccggggatcaccctatcacagccaaggccattgccaaaggcgtgggcatcatatcagagggtaacgagactgtggaggacattgcagcccggctcaacattcccatgagtcaagtcaaccccagagaagccaaggcatgcgtggtgcacggctctgacctgaaggacatgacatcggagcagctcgatgagatcctcaagaaccacacagagatcgtctttgctcgaacgtctccccagcagaagctcatcattgtggagggatgtcagaggcagggagccattgtggccgtgacgggtgacggggtgaacgactcccctgcattgaagaaggctgacattggcattgccatgggcatctctggctctgacgtctctaagcaggcagccgacatgatcctgctggatgacaactttgcctccatcgtcacgggggtggaggagggccgcctgatctttgacaacttgaagaaatccatcgcctacaccctgaccagcaacatccccgagatcacccccttcctgctgttcatcattgccaacatccccctacctctgggcactgtgaccatcctttgcattgacctgggcacagatatggtccctgccatctccttggcctatgaggcagctgagagtgatatcatgaagcggcagccacgaaactcccagacggacaagctggtgaatgagaggctcatcagcatggcctacggacagatcgagaacggtttcctgccatcacggctactgggaatccgcctcgactgggatgaccggaccatgaatgatctggaggacagctatggacaggagtggacctatgagcagcggaaggtggtggagttcacgtgccacacggcattctttgccagcatcgtggtggtgcagtgggctgacctcatcatctgcaagacccgccgcaactcagtcttccagcagggcatgaagaacaagatcctgatttttgggctcctggaggagacggcgttggctgcctttctctcttactgcccaggcatgggtgtagccctccgcatgtacccgctcaaagtcacctggtggttctgcgccttcccctacagcctcctcatcttcatctatgatgaggtccgaaagctcatcctgcggcggtatcctggtggctgggtggagaaggagacatactactgaccccattggaagaagaaccaggcatggaaagatggggagctctggaggtgttgtggggatggtgatggagagggatggaaataacgggtggcattgggtggcaacatttggggagagataatgaggcaactcagcaggctaagttgcggggtatataaattggggtgatgaccccatagacctaactgtgaacaatcagattagacactatgtgttagagtccccccgaccagatccttttccatcccactccactatgttgtctattttttctgaggaattaagggttaccccaccctgcccactcccatcccttcaaccccacttcctactgtaatagatcagcatccaaaagcaggaacccatctaaaccagaaggaagccctctcagatcaccccagcctcactccatttcccacttccacccccgttagcttcctgcaggactctatccctggcttccccttcagaccttgcaatcacaaaaggttcttctggtgagtgcaagagcctgagactggaaaaggtggacttgtctcccagtcgaggctggtaagggaccttcagggagagctgggcagacaggtgggagatggaggtagggctggctggaggaaggaaacaacaaaggaagtgaggtagtgccaatgacaggacatttgacatgagtctccagatagatgtcgtggactccagctctacgtcccacattttagaataccccaccagcagaacaaactcagatctcatcagggtagcagcagaggcaggaccagaaggcaatcaagagcttccagaaatgccacacttgtgtgccacagagttccccgctgacccttggttaggggtcctcttagtccacaaggtccggatgtcactcatgtacttaataacacttcaccttctgtaatactaagtcctcagagctccatgctgttctgaaagggatggccacaagttctttcccagcctcttccattccctttcttttcatgcccatcccgatgaacctgcatcattccccgacactgccaagccaaccctggaaaaggagttcgctggccattggctagaatcagggtggagaagttccctgaaccttcctgtctcccagggacatgtatgcttccagggacaagcttaggtcatgaacatggtcagaacctttggacaagaggaaaaatactaagagatttgctttttctgggtgcggtggctcatgcctgtaatcccagcactttgggaggccgaggcaggtggatcatgaggtcaggagttcgaggcgagcctggccaacatggtgaaaccctgtctctactaaaagtacaaaaaattagccagtcatggtggcacacgcctgtaatctcagctactcaggaggctgaggcaggagaattgcttgaacctgtgaggaagaggttgcagtgagctgagatcgtgccattacactccagcctgggcgaaagggtgagactccatctcaaaaaaaaaaaaaatgatttgcttttgacgtcttaggtggcagggctgttccctccaggcaaatgcccttcaaaccgacgatcattgtgcccacttaccctgggctggagagttggtttcaggttcctacaggagatagctttctttcccttactccctatctaacacttttgctctgcaggcagccttgcccattctctaagcctggcttagaaggcactgggaatgtcctgtagagagagacctagataggtcatgcaagtgagaaagacatctgaggaaaatggaagacctaaggcagacaggaaggaagcacaaaagacaagcattgggtcagacccataaaccacctcccaaaggctgtcatttcattgcactggaattttgctttatcagaagcaaggaagtaagggagtcattgccttgggcctgggaatctaagtgggagacaatattaatttggatccgattaattggagattactaactgtggacaaaagtttatctttgcacaatcaataaaaatggcatttttttagtaaattaagagcataaacaatattgctagaggtggcatgtttagtctaccaaaaacaatacttttcaggcactttagaaatatccttttagaagcagcgagtgcatgggctaattatcatcaatctttatgtatttgttaaagaaacatctacaggatctttattggtgaccttttgtaagacattagtttgaggtactacctatgtacttgaaaataataaagtggcatttctttatgaaaaaaaaa

SEQ ID NO: 14594 - DNA, 945 bp, Artificial Sequence
  derived and/or modified sequence
ctctgtctgccagggtctccgactgtcccagacgggctggtgtgggcttgggatcctcctggtgacctctcccgctaaggtccctcagccactctgccccaagatcatggattccttcaagaacatggtacctcagcaagcccttgtgatccgggagggagagaagatgcagatcaacgcagaggaagtggtggtgggagacctggtggaggtgaagggtggagaccgcgtccctgctgacctccggatcatctcttctcatggctgtaaggtggataactcatccttaacaggagagtcggagccccagacccgctcccccgagttcacccatgagaaccccctggagacccgcaatatctgtttcttctccaccaactgtgttgaaggcactgccaggggcattgtgattgccacaggagaccggacggtgatgggccgcatagctactctcgcctcaggcctggaggttgggcggacacccatagcaatggagattgaacacttcatccagctgatcacaggggtcgctgtattcctgggggtctccttcttcgtgctctccctcatcctgggctacagctggctggaggcagtcatcttcctcatcggcatcatagtggccaacgtgcctgaggggcttctggccactgtcactgtgtgcctgaccctgacagccaagcgcatggcacggaagaactgcctggtgaagaacctggaggcggtggagacgctgggctccacgtccaccatctgctcggacaagacgggcaccctcacccagaaccgcatgaccgtcgcccacatgtggttcgacaaccaaatccatgaggctgacaccaccgaagatcagtctggtgattgggtgctccagagggggtggataggattagaggaggctgagggcagtggcgtggtggggtgagtggttgagataaaggctct

SEQ ID NO: 14595 - DNA, 3063 bp, Artificial Sequence
  derived and/or modified sequence
atgggcagaggcgccggcagagagtacagccccgccgccaccaccgccgagaacggcggcggcaagaagaagcagaaggagaaggagctggacgagctgaagaaggaggtggccatggacgaccacaagctgagcctggacgagctgggcagaaagtaccaggtggacctgagcaagggcctgaccaaccagagagcccaggacgtgctggccagagacggccccaacgccctgacccccccccccaccacccccgagtgggtgaagttctgcagacagctgttcggcggcttcagcatcctgctgtggatcggcgccatcctgtgcttcctggcctacggcatccaggccgccatggaggacgagcccagcaacgacaacctgtacctgggcgtggtgctggccgccgtggtgatcgtgaccggctgcttcagctactaccaggaggccaagagcagcaagatcatggacagcttcaagaacatggtgccccagcaggccctggtgatcagagagggcgagaagatgcagatcaacgccgaggaggtggtggtgggcgacctggtggaggtgaagggcggcgacagagtgcccgccgacctgagaatcatcagcagccacggctgcaaggtggacaacagcagcctgaccggcgagagcgagccccagaccagaagccccgagttcacccacgagaaccccctggagaccagaaacatctgcttcttcagcaccaactgcgtggagggcaccgccagaggcatcgtgatcgccaccggcgacagaaccgtgatgggcagaatcgccaccctggccagcggcctggaggtgggcagaacccccatcgccatggagatcgagcacttcatccagctgatcaccggcgtggccgtgttcctgggcgtgagcttcttcgtgctgagcctgatcctgggctacagctggctggaggccgtgatcttcctgatcggcatcatcgtggccaacgtgcccgagggcctgctggccaccgtgaccgtgtgcctgaccctgaccgccaagagaatggccagaaagaactgcctggtgaagaacctggaggccgtggagaccctgggcagcaccagcaccatctgcagcgacaagaccggcaccctgacccagaacagaatgaccgtggcccacatgtggttcgacaaccagatccacgaggccgacaccaccgaggaccagagcggcgccaccttcgacaagagaagccccacctggaccgccctgagcagaatcgccggcctgtgcaacagagccgtgttcaaggccggccaggagaacatcagcgtgagcaagagagacaccgccggcgacgccagcgagagcgccctgctgaagtgcatcgagctgagctgcggcagcgtgagaaagatgagagacagaaaccccaaggtggccgagatccccttcaacagcaccaacaagtaccagctgagcatccacgagagagaggacagcccccagagccacgtgctggtgatgaagggcgcccccgagagaatcctggacagatgcagcaccatcctggtgcagggcaaggagatccccctggacaaggagatgcaggacgccttccagaacgcctacatggagctgggcggcctgggcgagagagtgctgggcttctgccagctgaacctgcccagcggcaagttccccagaggcttcaagttcgacaccgacgagctgaacttccccaccgagaagctgtgcttcgtgggcctgatgagcatgatcgacccccccagagccgccgtgcccgacgccgtgggcaagtgcagaagcgccggcatcaaggtgatcatggtgaccggcgaccaccccatcaccgccaaggccatcgccaagggcgtgggcatcatcagcgagggcaacgagaccgtggaggacatcgccgccagactgaacatccccatgagccaggtgaaccccagagaggccaaggcctgcgtggtgcacggcagcgacctgaaggacatgaccagcgagcagctggacgagatcctgaagaaccacaccgagatcgtgttcgccagaaccagcccccagcagaagctgatcatcgtggagggctgccagagacagggcgccatcgtggccgtgaccggcgacggcgtgaacgacagccccgccctgaagaaggccgacatcggcatcgccatgggcatcagcggcagcgacgtgagcaagcaggccgccgacatgatcctgctggacgacaacttcgccagcatcgtgaccggcgtggaggagggcagactgatcttcgacaacctgaagaagagcatcgcctacaccctgaccagcaacatccccgagatcacccccttcctgctgttcatcatcgccaacatccccctgcccctgggcaccgtgaccatcctgtgcatcgacctgggcaccgacatggtgcccgccatcagcctggcctacgaggccgccgagagcgacatcatgaagagacagcccagaaacagccagaccgacaagctggtgaacgagagactgatcagcatggcctacggccagatcggcatgatccaggccctgggcggcttcttcacctacttcgtgatcctggccgagaacggcttcctgcccagcagactgctgggcatcagactggactgggacgacagaaccatgaacgacctggaggacagctacggccaggagtggacctacgagcagagaaaggtggtggagttcacctgccacaccgccttcttcgccagcatcgtggtggtgcagtgggccgacctgatcatctgcaagaccagaagaaacagcgtgttccagcagggcatgaagaacaagatcctgatcttcggcctgctggaggagaccgccctggccgccttcctgagctactgccccggcatgggcgtggccctgagaatgtaccccctgaaggtgacctggtggttctgcgccttcccctacagcctgctgatcttcatctacgacgaggtgagaaagctgatcctgagaagataccccggcggctgggtggagaaggagacctactactag

SEQ ID NO: 14596 - DNA, 3030 bp, Artificial Sequence
  derived and/or modified sequence
atgggcagaggcgccggcagagagtacagccccgccgccaccaccgccgagaacggcggcggcaagaagaagcagaaggagaaggagctggacgagctgaagaaggaggtggccatggacgaccacaagctgagcctggacgagctgggcagaaagtaccaggtggacctgagcaagggcctgaccaaccagagagcccaggacgtgctggccagagacggccccaacgccctgacccccccccccaccacccccgagtgggtgaagttctgcagacagctgttcggcggcttcagcatcctgctgtggatcggcgccatcctgtgcttcctggcctacggcatccaggccgccatggaggacgagcccagcaacgacaacctgtacctgggcgtggtgctggccgccgtggtgatcgtgaccggctgcttcagctactaccaggaggccaagagcagcaagatcatggacagcttcaagaacatggtgccccagcaggccctggtgatcagagagggcgagaagatgcagatcaacgccgaggaggtggtggtgggcgacctggtggaggtgaagggcggcgacagagtgcccgccgacctgagaatcatcagcagccacggctgcaaggtggacaacagcagcctgaccggcgagagcgagccccagaccagaagccccgagttcacccacgagaaccccctggagaccagaaacatctgcttcttcagcaccaactgcgtggagggcaccgccagaggcatcgtgatcgccaccggcgacagaaccgtgatgggcagaatcgccaccctggccagcggcctggaggtgggcagaacccccatcgccatggagatcgagcacttcatccagctgatcaccggcgtggccgtgttcctgggcgtgagcttcttcgtgctgagcctgatcctgggctacagctggctggaggccgtgatcttcctgatcggcatcatcgtggccaacgtgcccgagggcctgctggccaccgtgaccgtgtgcctgaccctgaccgccaagagaatggccagaaagaactgcctggtgaagaacctggaggccgtggagaccctgggcagcaccagcaccatctgcagcgacaagaccggcaccctgacccagaacagaatgaccgtggcccacatgtggttcgacaaccagatccacgaggccgacaccaccgaggaccagagcggcgccaccttcgacaagagaagccccacctggaccgccctgagcagaatcgccggcctgtgcaacagagccgtgttcaaggccggccaggagaacatcagcgtgagcaagagagacaccgccggcgacgccagcgagagcgccctgctgaagtgcatcgagctgagctgcggcagcgtgagaaagatgagagacagaaaccccaaggtggccgagatccccttcaacagcaccaacaagtaccagctgagcatccacgagagagaggacagcccccagagccacgtgctggtgatgaagggcgcccccgagagaatcctggacagatgcagcaccatcctggtgcagggcaaggagatccccctggacaaggagatgcaggacgccttccagaacgcctacatggagctgggcggcctgggcgagagagtgctgggcttctgccagctgaacctgcccagcggcaagttccccagaggcttcaagttcgacaccgacgagctgaacttccccaccgagaagctgtgcttcgtgggcctgatgagcatgatcgacccccccagagccgccgtgcccgacgccgtgggcaagtgcagaagcgccggcatcaaggtgatcatggtgaccggcgaccaccccatcaccgccaaggccatcgccaagggcgtgggcatcatcagcgagggcaacgagaccgtggaggacatcgccgccagactgaacatccccatgagccaggtgaaccccagagaggccaaggcctgcgtggtgcacggcagcgacctgaaggacatgaccagcgagcagctggacgagatcctgaagaaccacaccgagatcgtgttcgccagaaccagcccccagcagaagctgatcatcgtggagggctgccagagacagggcgccatcgtggccgtgaccggcgacggcgtgaacgacagccccgccctgaagaaggccgacatcggcatcgccatgggcatcagcggcagcgacgtgagcaagcaggccgccgacatgatcctgctggacgacaacttcgccagcatcgtgaccggcgtggaggagggcagactgatcttcgacaacctgaagaagagcatcgcctacaccctgaccagcaacatccccgagatcacccccttcctgctgttcatcatcgccaacatccccctgcccctgggcaccgtgaccatcctgtgcatcgacctgggcaccgacatggtgcccgccatcagcctggcctacgaggccgccgagagcgacatcatgaagagacagcccagaaacagccagaccgacaagctggtgaacgagagactgatcagcatggcctacggccagatcggcatgatccaggccctgggcggcttcttcacctacttcgtgatcctggccgagaacggcttcctgcccagcagactgctgggcatcagactggactgggacgacagaaccatgaacgacctggaggacagctacggccaggagtggacctacgagcagagaaaggtggtggagttcacctgccacaccgccttcttcgccagcatcgtggtggtgcagtgggccgacctgatcatctgcaagaccagaagaaacagcgtgttccagcagggcatgaagaacaagatcctgatcttcggcctgctggaggagaccgccctggccgccttcctgagctactgccccggcatgggcgtggccctgagaatgtaccccctgaacctgctgatcttcatctacgacgaggtgagaaagctgatcctgagaagataccccggcggctgggtggagaaggagacctactactag

SEQ ID NO: 14597 - DNA, 2172 bp, Artificial Sequence
  derived and/or modified sequence
atgctgagcagcgccctggccctgagcggcgccctggtgaagagactgaagccccccaacggccacttcatcctgaccgacacccacgacctgaacaccagcaagatcgagcacagcctgttcaccgtgtgcctgaccctgaccgccaagagaatggccagaaagaactgcctggtgaagaacctggaggccgtggagaccctgggcagcaccagcaccatctgcagcgacaagaccggcaccctgacccagaacagaatgaccgtggcccacatgtggttcgacaaccagatccacgaggccgacaccaccgaggaccagagcggcgccaccttcgacaagagaagccccacctggaccgccctgagcagaatcgccggcctgtgcaacagagccgtgttcaaggccggccaggagaacatcagcgtgagcaagagagacaccgccggcgacgccagcgagagcgccctgctgaagtgcatcgagctgagctgcggcagcgtgagaaagatgagagacagaaaccccaaggtggccgagatccccttcaacagcaccaacaagtaccagctgagcatccacgagagagaggacagcccccagagccacgtgctggtgatgaagggcgcccccgagagaatcctggacagatgcagcaccatcctggtgcagggcaaggagatccccctggacaaggagatgcaggacgccttccagaacgcctacatggagctgggcggcctgggcgagagagtgctgggcttctgccagctgaacctgcccagcggcaagttccccagaggcttcaagttcgacaccgacgagctgaacttccccaccgagaagctgtgcttcgtgggcctgatgagcatgatcgacccccccagagccgccgtgcccgacgccgtgggcaagtgcagaagcgccggcatcaaggtgatcatggtgaccggcgaccaccccatcaccgccaaggccatcgccaagggcgtgggcatcatcagcgagggcaacgagaccgtggaggacatcgccgccagactgaacatccccatgagccaggtgaaccccagagaggccaaggcctgcgtggtgcacggcagcgacctgaaggacatgaccagcgagcagctggacgagatcctgaagaaccacaccgagatcgtgttcgccagaaccagcccccagcagaagctgatcatcgtggagggctgccagagacagggcgccatcgtggccgtgaccggcgacggcgtgaacgacagccccgccctgaagaaggccgacatcggcatcgccatgggcatcagcggcagcgacgtgagcaagcaggccgccgacatgatcctgctggacgacaacttcgccagcatcgtgaccggcgtggaggagggcagactgatcttcgacaacctgaagaagagcatcgcctacaccctgaccagcaacatccccgagatcacccccttcctgctgttcatcatcgccaacatccccctgcccctgggcaccgtgaccatcctgtgcatcgacctgggcaccgacatggtgcccgccatcagcctggcctacgaggccgccgagagcgacatcatgaagagacagcccagaaacagccagaccgacaagctggtgaacgagagactgatcagcatggcctacggccagatcggcatgatccaggccctgggcggcttcttcacctacttcgtgatcctggccgagaacggcttcctgcccagcagactgctgggcatcagactggactgggacgacagaaccatgaacgacctggaggacagctacggccaggagtggacctacgagcagagaaaggtggtggagttcacctgccacaccgccttcttcgccagcatcgtggtggtgcagtgggccgacctgatcatctgcaagaccagaagaaacagcgtgttccagcagggcatgaagaacaagatcctgatcttcggcctgctggaggagaccgccctggccgccttcctgagctactgccccggcatgggcgtggccctgagaatgtaccccctgaaggtgacctggtggttctgcgccttcccctacagcctgctgatcttcatctacgacgaggtgagaaagctgatcctgagaagataccccggcggctgggtggagaaggagacctactactag

SEQ ID NO: 14598 - DNA, 2145 bp, Artificial Sequence
  derived and/or modified sequence
tgacagctgatcaccggcgtggccgtgttcctgggcgtgagcttcttcgtgctgagcctgatcctgggctacagctggctggaggccgtgatcttcctgatcggcatcatcgtggccaacgtgcccgagggcctgctggccaccgtgaccgtgtgcctgaccctgaccgccaagagaatggccagaaagaactgcctggtgaagaacctggaggccgtggagaccctgggcagcaccagcaccatctgcagcgacaagaccggcaccctgacccagaacagaatgaccgtggcccacatgtggttcgacaaccagatccacgaggccgacaccaccgaggaccagagcggcgccaccttcgacaagagaagccccacctggaccgccctgagcagaatcgccggcctgtgcaacagagccgtgttcaaggccggccaggagaacatcagcgtgagcaagagagacaccgccggcgacgccagcgagagcgccctgctgaagtgcatcgagctgagctgcggcagcgtgagaaagatgagagacagaaaccccaaggtggccgagatccccttcaacagcaccaacaagtaccagctgagcatccacgagagagaggacagcccccagagccacgtgctggtgatgaagggcgcccccgagagaatcctggacagatgcagcaccatcctggtgcagggcaaggagatccccctggacaaggagatgcaggacgccttccagaacgcctacatggagctgggcggcctgggcgagagagtgctgggcttctgccagctgaacctgcccagcggcaagttccccagaggcttcaagttcgacaccgacgagctgaacttccccaccgagaagctgtgcttcgtgggcctgatgagcatgatcgacccccccagagccgccgtgcccgacgccgtgggcaagtgcagaagcgccggcatcaaggtgatcatggtgaccggcgaccaccccatcaccgccaaggccatcgccaagggcgtgggcatcatcagcgagggcaacgagaccgtggaggacatcgccgccagactgaacatccccatgagccaggtgaaccccagagaggccaaggcctgcgtggtgcacggcagcgacctgaaggacatgaccagcgagcagctggacgagatcctgaagaaccacaccgagatcgtgttcgccagaaccagcccccagcagaagctgatcatcgtggagggctgccagagacagggcgccatcgtggccgtgaccggcgacggcgtgaacgacagccccgccctgaagaaggccgacatcggcatcgccatgggcatcagcggcagcgacgtgagcaagcaggccgccgacatgatcctgctggacgacaacttcgccagcatcgtgaccggcgtggaggagggcagactgatcttcgacaacctgaagaagagcatcgcctacaccctgaccagcaacatccccgagatcacccccttcctgctgttcatcatcgccaacatccccctgcccctgggcaccgtgaccatcctgtgcatcgacctgggcaccgacatggtgcccgccatcagcctggcctacgaggccgccgagagcgacatcatgaagagacagcccagaaacagccagaccgacaagctggtgaacgagagactgatcagcatggcctacggccagatcgagaacggcttcctgcccagcagactgctgggcatcagactggactgggacgacagaaccatgaacgacctggaggacagctacggccaggagtggacctacgagcagagaaaggtggtggagttcacctgccacaccgccttcttcgccagcatcgtggtggtgcagtgggccgacctgatcatctgcaagaccagaagaaacagcgtgttccagcagggcatgaagaacaagatcctgatcttcggcctgctggaggagaccgccctggccgccttcctgagctactgccccggcatgggcgtggccctgagaatgtaccccctgaaggtgacctggtggttctgcgccttcccctacagcctgctgatcttcatctacgacgaggtgagaaagctgatcctgagaagataccccggcggctgggtggagaaggagacctactactag

SEQ ID NO: 14599 - DNA, 819 bp, Artificial Sequence
  derived and/or modified sequence
atggacagcttcaagaacatggtgccccagcaggccctggtgatcagagagggcgagaagatgcagatcaacgccgaggaggtggtggtgggcgacctggtggaggtgaagggcggcgacagagtgcccgccgacctgagaatcatcagcagccacggctgcaaggtggacaacagcagcctgaccggcgagagcgagccccagaccagaagccccgagttcacccacgagaaccccctggagaccagaaacatctgcttcttcagcaccaactgcgtggagggcaccgccagaggcatcgtgatcgccaccggcgacagaaccgtgatgggcagaatcgccaccctggccagcggcctggaggtgggcagaacccccatcgccatggagatcgagcacttcatccagctgatcaccggcgtggccgtgttcctgggcgtgagcttcttcgtgctgagcctgatcctgggctacagctggctggaggccgtgatcttcctgatcggcatcatcgtggccaacgtgcccgagggcctgctggccaccgtgaccgtgtgcctgaccctgaccgccaagagaatggccagaaagaactgcctggtgaagaacctggaggccgtggagaccctgggcagcaccagcaccatctgcagcgacaagaccggcaccctgacccagaacagaatgaccgtggcccacatgtggttcgacaaccagatccacgaggccgacaccaccgaggaccagagcggcgactgggtgctgcagagaggctggatcggcctggaggaggccgagggcagcggcgtggtgggctag

SEQ ID NO: 14600 - protein, 1035 aa, Artificial Sequence
  derived and/or modified sequence
MGKAENYELYSVELGPGPGGDMAAKMSKKKKAGGGGGKRKEKLENMKKEMEINDHQLSVAELEQKYQTSATKGLSASLAAELLLRDGPNALRPPRGTPEYVKFARQLAGGLQCLMWVAAAICLIAFAIQASEGDLTTDDNLYLAIALIAVVVVTGCFGYYQEFKSTNIIASFKNLVPQQATVIRDGDKFQINADQLVVGDLVEMKGGDRVPADIRILAAQGCKVDNSSLTGESEPQTRSPECTHESPLETRNIAFFSTMCLEGTVQGLVVNTGDRTIIGRIASLASGVENEKTPIAIEIEHFVDIIAGLAILFGATFFIVAMCIGYTFLRAMVFFMAIVVAYVPEGLLATVTVCLSLTAKRLASKNCVVKNLEAVETLGSTSVICSDKTGTLTQNRMTVSHLWFDNHIHTADTTEDQSGQTFDQSSETWRALCRVLTLCNRAAFKSGQDAVPVPKRIVIGDASETALLKFSELTLGNAMGYRDRFPKVCEIPFNSTNKFQLSIHTLEDPRDPRHLLVMKGAPERVLERCSSILIKGQELPLDEQWREAFQTAYLSLGGLGERVLGFCQLYLNEKDYPPGYAFDVEAMNFPSSGLCFAGLVSMIDPPRATVPDAVLKCRTAGIRVIMVTGDHPITAKAIAASVGIISEGSETVEDIAARLRVPVDQVNRKDARACVINGMQLKDMDPSELVEALRTHPEMVFARTSPQQKLVIVESCQRLGAIVAVTGDGVNDSPALKKADIGVAMGIAGSDAAKNAADMILLDDNFASIVTGVEQGRLIFDNLKKSIAYTLTKNIPELTPYLIYITVSVPLPLGCITILFIELCTDIFPSVSLAYEKAESDIMHLRPRNPKRDRLVNEPLAAYSYFQIGAIQSFAGFTDYFTAMAQEGWFPLLCVGLRAQWEDHHLQDLQDSYGQEWTFGQRLYQQYTCYTVFFISIEVCQIADVLIRKTRRLSAFQQGFFRNKILVIAIVFQVCIGCFLCYCPGMPNIFNFMPIRFQWWLVPLPYGILIFVYDEIRKLGVRCCPGSWWDQELYY

SEQ ID NO: 14601 - DNA, 3108 bp, Artificial Sequence
  derived and/or modified sequence
atggggaaggccgagaactacgagctgtactctgtggagcttggaccagggcctgggggagacatggccgccaagatgtccaaaaagaaaaaagcaggcggaggcggaggcaaacggaaagagaaactcgaaaatatgaaaaaagaaatggaaattaacgaccatcagcttagtgtagcagaacttgagcagaaataccaaacgtctgctactaaaggcctgagtgcgagtcttgcagctgagctgctcctcagagatggccctaatgcacttcgtcctccgaggggaacacccgagtacgtgaaattcgcccggcaactggccggcgggctccaatgcctgatgtgggtggccgcagcaatatgtctcatagcattcgccatccaggcatctgaaggggacttaaccactgatgataatctgtacctggcgatcgccctgattgctgtagttgtggtaaccggctgcttcggctattaccaggagttcaagagcactaacataattgcttcttttaagaatctggtgccgcaacaagctactgtgattcgcgatggagataagttccagatcaacgccgatcaattggtggtcggcgatctggttgaaatgaagggaggggaccgtgttcctgcagacatccgtatactggccgcccaaggatgtaaggtagataactcaagcttaaccggcgaaagcgagccacagacgcggagtcccgagtgtactcacgaatccccgctggaaactcgcaatatagcctttttttctaccatgtgtctcgaaggtaccgtgcaaggattagtggtgaacacgggcgaccggactataatcggaaggatcgcttccctggcgagcggtgttgagaacgagaagaccccgattgcaatcgagatcgagcattttgtcgacattattgcaggtctggccatattatttggtgctaccttcttcatcgtcgccatgtgcattggatacacattcttgagagcaatggtattttttatggccatagtcgtggcctatgtcccagagggcctcctggcaactgtgacagtttgcctgagtctgaccgccaagcgtctggcgtctaagaattgtgtggttaagaatctagaagcagtagagacgcttgggagtacatcagtgatttgtagtgataaaaccggtacgctgacgcagaacagaatgaccgtgtctcatctgtggttcgacaaccatatccatacagccgataccaccgaggaccagagtggacaaacattcgatcagtcttctgaaacctggagggcactgtgccgcgtgctgacactgtgcaacagggctgccttcaagagtgggcaagacgccgttcctgttcctaagcggatcgtcatcggagatgcctctgagacagctctgctcaaattcagtgagttaacactggggaatgccatgggctacagagataggttccctaaagtctgcgagattccatttaacagtaccaacaagtttcagttgagcattcacactttggaagaccctcgtgacccccgccacttattagtgatgaagggagccccggagagggtgctggagcgatgcagctcgatactcattaaaggacaggagctacctctggacgaacagtggcgtgaagcttttcagactgcttatttgagcctaggcggcctgggagagagagttctggggttttgtcaactgtacctcaacgaaaaggactatcctccaggctacgcctttgacgtggaggccatgaacttccctagttctggcctctgtttcgccggactggtgtccatgatcgatcccccgcgggctaccgtccctgatgccgtgctgaagtgtagaacagctggcatccgcgtgattatggtaacaggcgatcaccccattactgctaaagctatcgcagcctccgtgggtatcatctcagagggatccgagaccgtagaggatattgccgcgcggttacgcgttcccgtcgatcaggtaaaccggaaagatgcacgcgcgtgcgttattaacggcatgcagctgaaggacatggacccatcggagctggtggaagcgctgcggactcatcccgaaatggtctttgcccggacgtcaccgcagcagaaactagtaattgtcgagtcttgccagcgcctaggcgctattgtagctgtaaccggggatggtgtcaacgactctcccgccctcaagaaggccgatattggagtggccatgggcatcgctgggtcagacgcagccaagaatgctgctgatatgatattactggacgataatttcgcaagcatcgtaaccggagtggaacagggccgtttaatttttgataacctgaagaaaagcatagcatatacattaacaaagaatatcccggagctgacaccttacttgatctacataactgtgtccgtgccactccccctcggatgtatcacaatattattcattgaactctgtaccgacatttttccctccgtatctctggcctacgagaaggcagaaagcgacattatgcacctgagacccagaaatccaaagagggaccgtttggttaatgagccattagcagcctattcttacttccaaattggagctatccagagtttcgcaggctttactgattatttcactgcaatggcccaggagggctggtttcctctgctctgtgtaggcctgcgtgctcagtgggaagatcatcacctccaagacctccaggactcctatgggcaagaatggacctttggacaacgcctataccagcagtacacctgctacaccgtctttttcatttcgatcgaggtctgccagattgccgacgttctgattagaaagaccagacgtttgtctgcattccagcaggggttctttcggaacaaaatcctcgttattgcaattgtcttccaggtttgcattgggtgcttcctctgttattgtcccggaatgcctaatatcttcaatttcatgcccattcgcttccagtggtggttagtgcccctgccatatggaatactaatttttgtgtatgatgaaattcggaaactgggggtgaggtgctgccctggttcctggtgggaccaggaactgtattattag

SEQ ID NO: 14602 - DNA, 3108 bp, Artificial Sequence
  derived and/or modified sequence
atgggcaaggcagaaaattatgagctgtacagcgtggagctgggccctggccctggaggagacatggccgccaagatgagcaagaagaagaaggccggcggcggcggcggcaagaggaaggagaagctggagaacatgaagaaggagatggagatcaatgaccaccagctgtctgtggccgagctggagcagaagtaccagaccagcgccaccaagggcctgagcgccagcctggccgctgagctgctgctgagagatggccccaatgccctgcggcccccccggggcaccccagaatatgtgaagtttgcccggcagctggccggcggcctgcagtgcctgatgtgggtggccgccgccatctgcctgattgcctttgccatccaggccagcgagggggacctgaccacagatgacaacctgtacctggccatcgccctgattgctgtggtggtggtgacaggctgcttcggctactaccaggagttcaagagcaccaacatcatcgccagcttcaagaacctggtgccccagcaggccaccgtcatcagagatggagacaagttccagatcaatgctgaccagctggtggtgggggacctggtggagatgaagggcggggacagagtgcctgctgacatccgcatcctggccgcccagggctgcaaggtggacaacagcagcctgaccggggagagcgagccccagaccaggagcccagaatgtacccatgagagccccctggagaccagaaatattgccttcttcagcaccatgtgcctggagggcaccgtgcagggcctggtggtgaacacaggagacaggaccatcatcggcagaattgccagcctggccagcggcgtggagaatgagaagacccccatcgccattgaaattgagcactttgtggacatcatcgccggcctggccatcctgtttggagccaccttcttcatcgtggccatgtgcatcggctacaccttcctgcgggccatggtgttcttcatggccatcgtggtggcctacgtgcctgagggcctgctggccaccgtgacagtgtgcctgagcctgacagccaagaggctggccagcaagaactgtgtggtgaagaacctggaggccgtggagaccctgggcagcaccagcgtcatctgcagcgacaagacaggcaccctgacccagaacaggatgacagtgagccacctgtggtttgacaaccacatccacacagctgacaccacagaggaccagagcggccagacctttgaccagagcagcgagacctggagggccctgtgccgggtgctgaccctgtgcaacagagctgccttcaagagcggccaggatgctgtgcctgtgcccaagagaattgtgattggagatgccagcgagacagccctgctgaagttcagcgagctgaccctgggcaatgccatgggctacagagaccgcttccccaaggtgtgtgagatccccttcaacagcaccaacaagttccagctgagcatccacaccctggaggacccccgggaccccaggcacctgctggtgatgaagggggcccctgagcgggtgctggagcgctgcagcagcatcctgatcaagggccaggagctgcccctggatgagcagtggagggaggccttccagacagcctacctgagcctgggcggcctgggggagcgggtgctgggcttctgccagctgtacctgaatgagaaggactacccacctggctacgcctttgatgtggaggccatgaacttccccagcagcggcctgtgctttgctggcctggtgtccatgattgatcctccccgggccaccgtgcctgatgctgtgctgaagtgcaggacagctggcatccgggtcatcatggtgactggagaccaccccatcacagccaaggccatcgccgcctctgtgggcatcatcagcgagggcagcgagaccgtggaggacattgctgcccggctgcgggtgcctgtggaccaggtgaacaggaaggatgcccgggcctgcgtcatcaatggcatgcagctgaaggacatggaccccagcgagctggtggaggccctgcggacccaccctgagatggtgtttgcccggaccagcccccagcagaagctggtgattgtggagagctgccagaggctgggcgccatcgtggccgtgactggagatggagtgaatgacagccctgccctgaagaaggctgacattggagtggccatgggcattgctggcagtgatgctgccaagaatgctgctgacatgatcctgctggatgacaactttgccagcatcgtgactggagtggagcagggccgcctcatctttgacaacctgaagaagagcatcgcctacaccctgaccaagaacatccctgagctgaccccctacctgatctacatcaccgtgtctgtgcccctgcccctgggctgcatcaccatcctcttcatcgagctgtgcacagacatcttccccagcgtgtccctggcctatgagaaggccgagagtgacatcatgcacctgcggcccaggaaccccaagagggaccggctggtgaatgagcccctggccgcctacagctacttccagatcggggccatccagagctttgctggcttcacagactacttcaccgccatggcccaggagggctggttccccctgctgtgtgtgggcctgcgggcccagtgggaggaccaccacctgcaggacctgcaggacagctatggccaggagtggaccttcggccagaggctgtaccagcagtacacctgctacacagtgttcttcatcagcattgaggtgtgccagattgctgatgtgctgatcaggaagacccggcggctgagcgccttccagcagggcttcttcaggaacaagatcctggtgattgccatcgtgttccaggtgtgcatcggctgcttcctgtgctactgccccggcatgcccaacatcttcaacttcatgcccatccgcttccagtggtggctggtgcccctgccctacggcatcctgatctttgtgtatgatgagatcaggaagctgggcgtgcgctgctgccccggctcctggtgggaccaggagctgtactactag

SEQ ID NO: 14603 - DNA, 3108 bp, Artificial Sequence
  derived and/or modified sequence
atgggcaaggccgagaactacgagctgtacagcgtggagctgggccctggcccagggggagatatggccgctaagatgtcaaagaaaaagaaagctggcggtggggggggcaagaggaaagaaaagctggaaaatatgaaaaaggagatggagattaatgaccatcagctcagcgttgcagagctcgaacagaagtaccagacatcagctaccaaaggacttagcgcctccctggccgccgaactcttactgagagatggaccaaatgccctgcggccccctcgtgggacaccagaatacgtgaagttcgcccgacagcttgccggtggtcttcaatgtctgatgtgggtggctgccgccatctgccttatcgcattcgctatccaggctagtgaaggagatctgaccaccgacgataatctctatctggcgattgccttgatagctgtcgttgtggtgacaggatgttttggttactatcaggaatttaagagcacgaatatcatcgcctcctttaaaaatctagtacctcaacaggcaacagtcatacgagacggagataaatttcagatcaatgccgaccagctcgttgtaggggacctagtagaaatgaaaggcggtgaccgggtaccggcagatattagaatcttggccgcgcagggatgcaaagtcgataattcaagtctaacaggcgaatccgagccacagactcgatctcctgagtgtacccacgagagccccctcgaaacacgtaacatcgcctttttctctacaatgtgcctggaaggcacagttcagggactagtagtgaacacgggggaccggactataataggacggatcgcatctcttgcctctggggtagagaacgagaagactcccatagccatcgaaatcgaacattttgtggatatcattgcaggtttggctatactgtttggcgctacattctttatcgtcgcaatgtgcatagggtatacgttcctccgggctatggtgtttttcatggcaattgttgtagcttacgtcccggagggactccttgctacagtgacggtatgtctctccctcactgccaagagattggcatctaagaattgcgtcgtgaagaatctagaagctgtggagactctgggaagtacctctgtaatatgttcagataaaacaggcactctgacccaaaacagaatgactgtatcccacctgtggtttgacaatcatatacacacagctgacactaccgaggatcagagcgggcagactttcgaccagagtagcgaaacctggcgggctctgtgtcgcgtgctgactttgtgtaatagggccgccttcaagagtgggcaggacgccgtgccagttcccaaaaggatagtaattggcgatgcctctgaaacagccttgcttaagttcagcgaactgacactgggcaacgcaatgggatacagagatcggtttccgaaggtctgtgagattcccttcaacagtactaacaagtttcagctctcaatccataccctggaagatccacgggatcctcgacacctcctggtgatgaaaggagcacccgaacgggtcctggaacgctgcagcagcattctgatcaagggacaagaactgcctctggatgaacagtggagagaggcgtttcaaaccgcctacttgagcctgggggggcttggcgagagagtattgggtttttgtcaactttacttgaacgagaaagattacccgcccggctacgcctttgatgttgaagctatgaacttcccctcctctggcctttgtttcgcgggactggtttctatgattgatcctccccgggctactgtccccgatgccgtgttgaaatgccggacagccggaattcgggtaattatggtgacaggcgaccacccaatcaccgccaaggctatcgctgcctctgtgggcattatctccgaagggtccgaaaccgtggaggacattgccgcccggttacgcgtgcccgttgaccaggtgaacaggaaagacgcccgggcatgtgttatcaatgggatgcagttgaaggacatggacccttctgagctggttgaggctcttcggacccaccctgaaatggtcttcgcacgcacctcccctcagcaaaaactggttatcgtcgaatcctgccaaagactcggcgctatcgtggctgtgactggggacggggtgaacgatagtccagcccttaagaaagccgacattggggtcgccatgggcatcgcgggcagcgacgctgctaaaaatgcagcagatatgattctcctcgatgacaacttcgcctccattgtcactggggtcgagcagggcaggctgatctttgacaacctgaagaaatctatcgcctacacgttaaccaagaacatcccagagctgaccccgtacctgatttacataactgtttcggtccctctacccctgggctgtataaccatcttattcatagagttatgcaccgacatcttcccgtctgtctcactggcttacgaaaaagcagaaagcgatatcatgcatctcaggccccggaacccaaaaagagacaggctggttaacgagccgctagctgcctactcctattttcagataggcgcaatccagagcttcgccgggttcaccgactactttaccgctatggctcaagaaggatggttccccctgctgtgcgttggacttagagcacagtgggaagaccatcacttgcaggacctccaggattcttatggacaagaatggacattcggccagaggctctaccaacagtatacatgctacacagtcttctttatctcaattgaagtttgtcagatcgccgatgtactcattagaaaaactagaaggctgtccgccttccagcaaggatttttccgtaacaagatcctggtgatcgctatcgtgtttcaggtatgcattggttgctttttgtgctactgccccggaatgcccaatatctttaacttcatgccgatcagattccaatggtggctggttccactgccctacggtatcttgatcttcgtgtatgacgaaattcggaaattgggagtccggtgctgtcccggatcttggtgggatcaggaactgtattactag

SEQ ID NO: 14604 - DNA, 3108 bp, Artificial Sequence
  derived and/or modified sequence
atggggaaagcagagaattacgaactgtatagtgttgaactgggccctgggccaggtggggacatggccgcaaaaatgagcaagaaaaagaaagccggagggggaggagggaagagaaaggagaagctggaaaacatgaagaaagagatggagataaacgatcatcagttgagtgtggcagaactggaacagaaataccagactagcgcgaccaagggcctgtcagcatctttggcagctgaactgttactgcgcgacggccctaacgcactgaggcctccaagaggcacccccgaatatgttaagttcgcgaggcagttagctggaggcctacagtgtctgatgtgggtggctgcagcaatatgcttaattgctttcgcaattcaggcgagtgagggtgatctgaccactgatgacaatttgtacctggcgatcgccctgatcgcagtggtcgtcgtgaccggctgtttcggctactaccaggagtttaagtctacaaacatcatagcttcattcaagaatctcgttccccagcaagctacggtgatccgagatggagataagttccagatcaatgcggatcaactggtagtaggagacttggtggaaatgaaaggaggcgaccgcgtgcccgcagacattagaatactcgccgctcagggttgtaaggttgacaacagctccctgacgggggagtctgagccccagactcggtctcccgaatgcactcacgagtctccgctggagactcgtaatatcgccttcttctcgacaatgtgcctcgaaggtacggtgcagggcctggtggtgaacacgggggacaggaccatcatcggccgtatagcgagcctggcttcgggcgtggagaatgagaagaccccaatcgccatcgagatcgaacactttgtagatatcatcgccggtctcgctattctttttggggcaacatttttcattgtagcaatgtgcattggctatacattcctgcgggctatggtcttcttcatggcaatagttgttgcgtatgtgccggaggggctcctggctacagtgactgtatgcctgtccctaaccgccaagaggttagcgtccaagaactgcgtggttaagaacttagaggcggtggagactctgggatcaacaagcgtgatttgttctgataagaccggaacactaacccagaaccgcatgactgtttctcatctgtggttcgacaatcacatccacactgcagacactaccgaggatcagagtggtcagaccttcgaccagagctccgaaacttggcgtgcactttgccgagttctaacgttgtgcaaccgggcagcctttaagagtggacaggacgcagtgcctgtgcctaaaaggatagtgattggagacgcctccgagacggccttgctgaagttctcagagctgactctgggcaatgcaatgggctacagagacagattccccaaagtgtgtgagatcccattcaacagtacaaacaagttccagctgtccattcacacactggaagatccacgggacccacgccatctgctggtgatgaaaggtgcaccagagcgcgtgctggaaagatgttccagcatcctgatcaaagggcaggagctcccgctagatgagcagtggagagaggcatttcagaccgcatatttgtccctaggaggactgggggaaagagtgttggggttctgccagctgtacctgaatgagaaagattatccccctgggtatgcctttgacgtggaagccatgaatttccccagctcaggcttatgctttgctggccttgtctccatgatagaccctccacgggcaacagtccccgacgcagtgctgaaatgtcgcacagcgggtatccgcgtgatcatggtgactggagatcatccgatcaccgcgaaagcaattgctgcgtccgtcggaatcatcagtgaggggtcggagactgtcgaggacattgctgcccgtctccgggtgccagtggatcaggttaatcgaaaggacgccagagcgtgtgtcattaatggtatgcagttgaaggatatggacccctccgaactggttgaggcccttaggacccaccctgagatggtgtttgctaggacaagcccccagcagaagctagtaatcgtggagtcctgccaacgtctgggggcaattgtcgctgtgactggggatggggttaacgactcccccgcattaaagaaagccgacatcggtgtagccatgggcattgcgggatctgatgctgccaaaaatgccgctgatatgatcctgttggatgacaattttgcgtcaattgtaacgggtgtggagcagggacggctcatattcgacaaccttaagaagagcatcgcctacaccctaactaagaacattcctgaactaaccccgtatctgatttacatcactgtttcggtgcccctccctctaggttgcattaccatcctcttcatcgagctgtgcacagatattttcccgtcggtgtctctggcctacgaaaaagctgagtctgatatcatgcacttaaggccccgtaatcccaaaagagaccggttggtcaacgagccgttggccgcttattcttatttccagatcggtgctatccagagttttgcgggattcaccgattatttcaccgcgatggcacaggaaggatggttccctctgctgtgcgtggggctgagagcccaatgggaggaccaccacctgcaggatcttcaggacagttacggccaggagtggacatttggccaaagattatatcaacagtatacatgctacaccgttttctttatctccattgaagtgtgccagattgccgatgtactcatccgaaagaccaggaggctaagcgcctttcagcaggggttcttcaggaacaagatcctggtgattgccatcgtgtttcaggtttgtatcggctgtttcctgtgttattgcccaggcatgcccaatatattcaatttcatgccaatccggttccagtggtggttggtccctctcccgtatggaattcttattttcgtctacgacgagatacggaaactaggcgtcagatgttgtcccggaagctggtgggatcaagagctttattactag

SEQ ID NO: 14605 - DNA, 3558 bp, Artificial Sequence
  derived and/or modified sequence
gttgggtgggagcacaggcaccgggcaccatggggaaggccgagaactatgagctctactcggtggagctgggtcctggccctggcggggacatggctgccaagatgagcaagaagaagaaggcgggtggcgggggtggcaagaggaaggagaagctggagaacatgaagaaggagatggagattaacgaccaccagctgtcagtggcggagctggaacagaaataccagaccagtgccaccaagggcctctctgcgagcctggctgctgagctgctgctgcgggatgggcccaacgcactgcggccaccacggggcaccccagagtacgtcaagttcgcgaggcagctggccgggggcctgcagtgcctcatgtgggttgccgccgccatctgcctcatcgcctttgccatccaggctagtgagggggacctcaccaccgacgacaatctgtacctggcaatcgctctcattgctgtggttgtcgtcaccggctgctttggctactaccaggaattcaagagcaccaacatcatcgccagctttaagaaccttgtgccacagcaagccactgtcatccgcgatggagacaaattccagatcaacgctgaccaactggtggtgggcgacctggtggagatgaaaggtggggacagagtgcccgccgacatccgcatcctggcggcccagggctgcaaggtggacaactcctcgctgacaggggagtctgagccacagacccgctcacccgagtgcacgcacgagagccctctggagacccgcaacatcgccttcttctccaccatgtgccttgagggcaccgtgcagggcctggtggtgaacacgggcgaccgcaccatcattgggcgcatcgcatcgctggcgtcgggggtggaaaacgagaagacacccatcgctatcgagatcgagcattttgtggacatcatcgcgggcctggccattctcttcggtgccacattttttattgtggccatgtgcattggctacaccttcctgcgggccatggtcttcttcatggccatcgtggtggcctatgtgcctgaggggctgctggccactgtcacagtctgcctgtccctgacagccaagcgcctggccagtaagaactgcgtggtcaagaacctggaggcggtggagacattgggctccacttcggtgatctgctcggacaagacagggactctcactcagaaccgcatgactgtgtcccatctgtggtttgacaaccacatccacacagctgacaccacggaagaccagtcagggcagacgtttgaccagtcctcggagacgtggcgggcgctgtgccgggtgctcaccctgtgcaaccgcgccgccttcaagtccggccaggatgcagtgcctgtgcccaagcgcatcgtgattggagacgcatcggagacggcgctgctcaagttctcggagctgacgctgggcaacgccatgggctaccgggaccgcttcccaaaagtctgcgagatacccttcaactccaccaacaagttccagctgtccatccatacgctggaggacccgcgggacccgcgacacttgctggtgatgaagggcgcccccgagcgcgtgctggagcgctgcagctccatccttatcaagggccaggagctgccgctggacgagcagtggcgcgaggccttccagaccgcctacctcagcctgggaggcctgggcgaacgcgtgctcggcttctgccagctctacctgaatgagaaggactacccgcctggctatgccttcgacgtagaggccatgaactttccatctagcggcctctgctttgcgggacttgtatccatgattgacccaccccgggccaccgtccctgatgctgtgctcaagtgtcgcaccgcaggcatccgggtgatcatggtaacgggtgaccaccccatcaccgccaaggccattgcagccagtgtgggcatcatctcggaaggcagcgagacagtggaggacatcgctgcccgcctccgtgtgcccgtagaccaggttaatcgcaaggatgcccgtgcctgtgtgatcaatggcatgcagctgaaggacatggacccatcggaactggtcgaggccctgcgcacccaccccgagatggtgtttgcgcgcaccagcccccagcagaagctggtgatcgtggagagctgccagcggctgggtgcgattgtggccgtcacgggggatggtgtgaatgactccccagctctgaagaaggcagacatcggagtagccatgggcatcgctggctcagatgctgccaaaaatgcagctgacatgatcctgctggatgacaactttgcctccattgtgacaggcgtggagcagggtcgactgatcttcgacaacctgaagaagtctattgcctacacattgaccaagaacatcccagagctgacaccctacctcatctacatcaccgtcagcgtgcccctgcccctcgggtgcatcaccatcctcttcatcgaactctgcactgacattttcccatctgtgtccctggcatatgaaaaggccgagagtgacatcatgcacctgcgtccacgcaacccaaagcgtgacagattggtcaacgagcccctggctgcctactcctacttccagattggtgccattcagtcctttgctggcttcactgactacttcacggcaatggcccaggagggctggttcccactgctgtgcgtggggctgcgggcgcagtgggaggaccaccacctacaagatctgcaggacagctacggccaggagtggacattcgggcagcgcctgtaccagcagtacacctgctacaccgtgttcttcatcagcattgaggtgtgccagatcgccgatgtcctcatccgcaagacgcgccgtctctctgccttccagcaaggcttcttcaggaataagatcctggtgatcgccatcgtgttccaggtctgcatcggctgcttcctgtgctactgccccggcatgcccaacatcttcaacttcatgcccattcggttccagtggtggctggtccccctgccctacggcatcctcatcttcgtctatgatgagatccggaagcttggagttcgctgttgcccagggagctggtgggaccaggaactctactattagagggacgactgccttcaagcatccctgcaactgccacagcaggtgggggcagggctcgtgggaccctctggacagccaccaagatatctgagcaaccaagagtcccagccccaccagtatctgcttctgtagcccacggcaccccaaacttggagggacctgcccactcccctcccccattcccaaggttcgcacctcctggagcagcagcgcctgggcagtcctctgggctggcctcgggaaagccgccacctgtggtggcggtggggctctgacagggagtacagctgaccgcttctggagggtgtttctgttcttaggactccagtccaggctggacggctgcctgagggcccttcgttaaagacacgcttgtgtcctgggcgatggtaataaaaccagctcatgctgactgtgctgt

SEQ ID NO: 14606 - DNA, 3108 bp, Artificial Sequence
  derived and/or modified sequence
atgggcaaggccgagaactacgagctgtacagcgtggagctgggccccggccccggcggcgacatggccgccaagatgagcaagaagaagaaggccggcggcggcggcggcaagagaaaggagaagctggagaacatgaagaaggagatggagatcaacgaccaccagctgagcgtggccgagctggagcagaagtaccagaccagcgccaccaagggcctgagcgccagcctggccgccgagctgctgctgagagacggccccaacgccctgagaccccccagaggcacccccgagtacgtgaagttcgccagacagctggccggcggcctgcagtgcctgatgtgggtggccgccgccatctgcctgatcgccttcgccatccaggccagcgagggcgacctgaccaccgacgacaacctgtacctggccatcgccctgatcgccgtggtggtggtgaccggctgcttcggctactaccaggagttcaagagcaccaacatcatcgccagcttcaagaacctggtgccccagcaggccaccgtgatcagagacggcgacaagttccagatcaacgccgaccagctggtggtgggcgacctggtggagatgaagggcggcgacagagtgcccgccgacatcagaatcctggccgcccagggctgcaaggtggacaacagcagcctgaccggcgagagcgagccccagaccagaagccccgagtgcacccacgagagccccctggagaccagaaacatcgccttcttcagcaccatgtgcctggagggcaccgtgcagggcctggtggtgaacaccggcgacagaaccatcatcggcagaatcgccagcctggccagcggcgtggagaacgagaagacccccatcgccatcgagatcgagcacttcgtggacatcatcgccggcctggccatcctgttcggcgccaccttcttcatcgtggccatgtgcatcggctacaccttcctgagagccatggtgttcttcatggccatcgtggtggcctacgtgcccgagggcctgctggccaccgtgaccgtgtgcctgagcctgaccgccaagagactggccagcaagaactgcgtggtgaagaacctggaggccgtggagaccctgggcagcaccagcgtgatctgcagcgacaagaccggcaccctgacccagaacagaatgaccgtgagccacctgtggttcgacaaccacatccacaccgccgacaccaccgaggaccagagcggccagaccttcgaccagagcagcgagacctggagagccctgtgcagagtgctgaccctgtgcaacagagccgccttcaagagcggccaggacgccgtgcccgtgcccaagagaatcgtgatcggcgacgccagcgagaccgccctgctgaagttcagcgagctgaccctgggcaacgccatgggctacagagacagattccccaaggtgtgcgagatccccttcaacagcaccaacaagttccagctgagcatccacaccctggaggaccccagagaccccagacacctgctggtgatgaagggcgcccccgagagagtgctggagagatgcagcagcatcctgatcaagggccaggagctgcccctggacgagcagtggagagaggccttccagaccgcctacctgagcctgggcggcctgggcgagagagtgctgggcttctgccagctgtacctgaacgagaaggactacccccccggctacgccttcgacgtggaggccatgaacttccccagcagcggcctgtgcttcgccggcctggtgagcatgatcgacccccccagagccaccgtgcccgacgccgtgctgaagtgcagaaccgccggcatcagagtgatcatggtgaccggcgaccaccccatcaccgccaaggccatcgccgccagcgtgggcatcatcagcgagggcagcgagaccgtggaggacatcgccgccagactgagagtgcccgtggaccaggtgaacagaaaggacgccagagcctgcgtgatcaacggcatgcagctgaaggacatggaccccagcgagctggtggaggccctgagaacccaccccgagatggtgttcgccagaaccagcccccagcagaagctggtgatcgtggagagctgccagagactgggcgccatcgtggccgtgaccggcgacggcgtgaacgacagccccgccctgaagaaggccgacatcggcgtggccatgggcatcgccggcagcgacgccgccaagaacgccgccgacatgatcctgctggacgacaacttcgccagcatcgtgaccggcgtggagcagggcagactgatcttcgacaacctgaagaagagcatcgcctacaccctgaccaagaacatccccgagctgaccccctacctgatctacatcaccgtgagcgtgcccctgcccctgggctgcatcaccatcctgttcatcgagctgtgcaccgacatcttccccagcgtgagcctggcctacgagaaggccgagagcgacatcatgcacctgagacccagaaaccccaagagagacagactggtgaacgagcccctggccgcctacagctacttccagatcggcgccatccagagcttcgccggcttcaccgactacttcaccgccatggcccaggagggctggttccccctgctgtgcgtgggcctgagagcccagtgggaggaccaccacctgcaggacctgcaggacagctacggccaggagtggaccttcggccagagactgtaccagcagtacacctgctacaccgtgttcttcatcagcatcgaggtgtgccagatcgccgacgtgctgatcagaaagaccagaagactgagcgccttccagcagggcttcttcagaaacaagatcctggtgatcgccatcgtgttccaggtgtgcatcggctgcttcctgtgctactgccccggcatgcccaacatcttcaacttcatgcccatcagattccagtggtggctggtgcccctgccctacggcatcctgatcttcgtgtacgacgagatcagaaagctgggcgtgagatgctgccccggcagctggtgggaccaggagctgtactactag

SEQ ID NO: 14607 - protein, 291 aa, Artificial Sequence
  derived and/or modified sequence
MAALQEKKTCGQRMEEFQRYCWNPDTGQMLGRTLSRWVWISLYYVAFYVVMTGLFALCLYVLMQTVDPYTPDYQDQLRSPGVTLRPDVYGEKGLEIVYNVSDNRTWADLTQTLHAFLAGYSPAAQEDSINCTSEQYFFQESFRAPNHTKFSCKFTADMLQNCSGLADPNFGFEEGKPCFIIKMNRIVKFLPSNGSAPRVDCAFLDQPRELGQPLQVKYYPPNGTFSLHYFPYYGKKAQPHYSNPLVAAKLLNIPRNAEVAIVCKVMAEHVTFNNPHDPYEGKVEFKLKIEK

SEQ ID NO: 14608 - DNA, 876 bp, Artificial Sequence
  derived and/or modified sequence
atggcagctctgcaagaaaagaagacatgtggacagcgaatggaggagttccagcggtactgctggaaccccgatactgggcagatgctcggccggacactaagccggtgggtgtggatcagcctgtactacgtagcattctacgtggtgatgacaggcctgttcgcgctgtgtctgtacgtactcatgcagactgttgacccatacactccagactatcaggatcagctgcggtcccccggggtcactctgcgccctgatgtctatggcgagaagggactggagatcgtgtataacgtatccgataatagaacttgggccgatcttactcagactctgcacgcttttctcgctggatattcacctgcagcgcaagaggatagcattaactgtacctctgagcagtacttcttccaggagagttttagagctccaaaccacaccaaattctcctgtaaattcacagccgatatgctgcagaactgctctgggctcgcagatcctaactttggatttgaggagggcaaaccttgttttatcataaaaatgaatcggattgtaaaattcttaccctccaacggatctgcaccaagggtggactgcgccttcctcgatcaaccacgtgagctcggacagcccctgcaagtgaaatactacccccctaacggcactttctctctgcactattttccgtattatggtaagaaagcacagccccattattcaaatccacttgtggccgcaaaactgctgaatatccctcggaacgctgaagtggccatcgtgtgcaaggtcatggccgagcacgtgacttttaataatcctcatgatccatatgagggcaaagtggagtttaagctgaagattgaaaaatag

SEQ ID NO: 14609 - DNA, 876 bp, Artificial Sequence
  derived and/or modified sequence
atggccgccctgcaggagaagaagacctgtggccagaggatggaggagttccagcgctactgctggaacccagacaccggccagatgctgggccgcaccctgagccgctgggtgtggatcagcctgtactacgtggccttctacgtggtgatgacaggcctgtttgccctgtgcctgtatgtgctgatgcagacagtggacccctacaccccagactaccaggaccagctgcggagccctggggtgaccctgcggccagatgtgtatggagagaagggcctggagatcgtgtacaacgtgtctgacaacagaacctgggccgacctgacccagaccctgcacgccttcctggccggctacagccctgctgcccaggaggacagcatcaactgcaccagcgagcagtacttcttccaggagagcttccgggcccccaaccacaccaagttcagctgcaagttcaccgctgacatgctgcagaactgcagcggcctggccgaccccaactttggatttgaggagggcaagccctgcttcatcatcaagatgaaccgcatcgtgaagttcctgcccagcaatggaagtgccccccgggtggactgtgccttcctggaccagccccgggagctgggccagcccctgcaggtgaagtactacccacccaacggcaccttcagcctgcactacttcccctactacggcaagaaggcccagccccactacagcaaccccctggtggccgccaagctgctgaacatccccagaaatgctgaggtggccatcgtgtgcaaggtgatggccgagcacgtgaccttcaacaacccccatgacccctatgagggcaaggtggagttcaagctgaagattgagaagtag

SEQ ID NO: 14610 - DNA, 876 bp, Artificial Sequence
  derived and/or modified sequence
atggccgccctgcaggagaagaagacctgcggccagcggatggaggagtttcagcgctattgctggaacccagacacaggtcagatgctggggaggactctgtccagatgggtgtggatatccttatactatgtcgccttctatgtggtgatgacaggtttgtttgccctgtgcctgtacgtcttgatgcagaccgtggacccatacacccccgactatcaggaccaactgcgatcccctggggtgaccctcagacctgatgtttacggcgagaagggcttggagatcgtctataacgtctccgataacaggacctgggcagacctgacccagaccctccacgcgtttctggccgggtattcaccggctgcccaggaggattctattaattgtacttcagaacaatatttctttcaagaaagtttcagagcacctaaccacacaaagttcagttgcaagtttaccgccgatatgctgcagaattgtagcggtctggctgatcctaatttcggattcgaagaaggcaagccatgtttcattattaagatgaatagaatcgtgaaatttctgccgtccaatggcagcgcaccacgggtggactgtgcattcctggaccagcccagggagctcgggcaacccctccaagtgaaatattaccctccgaatggcactttctcgctgcattatttcccatactacggaaagaaagcccagccacactactctaaccctctggtggccgctaaacttctcaacatcccacgcaacgcagaggtggccattgtatgcaaagtcatggccgagcatgtgacgttcaataatccgcatgatccttatgaggggaaggtcgagttcaagctgaagatcgagaagtag

SEQ ID NO: 14611 - DNA, 876 bp, Artificial Sequence
  derived and/or modified sequence
atggccgctcttcaggaaaagaaaacttgtggccaacggatggaagagttccagcggtattgctggaatcctgacacaggtcagatgctaggacgcactctttcccggtgggtttggatcagcttgtactatgtcgccttttatgtggttatgacagggctgtttgctctctgtctctacgtcctgatgcaaacagtcgacccttacacccctgattatcaggaccagctgaggtctccaggggtcacactgaggcccgacgtgtacggggaaaagggactcgaaattgtttacaatgtctccgacaaccgaacatgggccgatctaactcagacactgcacgcttttctagcaggatacagtcccgcagcccaggaagactcgataaattgtacaagcgaacaatacttctttcaggagagcttcagggctccaaaccatactaagttttcctgcaaatttacagccgatatgttacagaattgcagcggtttggctgaccccaatttcggatttgaagaggggaagccttgctttatcattaagatgaatagaattgttaagttcttgccgtccaacgggagtgccccacgcgtggactgcgctttcctggatcagccgagagaactaggacagccattgcaggtgaagtattaccctcctaacgggacgtttagtctccattattttccatattatggcaaaaaggcgcaaccacactattccaatccgctggtcgccgcaaagctgctcaatattcccagaaatgctgaagtggctatcgtctgcaaagttatggcagagcatgtcaccttcaataacccccacgatccttatgagggcaaggttgagttcaagcttaaaatagaaaaatag

SEQ ID NO: 14612 - DNA, 1434 bp, Artificial Sequence
  derived and/or modified sequence
gagggtgcagggagcagacgggaggatctcaggccagggacgatggcggctctgcaggagaagaagacgtgtggccagcgcatggaggagttccagcgttactgctggaacccggacacggggcagatgctgggccgcaccctgtccaggtgggtgtggatcagcctgtactacgtggccttctacgtggtgatgactgggctcttcgccctgtgcctctatgtgctgatgcagacagtggacccgtacacaccggactaccaagaccagctacggtcaccaggggtaaccttaaggccggatgtttacggggagaaaggcctggaaattgtctacaacgtctctgataacagaacctgggcagacctcacacagactctccacgccttcctagcaggctactctccagcagcccaggaggacagcatcaactgcacctccgagcagtacttcttccaggagagtttccgcgctcccaaccacaccaagttctcctgcaagttcacggcagatatgctgcagaactgctcaggcctggcggatcccaacttcggctttgaagaaggaaagccatgttttattattaaaatgaacaggatcgtcaagttcctccccagcaacggctcggcccccagagtggactgcgccttcctggaccagccccgcgagctcggccagccgctgcaggtcaagtactaccctcccaacggcaccttcagtctgcactacttcccttattacgggaagaaagcccagccccactacagcaaccccctggtggcagcgaagctcctcaacatccccaggaacgctgaggtcgccatcgtgtgcaaggtcatggcggagcacgtgaccttcaacaatccccacgacccgtatgaagggaaagtggagttcaaactcaagattgagaagtgaaacggtttgcgcaggggtcctgggcacgcctgcggggtcgctcaaggacaccctcctggttgggcttaccttgcccgtcagttccctgccaaatcatccccaaagtggtttggagcaacggtgttgtcagtgtgcgaactccagagaagcgcccacatctgaaggacctgctcgcgagtatcagttcttccttgttgaattcttacagtttttagatggaatttgctgctataagaatgtccagctaccatgggaacgcaaggcagcaactctctaattaaccaggtcataaaaacgattcgtcttctatgtagacatcactttcttactataatttatttttctacacttcaatatgaactgccccccccacattaatataaaaactactaatgcactgatatgaaacacggcttacactaatgacattctgaattcttgcttttaaaattgcaattcctaagttgtaaacataaaatatattaaagttactcttattgtatgtaaaaaaagaaa

SEQ ID NO: 14613 - DNA, 876 bp, Artificial Sequence
  derived and/or modified sequence
atggccgccctgcaggagaagaagacctgcggccagagaatggaggagttccagagatactgctggaaccccgacaccggccagatgctgggcagaaccctgagcagatgggtgtggatcagcctgtactacgtggccttctacgtggtgatgaccggcctgttcgccctgtgcctgtacgtgctgatgcagaccgtggacccctacacccccgactaccaggaccagctgagaagccccggcgtgaccctgagacccgacgtgtacggcgagaagggcctggagatcgtgtacaacgtgagcgacaacagaacctgggccgacctgacccagaccctgcacgccttcctggccggctacagccccgccgcccaggaggacagcatcaactgcaccagcgagcagtacttcttccaggagagcttcagagcccccaaccacaccaagttcagctgcaagttcaccgccgacatgctgcagaactgcagcggcctggccgaccccaacttcggcttcgaggagggcaagccctgcttcatcatcaagatgaacagaatcgtgaagttcctgcccagcaacggcagcgcccccagagtggactgcgccttcctggaccagcccagagagctgggccagcccctgcaggtgaagtactacccccccaacggcaccttcagcctgcactacttcccctactacggcaagaaggcccagccccactacagcaaccccctggtggccgccaagctgctgaacatccccagaaacgccgaggtggccatcgtgtgcaaggtgatggccgagcacgtgaccttcaacaacccccacgacccctacgagggcaaggtggagttcaagctgaagatcgagaagtag

SEQ ID NO: 14614 - DNA, 1257 bp, Artificial Sequence
  derived and/or modified sequence
atgcgtctatccgcaggacccgacgccggaccaagcggcaacagttccccttggtggcctctggcaaccggggccgggaacacttccagggaagccgaggctctgggcgaaggcaacggaccccccagagacgtcagaaacgaagagctcgccaagctcgagatcgcagtgctggctgttacattcgccgtggccgtgctaggcaactcaagcgtcttattggctcttcatcggactcccaggaaaactagccgaatgcacttgttcattcgccacctgtctttagctgacttagcagtcgcttttttccaggtgctgcctcagatgtgctgggacattacatacaggtttaggggaccggactggctgtgcagggtcgttaagcaccttcaggtgtttgggatgttcgcatcagcatacatgctggtagtgatgaccgccgatagatatatcgctgtctgccaccccctgaaaacacttcagcagcctgcgcgaaggagccggctgatgatcgccgcagcctgggttctttctttcgtgttgtcaacaccccagtactttgtcttctccatgattgaggtgaataacgtgacaaaggcccgcgactgctgggccacgtttatccagccttggggcagccgcgcatacgtcacgtggatgaccggtggaatctttgtggctcccgtggtgattcttggtacatgttatggcttcatttgctacaatatttggtgcaatgtacgggggaagaccgcttcgcgacagtctaaaggtgcagagcaggccggagttgccttccaaaaaggcttcctactggcgccctgcgtttcttctgtgaagagcatcagccgggccaagattcgtactgtgaagatgaccttcgtgatcgtgacagcctacatagtctgttgggctcctttttttataatacagatgtggtcagtgtgggaccctatgtctgtctggacggaatcagagaatcctacaattaccatcaccgcgctgctgggttccctcaatagctgttgtaatccatggatttacatgttctttagcggacatttgctccaggattgcgttcagtcatttccatgctgtcagaacatgaaggagaagtttaataaggaggatacagactccatgtcacgcaggcaaacattctatagcaacaatcgctcccctactaatagcaccggcatgtggaaggacagccctaagtctagtaaaagtatcaagtttattccggtctccacatag

SEQ ID NO: 14615 - DNA, 1257 bp, Artificial Sequence
  derived and/or modified sequence
atgaggctgtctgctggcccagatgctggccccagcggcaacagcagcccctggtggcccctggccactggagctggcaacaccagccgggaggccgaggccctgggggagggcaatggacctccaagagatgtgagaaatgaggagctggccaagctggagattgctgtgctggccgtgacctttgctgtggccgtgctgggcaacagctctgtgctgctggccctgcacaggacccccaggaagaccagcaggatgcacctgttcatccgccacctgagcctggccgacctggccgtggccttcttccaggtgctgccccagatgtgctgggacatcacctaccgcttccggggccctgactggctgtgccgggtggtgaagcacctgcaggtgtttggcatgtttgccagcgcctacatgctggtggtgatgacagctgaccgctacatcgctgtgtgccaccccctgaagaccctgcagcagcctgcccggcgcagccggctgatgattgctgctgcctgggtgctgagctttgtgctgagcaccccccagtactttgtgttctccatgattgaggtgaacaacgtgaccaaggcccgggactgctgggccaccttcatccagccctggggcagccgggcctacgtgacctggatgactggaggcatctttgtggcccctgtggtgatcctgggcacctgctacggcttcatctgctacaacatctggtgcaatgtgcggggcaagacagccagccggcagagcaaaggagctgagcaggccggcgtggccttccagaagggcttcctgctggccccctgtgtgtcctctgtgaagagcatcagccgggccaagatcagaacagtgaagatgaccttcgtcatcgtgacagcctacatcgtgtgctgggcccccttcttcatcatccagatgtggagcgtgtgggaccccatgtctgtgtggacagaaagtgagaaccccaccatcaccatcacagccctgctgggcagcctgaacagctgctgcaacccctggatctacatgttcttcagcggccacctgctgcaggactgtgtgcagagcttcccctgctgccagaacatgaaggagaagttcaacaaggaggacacagacagcatgagccggcggcagaccttctacagcaacaacagaagccccaccaacagcacaggcatgtggaaggacagccccaagagcagcaagagcatcaagttcatccctgtgtccacctag

SEQ ID NO: 14616 - DNA, 1257 bp, Artificial Sequence
  derived and/or modified sequence
atgcggctgagcgccggccccgacgccggccccagcggcaacagcagcccttggtggcctttggcaaccggggcagggaatacatcgagagaagctgaagccctcggagaaggcaacggaccccctcgcgacgtccgtaatgaagagcttgctaaactggaaattgcagtgctcgcagtgaccttcgccgtcgcagttttgggcaatagcagtgtactgctggcgcttcacagaacaccccggaagacttcaagaatgcatctgtttattagacacctgtcccttgccgatcttgctgtcgcattcttccaagtgctgccccaaatgtgttgggatatcacataccgcttcaggggccctgattggctgtgtagagtggtcaaacacctccaagttttcgggatgtttgctagtgcttacatgctggtggtgatgaccgctgacaggtacatagccgtatgccacccattaaaaacacttcaacagccggcgaggagaagcagactgatgattgccgccgcctgggttctgtcctttgtgctgagcacacctcagtacttcgtgttctccatgattgaggtaaataatgtgacaaaggccagggattgttgggcaacttttatccagccatggggcagtcgggcctatgtgacctggatgactggcggtattttcgtggccccggtggtgattcttggaacctgttacggcttcatttgttacaacatatggtgtaacgtaagagggaaaactgccagccgacagtcgaaaggagcagaacaggccggagttgcctttcagaagggatttctcctggctccatgcgtcagttcagttaagagcatcagccgggctaaaatacggactgtaaaaatgacatttgttatagtaaccgcttacattgtgtgttgggcacccttctttatcattcagatgtggagcgtctgggatcccatgagcgtgtggaccgaatcagaaaacccaaccattacgattaccgccctactgggttcactgaacagctgctgtaacccttggatttatatgttttttagcggccacctcttgcaggactgtgtacaatctttcccctgctgtcagaatatgaaagagaagttcaataaagaggatacagattccatgtcaagacgccaaactttctacagcaataatcgcagtcccactaattcaactgggatgtggaaggattcacccaaaagcagcaagtctattaaattcatacctgtgtcaacttag

SEQ ID NO: 14617 - DNA, 1257 bp, Artificial Sequence
  derived and/or modified sequence
atgcgcttaagtgcaggcccagacgccggtccctccggcaactcaagcccttggtggccgctcgccacaggtgcgggtaacactagtcgcgaggctgaggcgctgggtgagggaaatgggccacctcgtgacgttcgcaatgaggagctcgctaagctcgagatcgccgtgctggctgtgaccttcgcagtcgctgtgcttgggaacagctctgtcttgctggctctccaccgaacaccccgaaagacttcccgtatgcatctcttcatcaggcacctgtccttggcagacttggctgtggcattctttcaggttctgccacaaatgtgttgggacatcacctacaggttccgtggcccagactggctgtgccgagtggtgaagcatttacaagtttttggtatgtttgcctccgcctacatgcttgttgtcatgacagccgataggtacatcgcagtctgccatcctctgaagacactccagcaacctgcccgtcgatctcggcttatgatcgctgctgcatgggtactgagctttgtgcttagcacccctcagtatttcgtgttctccatgattgaagtcaataacgttacgaaggccagagactgctgggcaacttttatacagccatggggctcgcgcgcatatgtcacatggatgaccggaggcatttttgtcgctccggtggtcatcttaggtacatgctacggtttcatctgttacaacatttggtgtaatgtgcggggaaagacagcaagccgccagtctaagggtgccgagcaggctggggtcgcattccagaaaggatttctattggccccttgtgtttcttccgtgaagagtattagtcgcgcaaaaattcgcacggtgaagatgacatttgtcatcgtaacggcctatattgtgtgctgggctccctttttcattatccagatgtggtcggtgtgggatccaatgtctgtgtggaccgaatccgagaatcctacaattacaataacggcattgctcgggtcattgaactcatgctgtaatccttggatatatatgttcttcagcgggcatctacttcaggactgcgtccaaagcttcccctgttgtcagaacatgaaggagaagttcaataaagaagatactgactcaatgtctcgccgacaaaccttttattccaacaatagatcccctactaattccaccggaatgtggaaggactcccctaagtcttcaaagtctattaagtttatcccggtctcaacttag

SEQ ID NO: 14618 - DNA, 1257 bp, Artificial Sequence
  derived and/or modified sequence
atgagactgagcgccggccccgacgccggccccagcggcaacagcagcccctggtggcccctggccaccggcgccggcaacaccagcagagaggccgaggccctgggcgagggcaacggcccccccagagacgtgagaaacgaggagctggccaagctggagatcgccgtgctggccgtgaccttcgccgtggccgtgctgggcaacagcagcgtgctgctggccctgcacagaacccccagaaagaccagcagaatgcacctgttcatcagacacctgagcctggccgacctggccgtggccttcttccaggtgctgccccagatgtgctgggacatcacctacagattcagaggccccgactggctgtgcagagtggtgaagcacctgcaggtgttcggcatgttcgccagcgcctacatgctggtggtgatgaccgccgacagatacatcgccgtgtgccaccccctgaagaccctgcagcagcccgccagaagaagcagactgatgatcgccgccgcctgggtgctgagcttcgtgctgagcaccccccagtacttcgtgttcagcatgatcgaggtgaacaacgtgaccaaggccagagactgctgggccaccttcatccagccctggggcagcagagcctacgtgacctggatgaccggcggcatcttcgtggcccccgtggtgatcctgggcacctgctacggcttcatctgctacaacatctggtgcaacgtgagaggcaagaccgccagcagacagagcaagggcgccgagcaggccggcgtggccttccagaagggcttcctgctggccccctgcgtgagcagcgtgaagagcatcagcagagccaagatcagaaccgtgaagatgaccttcgtgatcgtgaccgcctacatcgtgtgctgggcccccttcttcatcatccagatgtggagcgtgtgggaccccatgagcgtgtggaccgagagcgagaaccccaccatcaccatcaccgccctgctgggcagcctgaacagctgctgcaacccctggatctacatgttcttcagcggccacctgctgcaggactgcgtgcagagcttcccctgctgccagaacatgaaggagaagttcaacaaggaggacaccgacagcatgagcagaagacagaccttctacagcaacaacagaagccccaccaacagcaccggcatgtggaaggacagccccaagagcagcaagagcatcaagttcatccccgtgagcacctag

SEQ ID NO: 14619 - protein, 424 aa, Artificial Sequence
  derived and/or modified sequence
MDSGPLWDANPTPRGTLSAPNATTPWLGRDEELAKVEIGVLATVLVLATGGNLAVLLTLGQLGRKRSRMHLFVLHLALTDLAVALFQVLPQLLWDITYRFQGPDLLCRAVKYLQVLSMFASTYMLLAMTLDRYLAVCHPLRSLQQPGQSTYLLIAAPWLLAAIFSLPQVFIFSLREVIQGSGVLDCWADFGFPWGPRAYLTWTTLAIFVLPVTMLTACYSLICHEICKNLKVKTQAWRVGGGGWRTWDRPSPSTLAATTRGLPSRVSSINTISRAKIRTVKMTFVIVLAYIACWAPFFSVQMWSVWDKNAPDEDSTNVAFTISMLLGNLNSCCNPWIYMGFNSHLLPRPLRHLACCGGPQPRMRRRLSDGSLSSRHTTLLTRSSCPATLSLSLSLTLSGRPRPEESPRDLELADGEGTAETIIF

SEQ ID NO: 14620 - DNA, 1275 bp, Artificial Sequence
  derived and/or modified sequence
atggattctggccccctgtgggacgcgaaccccacaccgaggggtacactgtccgccccgaatgcgactactccatggctgggacgggacgaagagctcgctaaagtcgagatcggggtcctggcaaccgtgttggtcctggccaccggaggcaatttggctgtactcctgaccttgggacaactgggtagaaagcggtcacggatgcatctgtttgtgttgcacttggcattgactgatctagccgttgcactattccaagtgctaccccagctgctctgggacattacttaccggttccaggggcccgacctgctgtgcagagcagtcaaatatttgcaggtgcttagtatgtttgctagtacgtacatgcttctggcaatgaccttggaccggtacctggccgtgtgccacccgctcagatctttgcagcagcccgggcagagcacatacttattaattgccgcgccttggttactggcagccatattcagtctaccacaggttttcatattctccctgagggaagttattcaggggagtggggtcctcgattgttgggctgacttcggattcccatgggggccacgggcctaccttacctggacaaccctggcaatctttgttttgcccgttaccatgttgactgcttgttatagtctcatttgccacgaaatctgtaagaacctgaaagttaaaacccaggcttggcgagtgggcggaggggggtggcggacatgggacaggcccagcccgtccacgttagccgccactacgcgggggttgccgtcccgagtgagttccattaatactatctctcgcgctaagatcaggactgtgaaaatgaccttcgttattgtattagcctatattgcctgttgggctccttttttctctgttcaaatgtggtcagtgtgggacaaaaatgcgccagacgaggactcaacgaacgttgcgttcacaatctccatgctgttggggaatttaaacagttgttgcaacccatggatctacatgggttttaacagtcatctgttgcccaggccccttcgtcacctagcatgttgcggtggtcctcagcctaggatgaggcggaggttgtctgatggtagtttgagctctcgccatacaaccctcctcacaagatcatcatgtcctgcaactttaagcctgtcgctcagcttaacacttagcggcagaccccgtccagaggaatcacctagagacctagaactggccgacggcgagggcaccgccgaaactattattttctag

SEQ ID NO: 14621 - DNA, 1275 bp, Artificial Sequence
  derived and/or modified sequence
atggattctggccccctgtgggatgccaaccccaccccccggggcaccctgagcgccccaaatgccaccaccccctggctgggcagagatgaggagctggccaaggtggagattggagtgctggccaccgtgctggtgctggccactggaggcaacctggccgtgctgctgaccctgggccagctgggcaggaagaggagcaggatgcacctgtttgtgctgcacctggccctgacagacctggccgtggccctcttccaggtgctgccccagctgctgtgggacatcacctaccgcttccagggccctgacctgctgtgcagagctgtgaagtacctgcaggtgctgtccatgtttgccagcacctacatgctgctggccatgaccctggaccgctacctggccgtgtgccaccccctgcggagcctgcagcagcccggccagagcacctacctgctgattgctgccccctggctgctggccgccatcttcagcctgccccaggtgttcatcttcagcctgcgggaggtgatccagggcagcggcgtgctggactgctgggccgactttggcttcccctggggcccccgggcctacctgacctggaccaccctggccatctttgtgctgcctgtgaccatgctgacagcctgctacagcctcatctgccacgagatctgcaagaacctgaaggtgaagacccaggcctggagggtgggcggcggcggctggaggacctgggaccggcccagccccagcaccctggccgccaccacccggggcctgcccagccgggtgagcagcatcaacaccatcagccgggccaagatcagaacagtgaagatgaccttcgtcatcgtgctggcctacatcgcctgctgggcccccttcttctctgtgcagatgtggagcgtgtgggacaagaatgccccagatgaggacagcaccaacgtggccttcaccatctccatgctgctgggcaacctgaacagctgctgcaacccctggatctacatgggcttcaacagccacctgctgccccggcccctgcggcacctggcctgctgcggcggcccccagcccaggatgagaagaaggctgagtgatggcagcctgagcagccgccacaccaccctgctgaccaggagcagctgcccagccaccctgagcctgagcctgagcctgaccctgagcggccggcccaggcctgaggagagcccccgggacctggagctggctgatggagagggcacagctgagaccatcatcttctag

SEQ ID NO: 14622 - DNA, 1275 bp, Artificial Sequence
  derived and/or modified sequence
atggacagcggccccctgtgggacgccaaccccaccccccggggcacactgagtgccccaaatgccaccaccccgtggttgggccgcgatgaggagctggcgaaagttgaaatcggcgtcctggcaaccgtgctggtactcgcaactggaggcaacctggccgtcctgttaacactcggccagctggggaggaagcggtccagaatgcacttgttcgttttacacctggctcttaccgaccttgcggtggcactgtttcaggtgttgcctcagctcctctgggacataacctaccggttccaaggacctgacctgctgtgcagggccgtgaaatacctgcaggtgcttagtatgttcgccagcacatacatgctcttggccatgactcttgatcgatatctggccgtatgtcacccccttcgtagcctgcagcagcccggacaaagtacatatctgctgatcgccgctccttggctcctggctgcgatctttagcctgccacaagttttcattttcagcttgagggaggtgatacagggatctggcgtgctggattgctgggccgacttcggcttcccctggggtcctagggcgtaccttacatggacaacacttgcgatttttgttctccccgtgacaatgttaaccgcctgttattctctcatttgtcatgaaatctgcaagaatctcaaagtcaaaactcaggcatggagggtgggtggaggcgggtggcggacatgggatagacctagtccgtctacgctggccgccacgacaagaggattgcctagccgcgttagctcgatcaacacaatctcacgagcaaaaatccggaccgtcaagatgactttcgtaatcgttttagcttacatagcatgctgggctccctttttttccgttcagatgtggtcagtttgggataaaaatgcccccgacgaggacagtaccaatgtggcgtttacaatatcgatgctgctggggaacctgaactcttgctgtaacccatggatctacatgggctttaactcacatctgcttccacggcctctgaggcatctggcatgttgcggcggtccacagccacgaatgaggcgccggctatccgacgggtctctgagttcccgccacactacgcttcttacccgtagttcatgcccagctacactgagtctatcactcagcttgactctgtctggaagacctagacccgaggaatctcctagggatctcgagttggccgacggcgaaggaaccgcagagaccatcatcttctag

SEQ ID NO: 14623 - DNA, 402 bp, Artificial Sequence
  derived and/or modified sequence
atggtgagcgtgggcttcggcgaccgggccggcctgggcagcagctgtcgctgctcacaaataaccccggacatggcgagtgccgtcgcaaccagatatgtgctgggacactggccccgcgaccacatctgcggctgtggctcacaccaattaagttcctggagagctgagcccgatggcggtgtgggtatgccacacaccctgagtgagccccccagcggactcacgggcatttgggcaggcgctctggtatcccctgaaaaacagatgaaggagaacctgcgatctaatgatagtgagcctagattgcctgggtttgagtcatgcctgatccactccctggctgtatggccgtgggcttctaattttgcttcactcggcccgagcgtaaacaagggctag

SEQ ID NO: 14624 - DNA, 1275 bp, Artificial Sequence
  derived and/or modified sequence
atggacagcgggcctctctgggatgctaatccaaccccaagagggacacttagtgctcccaacgctacgacaccctggctgggacgagacgaggagcttgccaaagtggagatcggcgtgctcgcgactgtactggttcttgccaccggaggcaacctagccgtgctcctcacactgggccaactcggtagaaaaaggagcaggatgcatcttttcgtgttgcatctggcactgactgacttggccgtggccctattccaggtcctcccccagcttctgtgggatatcacttacagattccagggaccagacctgctgtgtcgcgcagtgaagtacctgcaagtcttgtccatgttcgcctccacctacatgctgctggccatgacactagataggtatctcgcagtctgccatcctttacgctcactgcagcagcctggccagtctacctacctactcattgccgctccttggttgctcgccgcaatattctccttaccccaggtttttatctttagcctgcgcgaggtgatccagggttccggtgtactggattgctgggcagactttggttttccgtggggaccccgtgcctaccttacatggacaacccttgctatatttgtactgccagtgacgatgctgaccgcgtgttatagcctgatctgtcacgagatttgtaaaaatctcaaagttaaaacccaggcctggagagtcgggggtggcggatggagaacctgggaccgtccttcccctagtactcttgccgcaactacccggggtttaccatcaagggtgagttcaattaacactattagcagggctaagatccggaccgtgaaaatgactttcgtgatagtactagcatatattgcttgttgggccccattttttagcgtccagatgtggtctgtgtgggacaagaacgcacccgacgaggacagcactaacgtggcctttacaatttctatgctcctcgggaatttgaattcctgctgtaacccttggatttatatggggtttaactcccacctgctgcccagacccttgcgacacttggcatgttgtgggggtcctcagcccagaatgcgacgccgactgagcgatggatccctttcttcgcggcacactactctcttaaccagaagttcctgtcctgctacactctcactgagtctctcactgacactcagcggccgtcccagaccagaagaatccccgagggatctagagctggcagacggagagggaactgcagagacgatcatcttctag

SEQ ID NO: 14625 - DNA, 2237 bp, Artificial Sequence
  derived and/or modified sequence
ggcttggctggggcttcctgccctgagcgcgacaccgactgccccggaccgcgcctccaagcaggctgaagggcttccgctcttggcttccagaaaagtttggagaaagagaatttgaggcggattggagggtggtagcccctccccagccttctttccctcccagaagcctcactctgcacagcgtcccccattcttcccgtcctgattccccatcttcctgacccctccttctccctctcctgggtcgatcccagtcacattttctccttccgaatctcatcctccctcctcctctctatcccagtcctctgaacgatttccgcctatttgcaagccttctccctgtcattctcaacgcttctcctttctctccacctcccctgccactccattttatccatcaaacctctccacttgcatccacaccctcccttcatccttccctcccagcaaaccttgctcatggattctgggcctctgtgggatgccaaccccacccctcggggcaccctctctgcccccaatgccacaacaccctggctgggccgggatgaggagctggccaaggtggagatcggagtcctggccactgtcctggtgctggcgaccgggggcaacctggctgtgctgctgaccctgggccagctgggccgcaagcgctcccgcatgcacctgttcgtgctgcacttagccctgacagacctggccgtggcgctcttccaggtgctgccacagctgctgtgggacatcacctaccgcttccagggccccgacctcctgtgcagggccgtcaagtacctgcaggtgctcagcatgtttgcctccacctacatgctgctggccatgacgctggaccgctacctggctgtctgtcaccccctgcgcagcctccagcagccaggccagtccacctacctgctcatcgctgctccctggctgctggccgccatcttcagcctccctcaagtcttcattttttccctgcgggaggtgatccagggctcaggggtgctggactgctgggcagacttcggcttcccttgggggccacgggcctacctcacctggaccaccctggctatcttcgttctgccggtgaccatgctcacggcctgctacagcctcatctgccatgagatctgtaaaaacctaaaagtcaagacacaggcctggcgggtgggaggagggggctggaggacttgggacaggccctcaccttccaccttagctgccaccactcgggggctgccatctcgggtcagcagcatcaacaccatctcacgggccaagatccgaacagtgaagatgacctttgtcatcgtgctggcctacatcgcttgctgggctcccttcttcagtgtccagatgtggtccgtgtgggacaagaatgcccctgatgaagattccaccaatgtggctttcaccatctctatgcttttgggcaacctcaacagctgctgcaacccctggatctacatgggcttcaacagccacctgttaccgcggcccctgcgtcaccttgcctgctgtgggggtccccagcccaggatgcgccggcggctctccgacggcagcctctcgagccgccacaccacgctgctgacccgctccagctgcccggccaccctcagcctcagcctcagcctaaccctcagtgggaggcccaggcctgaagagtcaccaagggacttggagctggcagatggggaaggcaccgctgagaccatcatcttttaggaaagactcgctggggtctggtactgcccccaggactagtggaggttctctgcccacctcgggcactggaaatgagagctgggagggtaagggttggagttagaggagccctgtctaaagcggagcgaaaaggccagaatgggtcccctaccctggtgtcacagctgcccctagtgtgagggctgcctcataagctcccaatctcagacactggcagtcagggagaatcaaactgcctgtctccctggtcctgccatattcatagggtgtccatgcacacatggtgtcccagatctaggcaggcctaggatggtgctgtctaggggtccacgggtggcaggaattcagaggctggccttgtgccctggctacctgtctccattctaacctgactggcacatctcagcctaaccaggagaggggagaagtgaaaaaccgtgaggaggactctatttggatcctggatttgttgttgttgttgttgttgttagagagaa

SEQ ID NO: 14626 - DNA, 1275 bp, Artificial Sequence
  derived and/or modified sequence
atggacagcggccccctgtgggacgccaaccccacccccagaggcaccctgagcgcccccaacgccaccaccccctggctgggcagagacgaggagctggccaaggtggagatcggcgtgctggccaccgtgctggtgctggccaccggcggcaacctggccgtgctgctgaccctgggccagctgggcagaaagagaagcagaatgcacctgttcgtgctgcacctggccctgaccgacctggccgtggccctgttccaggtgctgccccagctgctgtgggacatcacctacagattccagggccccgacctgctgtgcagagccgtgaagtacctgcaggtgctgagcatgttcgccagcacctacatgctgctggccatgaccctggacagatacctggccgtgtgccaccccctgagaagcctgcagcagcccggccagagcacctacctgctgatcgccgccccctggctgctggccgccatcttcagcctgccccaggtgttcatcttcagcctgagagaggtgatccagggcagcggcgtgctggactgctgggccgacttcggcttcccctggggccccagagcctacctgacctggaccaccctggccatcttcgtgctgcccgtgaccatgctgaccgcctgctacagcctgatctgccacgagatctgcaagaacctgaaggtgaagacccaggcctggagagtgggcggcggcggctggagaacctgggacagacccagccccagcaccctggccgccaccaccagaggcctgcccagcagagtgagcagcatcaacaccatcagcagagccaagatcagaaccgtgaagatgaccttcgtgatcgtgctggcctacatcgcctgctgggcccccttcttcagcgtgcagatgtggagcgtgtgggacaagaacgcccccgacgaggacagcaccaacgtggccttcaccatcagcatgctgctgggcaacctgaacagctgctgcaacccctggatctacatgggcttcaacagccacctgctgcccagacccctgagacacctggcctgctgcggcggcccccagcccagaatgagaagaagactgagcgacggcagcctgagcagcagacacaccaccctgctgaccagaagcagctgccccgccaccctgagcctgagcctgagcctgaccctgagcggcagacccagacccgaggagagccccagagacctggagctggccgacggcgagggcaccgccgagaccatcatcttctag

SEQ ID NO: 14627 - protein, 16 aa, Artificial Sequence
  derived and/or modified sequence
HLQTYGEHYPLDHFDK

SEQ ID NO: 14628 - protein, 17 aa, Artificial Sequence
  derived and/or modified sequence
SVDEVNYWDKQDHPISR

SEQ ID NO: 14629 - protein, 445 aa, Artificial Sequence
  derived and/or modified sequence
MAVAIAAARVWRLNRGLSQAALLLLRQPGARGLARSHPPRQQQQFSSLDDKPQFPGASAEFIDKLEFIQPNVISGIPIYRVMDRQGQIINPSEDPHLPKEKVLKLYKSMTLLNTMDRILYESQRQGRISFYMTNYGEEGTHVGSAAALDNTDLVFGQYREAGVLMYRDYPLELFMAQCYGNISDLGKGRQMPVHYGCKERHFVTISSPLATQIPQAVGAAYAAKRANANRVVICYFGEGAASEGDAHAGFNFAATLECPIIFFCRNNGYAISTPTSEQYRGDGIAARGPGYGIMSIRVDGNDVFAVYNATKEARRRAVAENQPFLIEAMTYRIGHHSTSDDSSAYRSVDEVNYWDKQDHPISRLRHYLLSQGWWDEEQEKAWRKQSRRKVMEAFEQAERKPKPNPNLLFSDVYQEMPAQLRKQQESLARHLQTYGEHYPLDHFDK

SEQ ID NO: 14630 - protein, 403 aa, Artificial Sequence
  derived and/or modified sequence
MAVAIAAARVWRLNRGLSQAALLLLRQPGARGLARSHPPRQQQQFSSLDDKPQFPGASAEFIDKLEFIQPNVISGIPIYRVMDRQGQIINPSEDPHLPKEKVLKLYKSMTLLNTMDRILYESQRQGRISFYMTNYGEEGTHVGSAAALDNTDLVFGQYREAGVLMYRDYPLELFMAQCYGNISDLGKGRQMPVHYGCKERHFVTISSPLATQIPQAVGAAYAAKRANANRVVICYFGEGAASEGDAHAGFNFAATLECPIIFFCRNNGYAISTPTSEQYRGDGIAARGPGYGIMSIRVDGNDVFAVYTATGGPKARASVGPSSPSTTGTCGIMMPLHAMGLWHPVSHQQELSAAPKPKGTTKPILESYLKSHLLGHSRYQLYIHQDAVRREKPQSNLNRESLI

SEQ ID NO: 14631 - DNA, 1496 bp, Artificial Sequence
  derived and/or modified sequence
gggaaataagagagaaaagaagagtaagaagaaatataagagccaccatggcagtggcaattgcagccgccagggtctggcggctgaacagagggctgtcacaggcggcactcctgctgctccgccagcctggggcacgaggcctggccagatcgcatccccctcgtcagcaacaacaattcagctcccttgatgataaacctcagttcccgggtgcgagcgccgagtttatcgataagctcgagttcatccaacctaatgtgattagcggaattccgatctaccgggtgatggacagacaaggacaaatcattaacccatcggaggatccacatctgcctaaggagaaagtcttgaagctctacaagtccatgactcttcttaacactatggaccgaatactttacgaatcacagcgccagggaaggatctcgttttacatgaccaattacggtgaagagggaacccatgtgggatcggcagcagcactggacaataccgacctcgttttcggtcagtaccgggaggcaggagtgctcatgtatagggactacccactggagctgtttatggcccaatgctatggcaacattagcgatctgggtaaaggtagacagatgccagtgcactacgggtgtaaggaacggcactttgtcactatttcgagccctcttgcaactcaaataccccaagctgtcggagcagcatacgcagcaaagcgggcaaatgcaaacagagtggtgatctgttacttcggagaaggtgcagcatcggaaggagacgcgcacgcaggcttcaactttgctgcgactcttgaatgccccattatcttcttttgtcggaacaacggctatgcaataagcacgcctacctcagaacagtaccgcggagatggtatcgccgctaggggtccagggtacgggattatgtccattagagtggatggaaacgatgtttttgcggtgtacaatgcgacgaaggaagcacgtcgcagggccgtcgcagaaaaccagccttttctgattgaggccatgacctaccgcatcggacatcattccacctcagatgattcttcggcctaccgatccgtggacgaagtcaattactgggataaacaggatcatcccatttccagacttcgtcattaccttctgtcgcagggctggtgggatgaagaacaggaaaaagcctggcgaaagcaatcaagacgcaaagtgatggaagcctttgaacaagctgagagaaagccaaagcctaatccaaaccttctgttttccgacgtgtaccaagaaatgccagcgcaactccgcaagcaacaagagtccttggctagacacttgcaaacctacggcgaacattacccccttgatcactttgacaagtgataataggctggagcctcggtggccatgcttcttgccccttgggcctccccccagcccctcctccccttcctgcacccgtacccccgtggtctttgaataaagtctgagtgg

SEQ ID NO: 14632 - DNA, 1338 bp, Artificial Sequence
  derived and/or modified sequence
atggctgtagctattgccgcagccagagtgtggagactgaacaggggcctatcacaggctgctctcttgctcctccgacaacccggggcccgcgggctggcccgatcacatccacctcgacagcagcagcagttctcatctctcgatgacaaacctcagtttcctggggcaagtgctgaattcattgataagttggagtttatccagccaaatgtgattagcggcattcctatctatcgggtgatggatcggcaaggacagattattaaccccagtgaagacccgcatctccctaaggagaaagtcttgaagctctacaagagtatgacgctgctcaacacaatggaccggatactttatgagagccagagacaagggcggatcagtttctatatgactaattacggcgaagaaggcactcacgtgggatcagctgctgccctggataacacagatctggtcttcggacagtatcgagaggccggtgtactgatgtaccgcgattatccactggagctgtttatggctcagtgttacggtaatatctcagaccttggaaagggccgccagatgcctgtgcactatggatgcaaggagcgacacttcgtgacgataagctctccgctggcaacccagattccacaggccgtgggtgcagcctatgctgcaaagcgcgcgaatgctaatcgggtggtgatctgctattttggcgagggagctgcctctgagggggatgcccatgctgggtttaattttgcagccacccttgagtgtcccattatctttttttgtagaaataacggttatgcaataagtaccccgacctccgagcagtaccggggcgacggaatcgcagctcggggcccgggctacggcatcatgagtattcgagtcgacggtaacgacgtgttcgccgtctataacgccacaaaggaagctaggagaagggccgtggccgaaaatcagccatttctcatcgaagccatgacatacaggatcggacaccactcaacttccgacgacagcagcgcataccgtagcgtagatgaagttaattattgggacaagcaggaccatccaatcagcaggctgcgacactacctgctctctcagggatggtgggacgaggagcaggagaaagcttggcgcaagcagtctcgacggaaagtcatggaggcctttgaacaggcagaacggaaacccaaaccaaatcctaacttacttttctctgacgtgtaccaggagatgcccgcacaactgagaaagcagcaagaatctcttgctaggcatcttcagacttatggcgagcattacccactggaccactttgacaagtag

SEQ ID NO: 14633 - DNA, 1212 bp, Artificial Sequence
  derived and/or modified sequence
atggctgttgccattgccgcagcccgggtgtggaggctcaaccggggcctgtctcaagcggccctgctcctgttgaggcaacctggcgcccgaggtctcgcgaggtcccaccctccccgccagcaacagcagttttcaagcttggacgataaaccccagttccctggcgcctcggcagaattcattgataagctggaatttatacagcccaacgtaatctccggcattcctatttatagagtgatggatagacagggccagattatcaatccatccgaagatccccacctgcctaaagagaaagtgttaaagctttataaatccatgacactcctgaacaccatggatagaatcctgtacgaaagtcagcggcaggggcggatttctttttatatgactaactatggcgaagagggaacccacgtcggaagtgcggccgctctggataatacagacctcgtgtttgggcagtacagggaggccggagttctgatgtacagagactatcccttggagctgtttatggcccagtgctatggcaacatatcagacctaggcaagggacgccagatgcctgtgcactacggatgcaaagaaagacacttcgtgacaatttcctctccgctcgctacccagataccccaggctgttggcgcggcctatgcagcaaagcgggcaaatgccaatagagtggtcatttgctattttggggagggcgctgcatcggagggagatgcccatgctgggttcaatttcgctgccactctggaatgcccgataattttcttttgcaggaataatggatacgccatttctacccccacctccgaacagtataggggagacggcattgcagcccgtggccccgggtacggcattatgtctattcgggtggacgggaacgacgtgttcgcggtttacacagccaccggaggccccaaggccagggcctctgtcgggcctagcagtccaagcaccactggcacatgtggaatcatgatgcccttgcacgctatgggcctttggcacccagtaagtcatcagcaggagctgtccgcggcccctaagcctaagggaaccactaaacctatcctagaatcttatctcaagtctcacctgctaggacactcacgttaccagctgtatattcatcaggatgcagtgcgtagagaaaagcctcaatccaacctgaatcgcgagagccttatatag

SEQ ID NO: 14634 - DNA, 1338 bp, Artificial Sequence
  derived and/or modified sequence
atggctgtggccatcgctgctgcccgggtgtggaggctgaacagaggcctgagccaggccgccctgctgctgctgcggcagcccggggcccggggcctggcccggagccaccccccccggcagcagcagcagttcagcagcctggatgacaagccccagtttcctggggccagcgctgagttcatcgacaagctggagttcatccagcccaacgtcatcagcggcatccccatctacagagtgatggaccggcagggccagatcatcaaccccagcgaggacccccacctgcccaaggagaaggtgctgaagctgtacaagtccatgaccctgctgaacaccatggaccgcatcctgtatgagagccagaggcagggccgcatctccttctacatgaccaactatggagaggagggcacccacgtgggcagcgctgctgccctggacaacacagacctggtgtttggccagtaccgggaggccggcgtgctgatgtacagagactaccccctggagctgttcatggcccagtgctacggcaacatcagtgacctgggcaagggccggcagatgcctgtgcactacggctgcaaggagcggcactttgtgaccatcagcagccccctggccacccagatcccccaggccgtgggcgccgcctatgctgccaagagggccaatgccaacagagtggtgatctgctactttggagagggcgccgcctctgaaggagatgcccacgccggcttcaactttgctgccaccctggagtgccccatcatcttcttctgcagaaataatggctacgccatcagcacccccaccagcgagcagtacagaggagatggcattgctgcccggggccctggctacggcatcatgagcatccgggtggatggaaatgatgtgtttgctgtgtacaatgccaccaaggaggccaggagaagagctgtggccgagaaccagcccttcctgattgaggccatgacctacagaattggccaccacagcaccagtgatgacagcagcgcctacagatctgtggatgaggtgaactactgggacaagcaggaccaccccatcagccggctgcggcactacctgctgagccagggctggtgggatgaggagcaggagaaggcctggaggaagcagagcaggaggaaggtgatggaggcctttgagcaggccgagaggaagcccaagcccaaccccaacctgctcttcagtgatgtgtaccaggagatgcctgcccagctgaggaagcagcaggagagcctggcccggcacctgcagacctacggggagcactaccccctggaccactttgacaagtag

SEQ ID NO: 14635 - DNA, 1212 bp, Artificial Sequence
  derived and/or modified sequence
atggctgtggccatcgctgctgcccgggtgtggaggctgaacagaggcctgagccaggccgccctgctgctgctgcggcagcccggggcccggggcctggcccggagccaccccccccggcagcagcagcagttcagcagcctggatgacaagccccagtttcctggggccagcgctgagttcatcgacaagctggagttcatccagcccaacgtcatcagcggcatccccatctacagagtgatggaccggcagggccagatcatcaaccccagcgaggacccccacctgcccaaggagaaggtgctgaagctgtacaagtccatgaccctgctgaacaccatggaccgcatcctgtatgagagccagaggcagggccgcatctccttctacatgaccaactatggagaggagggcacccacgtgggcagcgctgctgccctggacaacacagacctggtgtttggccagtaccgggaggccggcgtgctgatgtacagagactaccccctggagctgttcatggcccagtgctacggcaacatcagtgacctgggcaagggccggcagatgcctgtgcactacggctgcaaggagcggcactttgtgaccatcagcagccccctggccacccagatcccccaggccgtgggcgccgcctatgctgccaagagggccaatgccaacagagtggtgatctgctactttggagagggcgccgcctctgaaggagatgcccacgccggcttcaactttgctgccaccctggagtgccccatcatcttcttctgcagaaataatggctacgccatcagcacccccaccagcgagcagtacagaggagatggcattgctgcccggggccctggctacggcatcatgagcatccgggtggatggaaatgatgtgtttgctgtgtacacagccaccggcggccccaaggcccgggcctctgtgggccccagcagccccagcaccaccggcacctgtggcatcatgatgcccctgcacgccatgggcctgtggcaccctgtgagccaccagcaggagctgtctgctgcccccaagcccaagggcaccaccaagcccatcctggagagctacctgaagagccacctgctgggccacagccgctaccagctgtacatccaccaggatgctgtgagaagagagaagccccagagcaacctgaaccgggagagcctcatctag

SEQ ID NO: 14636 - DNA, 1338 bp, Artificial Sequence
  derived and/or modified sequence
atggccgtggccatcgccgccgcccgggtgtggcggctgaaccggggattaagccaggccgcattgcttctgctgcggcagccaggcgctcggggtttggctagatcccatccaccccggcaacagcagcaattcagctcattggacgataagccacagtttccgggagcgtcagctgagttcatagataaactggaattcatccagccaaatgtcatctccgggatacccatctaccgagtgatggacaggcaggggcagattataaacccgtcggaggacccccatctcccaaaggagaaggtgctgaagctttataaatctatgacccttctgaatacaatggacagaatattgtatgaatcacagcggcagggacggatctcgttttacatgacaaattatggggaagaggggacccacgtgggaagcgctgctgccctggacaacaccgaccttgtgttcggtcaataccgggaagctggggtgctcatgtatagggattatccacttgaactgtttatggcccagtgttacggcaatatctcggatctcgggaagggtcgccaaatgccggtgcactatggctgcaaggagagacattttgtgacaatctcaagtcctctggctacacagattccacaagcagtcggagccgcatacgccgcaaagcgagcaaacgcaaaccgtgtggtaatttgttacttcggcgaaggggcagctagtgaaggagacgctcacgccggctttaactttgcagcgacactggagtgtcccatcattttcttctgtcgcaataacggatacgccatcagtactccaacttcggagcagtacagaggtgatggcattgcagcaaggggtccagggtatggcattatgtctattagggtggacggtaatgacgtgttcgcggtatataacgcaacaaaggaagctcggaggagagctgtggccgagaaccaaccctttttaatagaggcaatgacatacagaatcggacatcacagcaccagtgatgattccagcgcctataggagcgtggacgaggttaactattgggacaagcaagatcacccgatatctcgccttaggcactacttgctgagccagggctggtgggacgaagagcaggagaaagcttggaggaaacaaagccgtaggaaggtgatggaagcctttgaacaggccgagcggaagccaaagccgaacccgaatcttctcttttccgatgtctatcaggaaatgcccgcacagctgcgaaagcagcaggaaagcctagccaggcacctgcaaacttatggagagcactaccccctcgaccacttcgacaagtag

SEQ ID NO: 14637 - DNA, 1212 bp, Artificial Sequence
  derived and/or modified sequence
atggccgtggccatcgccgccgcccgggtgtggcggctgaaccggggactgtcacaagccgccctgctcttgctcaggcaacctggtgccagaggactggcccggagtcatcccccacgtcaacaacagcagttcagctccctggatgataaaccacaatttccaggcgctagtgccgagtttatcgataagctggaattcatacaacccaatgtcatctctggtatcccaatctaccgagttatggacagacagggccagataataaaccctagtgaggacccgcacctgcccaaggagaaggtgcttaagctatacaagtcaatgacattgctgaacacgatggacagaattctttacgaatcccagcgccagggcaggatctccttctacatgaccaactatggggaggagggcactcacgttggttctgccgccgcactggataacactgacctcgtgttcggtcagtatagagaagcaggggtgttgatgtatagagattacccactggaactgttcatggctcagtgctacggaaatatttccgacctcggaaaaggcaggcagatgcccgtgcattacggttgtaaggagcggcacttcgtgactatctccagcccccttgctacccagatccctcaggccgtaggcgctgcctacgcagcgaagcgggcaaatgcgaatcgagtcgtcatttgctatttcggagagggagcggcctctgaaggcgatgctcatgcaggcttcaatttcgcagcaaccctggagtgtcccatcattttcttttgtcgaaataatgggtacgctatctcaactccaacctcggaacagtatcgcggggatggaatcgctgcacgtgggcccggatacggtatcatgagtatccgcgtggatggaaatgatgtgtttgccgtctataccgccaccggggggcccaaggcccgagctagcgtcggtcctagtagccctagtaccactggcacttgcgggatcatgatgcctttgcatgccatggggctgtggcaccccgtgagccatcagcaggagctgtccgccgcaccgaagcccaaaggaacgacaaaaccaattctggagtcgtatttgaaaagccacttgctgggacatagcagatatcaactgtatatccatcaggatgccgtgaggagagaaaagccacagagtaatctcaacagagaatctctaatctag

SEQ ID NO: 14638 - DNA, 1338 bp, Artificial Sequence
  derived and/or modified sequence
atggcggtcgccatcgccgcagcccgagtctggaggctgaaccggggtctttctcaggccgcactgttgcttcttcgccaaccaggggctcgcggtctcgcgagatctcatccacccagacaacagcaacaattctcctccctcgacgacaagccgcaatttcccggtgcatctgctgaattcatagataagctggaattcatacagccaaacgtgatatctggaataccaatttaccgcgtgatggatcgccagggacaaatcattaacccaagtgaagatcctcacttgccaaaagagaaggtgctcaaactttacaaaagcatgacactcctgaacacaatggaccgaattctctatgaatctcagcgacaggggagaatctctttttacatgacaaactatggtgaggaggggacccacgtgggttccgccgcagccctggacaacacagatctcgtgttcggtcagtatcgcgaggccggtgttttgatgtacagagattacccgctcgagctgtttatggcccagtgttacggcaacatcagcgatttgggcaaggggaggcaaatgcctgtccattacggttgtaaagagcggcactttgttactatttcctctccgctcgctacacagatacctcaggcagtcggtgctgcctatgctgctaagcgtgccaatgccaacagagtcgttatatgctactttggcgagggcgcagcttctgagggggatgcacacgctggatttaacttcgccgcaacgctggaatgccccatcattttcttttgccgcaataacgggtatgccattagtactccaacttccgaacaatacaggggggacgggatcgccgcaaggggcccaggttatggaatcatgtccattagggtggatgggaacgacgtttttgctgtgtacaatgctactaaagaggcccgaagaagggccgtagccgagaatcagccatttctgatcgaggccatgacatatcgtatcgggcatcacagcacatccgatgattccagcgcttataggagtgtagatgaggtgaattattgggacaaacaagatcatcctatatcccgactgaggcactacctactgtctcagggctggtgggacgaagaacaggagaaagcgtggaggaagcagtcccgaagaaaggtgatggaagcgttcgagcaagcggaaagaaaacccaagcccaatcccaacctgctgttctccgacgtttaccaggaaatgccagctcagctgagaaagcagcaagaaagcctcgctcggcacttgcagacttacggggagcattatcctctggatcacttcgacaagtag

SEQ ID NO: 14639 - DNA, 1212 bp, Artificial Sequence
  derived and/or modified sequence
atggctgtcgccattgcggcagcaagggtgtggcgcctcaatcgagggctgtcacaggccgctctgctgctgcttcggcaacctggcgcaagggggctggccagatctcaccccccacgccaacaacagcaattttcctcactcgacgataagcctcaattccccggagctagcgcagagtttattgataagcttgagtttatccagccaaatgtgatttccggcatcccaatctatagggtgatggacagacaaggacagatcataaaccccagcgaggacccacatctaccaaaggaaaaggtccttaagctgtataagtctatgactttgttaaacacaatggaccgcattctgtacgaatcccagagacagggcagaataagcttttacatgaccaactacggtgaggagggaacgcatgtgggatcagccgcagcattagacaatacagatttagtgttcggacagtacagagaggcaggggtgctcatgtatcgagactatcccctagaactgttcatggcccagtgttacggtaatatttctgacctcggaaagggcagacagatgcctgtgcactacggctgtaaagaacggcatttcgttacgatctcaagccccctggccacacagataccccaggctgtcggtgccgcatacgccgcaaagcgggctaatgctaatcgggtagtgatctgctatttcggtgagggcgcagccagcgaaggtgacgctcacgcgggatttaatttcgccgctactctggagtgtcctatcatctttttctgtcgtaataatggttatgctatcagcacgccaacttctgaacagtataggggagacggaatcgccgcacgtgggcctggatatggtatcatgtcaattcgcgttgatggtaatgatgttttcgcggtttatacagccaccggcggtccaaaggcacgagcctccgtagggccttcgtccccttccactactgggacatgtggaatcatgatgcctctgcatgcaatgggactgtggcaccctgtctctcaccagcaggaactgtcagccgcacctaagcctaagggtacaacaaagcccattctcgagtcatacttgaagagtcatttactgggacacagccggtaccagctttacatccaccaggatgctgtccgaagagagaagccccagagcaatttgaacagggagtcactgatttag

SEQ ID NO: 14640 - DNA, 1335 bp, Artificial Sequence
  derived and/or modified sequence
atggctgtcgcaattgctgctgcgcgcgtgtggcggctgaatcgggggctatcccaggcggccctgttgctcctcaggcagcccggtgcacgcgggcttgcaagatcgcatccaccccgccagcagcaacagtttagcagccttgatgataagccgcagtttcctggggccagcgccgaattcattgacaaactggagttcattcagcctaacgttatctctggtattcctatctaccgcgtgatggaccgtcaaggccagatcattaatccaagtgaggacccccaccttcctaaggagaaggtgctgaagctgtataaatccatgactttgttgaacacaatggatcggatcctctatgaaagccagcgccagggacgaatcagcttttacatgaccaactacggcgaggaagggacacatgtgggaagcgccgccgccctggacaatacagacctggtgttcggacagtatagagaggccggagtgctcatgtatagagactatccgttagagctttttatggcccagtgttacggaaatatttccgacctgggtaagggtcggcaaatgcctgtgcactacgggtgtaaagaaaggcatttcgtgacaattagcagcccactcgcaacccagattccgcaagccgtgggcgccgcatatgcagctaagagggccaacgcaaacagagtagtcatctgctatttcggtgaaggcgccgcgtcagaaggcgacgcacacgccggattcaacttcgctgccacactcgagtgtccaattattttcttctgtaggaataacggctacgctataagtactcccacctctgaacagtatcgcggcgatgggattgcggcaaggggccctggttatgggataatgtcaattcgtgtagacggaaatgacgtctttgccgtgtacaatgcaaccaaggaggccaggagacgagcagtggccgagaaccagcccttcctgattgaagccatgacatataggattggccaccattcaacaagcgatgactcatctgcctatagatctgtggacgaggtaaattattgggataagcaggaccatccaataagtagactccgccactatctcttatcacagggatggtgggacgaagagcaggagaaggcctggcgcaagcagtctaggcggaaggtgatggaagcgttcgaacaggccgagcgcaagcccaaacccaatccgaatctcttgtttagtgatgtatatcaggagatgcctgcacagctccggaagcagcaggaaagcttggccagacacttgcagacctacggcgagcactatcccctagatcacttcgataaa

SEQ ID NO: 14641 - DNA, 1335 bp, Artificial Sequence
  derived and/or modified sequence
atggcagtggctatcgctgcagcccgggtgtggcgcctgaaccgcggactgagccaagctgcactgctgctgctgcggcagcccggagcgcgggggctggcaagatcccacccaccccgccagcaacaacagttttcgtccctcgatgataagccgcagttcccgggggcgtcggccgagttcattgacaagttggagttcatccagccgaacgtgatctcaggaatcccaatatacagggtgatggacagacagggtcagatcatcaacccttcagaagatccgcacctgccaaaagagaaggtgctgaaattgtacaagtccatgactctgctcaatacgatggatcggatcctgtacgagagtcagcggcagggccgaatctcgttctacatgaccaactacggagaggaggggactcacgtgggctccgcggcagctctcgacaatacggacctcgtgttcggtcagtatcgggaagcgggagtgctgatgtaccgcgactacccactggaactcttcatggcccagtgctacggaaacatctccgacctcggcaaaggacggcagatgcctgtgcattacggatgtaaggaacggcactttgtgaccatttccagcccattggccacccagatcccgcaagcagtcggcgcagcctacgccgccaaacgcgcaaatgctaatcgcgtggtgatctgttacttcggagagggagctgcgtcagaaggagatgctcatgccgggttcaatttcgctgcgactttggaatgccctattatctttttctgccggaataacggatacgctatcagcactccgacgagtgagcaatacagaggtgatggcatcgcggcacgggggcctggatacggtatcatgtcgatcagagtggacggcaatgacgtgttcgcggtgtacaacgccaccaaggaagcgcggcgcagagctgtggccgaaaatcaaccgttcctgatcgaagcaatgacctatagaatcggacaccatagcacttccgatgatagctcagcctacagatctgttgacgaagtgaactactgggacaagcaggaccacccaatctcgcgcctgcgccactacctcctgagccagggatggtgggatgaggagcaagaaaaggcgtggcgcaagcagagcagacgaaaggtgatggaggcgtttgaacaggcggagcggaaaccgaagccaaaccctaacctccttttcagcgacgtgtaccaagaaatgcccgcgcagctgagaaaacaacaagagtcactcgctagacacctgcaaacctacggagaacactacccgctggaccacttcgacaag

SEQ ID NO: 14642 - DNA, 1335 bp, Artificial Sequence
  derived and/or modified sequence
atggccgtcgctatcgcagcggcgcgtgtgtggcggttgaacaggggtctgtcacaggcagccctcctcctgctgagacagcccggagctcgcggtctggcccggtcgcatccgccacggcagcagcagcagttcagctcactggacgataagccacaattcccgggtgcttctgcagaattcatcgataaacttgagttcatccagccgaatgtcattagcggaatccccatctaccgtgtcatggatcgccaggggcagatcattaatccaagcgaggaccctcatcttcctaaggagaaggtgctcaagctctataagtcaatgacccttctgaacaccatggacaggattttgtacgagtcgcaacgccagggaaggatctcattttacatgacgaactatggcgaagaaggaacccacgttgggtcggcagctgccttggacaacaccgatctggtgttcggccagtaccgcgaggcgggggtcctcatgtaccgcgactaccctctggagctcttcatggcgcaatgttacggtaatatctccgacctgggaaagggacgccaaatgccagtccattacggatgcaaagaacggcactttgtgactatctcctcaccgctcgccacccagatccctcaggccgttggcgccgcatacgcggccaagcgtgctaacgcgaatagggtcgtgatatgctacttcggagagggcgcagcgtccgaaggggacgctcacgccggattcaatttcgcagcaacgctggaatgcccaatcattttcttctgcaggaacaatggatatgccatcagcacgccgacttccgaacagtaccgcggggacggaatcgccgctcgcggcccgggatatggcataatgtcgatccgggtggatggtaacgacgtctttgcggtgtacaacgctactaaggaagcgagacgacgtgccgtggccgagaatcaaccctttctgatcgaggccatgacctaccggatcggccatcactcgacgagcgacgattcgtcagcctacagatccgtggacgaggtgaactactgggacaagcaggatcaccctatctcacggctgcggcattaccttctctcgcaaggatggtgggatgaggaacaggagaaagcctggcgcaaacagtcgcggcggaaagtgatggaggcctttgaacaagccgagcggaagccaaaaccaaacccgaacctgttgttttccgatgtgtaccaggaaatgccagcgcaactccggaaacagcaggaatcactcgccagacacctgcaaacctatggggaacattacccgctcgaccacttcgacaag

SEQ ID NO: 14643 - DNA, 1335 bp, Artificial Sequence
  derived and/or modified sequence
atggcagtggcaattgcggccgcccgagtctggcggctgaatagagggctctcccaggcagccctcctgcttctacggcagccaggggcgaggggactggccaggtctcatcctcctcggcagcaacagcagttttccagtttagacgataagccccaatttccaggcgcgagcgcagagttcattgataagctagagttcatccagcccaacgtgatctccgggattcccatttacagagtaatggatcgccaggggcagatcattaacccatcggaggacccccacctcccgaaggagaaagtgctgaagctgtataagtcaatgacgttgctgaacactatggatcgtatcctgtacgagtcacagaggcaaggccgcataagcttttacatgaccaattatggggaagaaggcacacacgtgggatccgccgctgctctggataacactgacctcgtcttcggacagtaccgggaagcaggagtgctgatgtaccgggattacccccttgaactgttcatggcacagtgttatggaaacatttcagacctcggaaagggcaggcagatgccagttcactatgggtgtaaagagagacattttgtgaccatcagtagccctctggcaacccagatcccccaagcagtgggggccgcctatgctgccaagagggccaatgctaatagagtggtaatttgctatttcggagaaggtgcagcgtcagagggcgacgctcatgccggctttaattttgcagccacgttagagtgtcccattatttttttctgccgcaataatgggtatgccatcagtactcccactagcgaacagtatcggggcgatggcattgcagctcgcggaccggggtatgggatcatgtccatcagggtcgatggcaatgatgtattcgcagtctataatgcaaccaaggaagctcggcgccgcgccgtggcagagaaccagccctttctgattgaagctatgacctaccggattggtcatcattccacatcagacgatagctccgcttaccggtcggtcgatgaagtcaattattgggacaaacaggaccaccctattagccgcctccgccactacctgctatcccaaggttggtgggacgaggagcaggagaaagcctggcggaagcaaagcaggaggaaggtcatggaggcttttgaacaagcagagcgcaaaccgaagccaaacccgaacctcctgttctccgatgtctatcaggagatgccggcacagttgaggaagcaacaggagtcactggcccggcacctccagacatacggtgagcattacccacttgatcatttcgacaag

SEQ ID NO: 14644 - DNA, 1335 bp, Artificial Sequence
  derived and/or modified sequence
atggccgttgcgatcgctgctgctagagtgtggagactcaacagagggctctctcaagcggccctgctgctgctgcggcagccaggtgcccgcggactggcccgctctcatcccccccggcagcagcagcagttttcctctctcgacgacaaacctcagtttcctggcgctagtgctgagtttatcgacaaattagaattcatacagcctaatgtaatctctggcatccctatctacagggtcatggaccgtcagggccaaatcattaatcccagcgaggacccccatctgccaaaagagaaggtgttaaagctgtataagagcatgaccctgctcaacactatggatcggatactgtacgagagccagcggcagggacggatttctttttacatgaccaactacggcgaggaagggacccacgtggggagcgccgcagctctggacaacactgatctggtctttggccagtacagagaggccggcgtgctgatgtacagggactatccgctggagctgtttatggcacaatgttacggaaatatatctgatctagggaagggccgccagatgcccgttcattacgggtgcaaggagagacattttgttacaataagcagcccactggccacccaaatcccacaggccgtgggagccgcttatgcagccaagcgtgcaaacgccaatcgcgtggttatatgctatttcggggagggagcagctagcgaaggagacgcacacgcaggattcaactttgccgctaccttggaatgtcccatcatcttcttttgccgaaacaacgggtacgccatttccacccctacctctgagcagtacaggggtgacggaattgcggcccgcggtccaggctatgggattatgtccatcagagttgacggtaacgacgtctttgccgtctacaacgccactaaggaagctcgccggcgagcagtggctgaaaaccagcccttcctgatcgaagctatgacttacagaatcggccaccacagcacaagcgatgacagtagtgcctaccgaagcgtggatgaggtaaattattgggacaaacaggaccaccctatttcgaggctgcgccactatttgctgtctcaggggtggtgggatgaagagcaggaaaaggcctggagaaagcaatcccgccggaaggtcatggaggccttcgaacaggccgagagaaagcccaaacctaatcccaatctgctgttctcagacgtgtaccaagaaatgcctgctcagctgaggaaacagcaggaaagcctggcccgccacctgcagacgtatggcgaacactaccccctggatcattttgataag

SEQ ID NO: 14645 - DNA, 1335 bp, Artificial Sequence
  derived and/or modified sequence
atggcagtggctatcgccgctgctagagtctggagactgaataggggtttgagtcaggccgccctcctcctactgcggcagcctggcgcacgaggtctggctcgatctcaccctcccaggcagcagcaacagttttctagcctcgacgacaaacctcagttccctggtgcatccgccgagtttatagacaagctggagtttatccaacccaatgtgatatctgggattccaatctatcgagtgatggatcggcagggccagatcatcaaccccagtgaagatccccacttgcccaaagagaaggtcctcaagctttacaaaagtatgacacttctgaacaccatggataggatcctgtacgaaagccagcgtcagggccgaattagtttctacatgaccaactatggcgaggagggcactcatgtgggcagtgccgcagcgctggataacacggacctcgtttttggtcaatatcgagaggctggagtgctcatgtaccgggattatccgctggagttattcatggcgcaatgctatggcaatatcagtgatctgggaaaaggacggcagatgcctgttcactacggttgcaaggagcggcatttcgtgacaatttccagcccactcgccactcagatcccccaggcagtgggcgccgcatacgccgccaaacgggctaacgctaaccgggtcgtgatttgttactttggcgaaggcgcagcttctgagggggacgcccacgccggcttcaacttcgcagccactcttgaatgccccattatctttttttgtaggaacaacggttatgccatcagtacacctacttccgagcagtaccggggtgacggcatcgctgcacggggacctggttacggaattatgagtatccgagtggacggaaatgatgtgttcgcagtgtacaatgcaacaaaagaagccaggaggagggcagttgctgaaaaccagccttttcttattgaagcaatgacataccgtatagggcatcattcgacctcagacgactcatctgcatacagatcagtagacgaagttaactactgggataaacaagatcaccccataagtagactgcggcattacttgctatcgcagggatggtgggacgaagaacaggagaaagcatggcggaagcagtcaaggcgcaaggtaatggaggcgttcgagcaggccgaacgaaaacccaagccaaatcccaatttgctcttctctgatgtatatcaagaaatgcctgcccagctgagaaaacagcaggagtccctcgcacgccacttgcagacatacggagaacactatccactggatcatttcgataaa

SEQ ID NO: 14646 - DNA, 1335 bp, Artificial Sequence
  derived and/or modified sequence
atggccgtcgcgatcgcggctgcccgggtgtggagactaaaccgcgggctcagccaggccgcattgctgctgctgcggcagcctggtgctaggggcttagcccgctctcatccgccaaggcaacagcaacagtttagcagcctggatgataaaccccagttcccaggggcctcggcggagtttatcgataagttagagttcatccaaccgaacgttattagcggcattcctatatacagagtcatggataggcaagggcagatcatcaacccttcggaagaccctcatcttcctaaagagaaagtgctaaagctgtataaaagcatgacactgctcaatactatggataggattctctacgagtcccaacgtcagggccgaatcagtttctatatgacgaactatggggaggagggtacccacgtggggtctgcagccgccctcgacaacactgatctggtgttcgggcagtatcgtgaggccggggtgctgatgtatagagactaccccctagagctatttatggcccagtgttatggtaatattagcgatctgggtaaggggagacaaatgccagtgcactatggctgtaaggagcgtcacttcgtgacaatttccagcccccttgctacccaaataccccaggctgtgggtgctgcttatgcagcgaagcgcgctaacgctaatagagtcgttatatgctatttcggggaaggtgctgcctctgaaggcgatgctcatgccgggtttaatttcgccgccacactcgaatgcccaatcattttcttctgccggaacaatgggtacgcaataagcacgccgaccagcgagcagtataggggggacggaatagctgcacggggacctggctacggcatcatgtccatcagagtggacggtaatgacgtgtttgcggtatataacgccactaaggaagcaaggcggagggcggtcgcagaaaatcagcccttccttatcgaggctatgacatacaggattggccatcactccacctccgacgactcctccgcctaccgatcagtggatgaggttaactactgggataaacaagaccatccgatctcccgactccggcactatctcctgtcccagggatggtgggacgaggagcaggagaaggcttggcgaaagcagagcaggcgaaaagtgatggaggccttcgaacaggccgagcggaaacccaagcctaatcccaacctgctgtttagcgatgtataccaggagatgcccgcccagttgagaaagcagcaggaaagtctggctagacacttacaaacctacggagagcattaccctctggaccacttcgacaag

SEQ ID NO: 14647 - DNA, 1335 bp, Artificial Sequence
  derived and/or modified sequence
atggcggtggcaatcgccgctgctagagtgtggagactaaatcgaggtctttcgcaggcagccctcctgctcctgcggcagccaggcgcaagaggcctagctcgctcccacccgcccaggcagcaacagcagttctcatccctggacgataagcctcaattccccggggcatcggcggaattcatcgataagttggaattcatccagccaaatgtcatctccggcattcccatctatagggtaatggacagacagggacagatcattaatccatccgaagatccacacctgcctaaggaaaaggtactcaagttgtataagagcatgactctgctgaacaccatggatcggatcctgtacgaaagtcagagacagggacggataagcttctatatgactaattacggtgaggagggaacccatgttgggagcgcggccgcactcgacaataccgacctggtctttggccagtatcgcgaggctggggtgctcatgtatcgggactaccctctggaactgttcatggctcagtgctacggaaatatctctgatctgggaaaggggagacagatgccagtccactacggctgtaaggaacgtcacttcgtgaccatctcctcacccctggccactcaaatcccacaggccgtgggagcagcatatgctgctaagcgcgctaatgctaaccgcgtggtaatttgttattttggcgagggagctgcctcagagggcgacgctcatgccggcttcaacttcgcagctacactggaatgccccatcatcttcttctgcaggaataatggatatgctatttccactcctaccagcgagcaatatcgcggtgatggaatagccgcacggggcccagggtacggaattatgagtattagagtggacggcaacgatgttttcgccgtgtacaacgctaccaaagaggctagacgccgcgcagtggccgagaaccaaccattcttgatcgaagccatgacataccggatcggccatcattctacctcagacgattcctcagcttacagatctgttgacgaagtcaattattgggataaacaggatcatccgatctcacgcctgcggcattaccttctcagccaaggatggtgggatgaggaacaggaaaaggcatggaggaaacaatcaaggcggaaggtgatggaggcattcgaacaggcagagcggaaacccaagcctaatcctaatctgctctttagcgacgtgtatcaggaaatgcccgctcagctgcgtaagcagcaggaaagtctggcccgccatctgcagacgtatggtgagcattaccctctggaccatttcgataaa

SEQ ID NO: 14648 - DNA, 1335 bp, Artificial Sequence
  derived and/or modified sequence
atggcagttgcaattgccgcagcaagagtgtggcggttgaacaggggactatctcaggctgcacttctccttttgcggcagcccggagctcgtggcctggcgcggtcccatcctcctcgccaacagcagcagttctcctcactggacgacaaaccccaatttcccggagcctccgctgaatttatcgacaagctggaatttattcagccgaacgtgataagcgggatcccaatctaccgggtaatggatagacaggggcagatcatcaacccttctgaggacccacacctgccaaaggaaaaagtgttgaaactgtataaatccatgacactgctaaacacaatggacaggatcctctacgagagccagcggcagggaagaatctctttttatatgaccaattatggtgaagaaggcactcatgtcggcagtgcagccgcgctagacaacactgacctggttttcggacaataccgggaggcgggtgtgttgatgtaccgggactaccctcttgagctgttcatggctcaatgctacgggaatatcagcgatttgggaaagggcaggcagatgcctgttcactatggatgtaaggagaggcattttgttaccatctcttcccctctggcgacccagatcccccaagctgtgggggccgcatatgctgcaaaaagggccaatgccaacagggtggtgatttgttacttcggtgagggagccgcatcagagggagacgcccacgccggctttaactttgccgccacactggagtgccccattatatttttttgtcggaataatggctatgcaatcagtacgcccacaagcgaacagtaccggggagacggtatcgctgcacgggggccaggctacggaattatgtctatccgcgtggatgggaatgatgtcttcgctgtgtacaacgccaccaaggaagcaagacgccgggcagtggctgagaaccagcctttcctcatcgaggccatgacatatcggatcgggcaccacagtacctcggatgattccagcgcctaccgcagcgtggacgaggtgaattactgggacaaacaggatcacccaataagccgcctacgacactatctactatcccagggctggtgggatgaggagcaggaaaaggcttggcggaagcagagcaggaggaaagtgatggaagcctttgaacaagctgagaggaagccaaagcccaatcccaatcttctttttagcgacgtctaccaggaaatgcccgcccagttgcggaagcagcaagagagtctggcgcggcatctgcaaacctatggtgaacattatccacttgaccactttgacaag

SEQ ID NO: 14649 - DNA, 1335 bp, Artificial Sequence
  derived and/or modified sequence
atggcagttgctatagcggcagcacgagtttggcgcctgaatcgtggactctcccaggccgcgctcctgctccttagacagcctggagcacgcggtctggcacggtcccatccgccaaggcaacaacagcagtttagctcgttggacgacaaaccccaattccctggagcgtccgctgaattcattgacaagctggagtttatccaacctaacgtcatttcgggaattcctatctacagagtcatggaccgtcaaggacaaatcattaacccctcggaggacccccatctgcccaaggaaaaagtactgaaactttacaaaagcatgaccctcttgaacactatggacaggatattgtacgaatcccaacgccaggggagaatcagcttctatatgactaactacggggaagaaggcacccatgtgggatccgcagcagctcttgacaacactgatctcgtgtttggtcagtacagggaagcaggagtcttgatgtaccgtgattaccctcttgaattgttcatggcgcaatgttacggcaacatttccgatctgggcaagggcagacagatgccagttcattatggttgtaaagagcgtcactttgtgactatcagctctccccttgctactcaaattccacaagccgtgggagcagcctacgcagccaaacgcgcaaatgcaaaccgagtcgtgatctgttactttggagaaggtgcagcctccgaaggagatgcacatgccggatttaactttgctgctactcttgaatgcccaatcatctttttctgtcgaaataacggctacgcaatatccaccccaacttcggagcaatatagaggagatggtattgcagcgcgcgggcctggatacggtattatgtccatccgtgtggatggtaatgacgtgtttgcagtgtacaacgcaaccaaggaagccagacggagagcagtcgcggagaaccagccatttctcattgaagccatgacgtaccgcattgggcatcactctacttccgacgattccagcgcataccggagcgtggacgaagtgaactactgggataagcaggatcaccctatctcgcgcctgagacattacctgctctcgcaaggatggtgggatgaagaacaagaaaaagcatggagaaaacaatcaaggcgcaaggtcatggaagccttcgaacaggcagagagaaagcctaagccaaatcctaacctgcttttcagcgatgtgtaccaggaaatgcctgcccagttgagaaaacagcaggaatccctggctagacatctgcagacctacggggaacactaccctctggatcattttgacaag

SEQ ID NO: 14650 - DNA, 1335 bp, Artificial Sequence
  derived and/or modified sequence
atggcagtggccattgccgcggcccgtgtctggcgcctgaacaggggactgtcccaagcagccctgctcctgctgcgccaacccggagcgagaggactcgcgcggagccacccgccacgacagcaacagcagttctcgagcctggatgataaaccacaattcccgggagcatctgcggagttcatcgacaagctggagtttatccaaccaaatgtgatctcgggaatcccgatctatcgagtaatggaccggcaaggacaaatcattaacccatccgaggaccctcacttgcctaaagaaaaggtgctcaaattgtacaagtctatgactctgctgaacactatggaccgcatcctctatgaaagccagcggcaaggtcgcatcagcttctatatgaccaattacggggaggaaggaacgcatgtgggttcagcggcggccctggacaatactgacctcgtctttggccagtacagagaggccggtgtcctcatgtacagagactaccctcttgaactcttcatggcccaatgttacggtaacatatcggatcttggcaagggccgccagatgccggtgcattacgggtgcaaagaacggcacttcgtgactattagctccccgcttgcaacccagatccctcaggccgtgggagcggcatacgccgcgaagcgggcgaatgcaaatcgggtggtgatctgctacttcggagaaggagcggcgtccgagggtgacgctcacgcgggattcaacttcgccgctaccctggaatgccccataatcttcttctgcaggaataacggttacgccatcagcaccccgacgtcagaacagtaccgcggcgacgggatcgcagcccggggaccaggctacggcatcatgtccatccgcgtggacgggaacgatgtttttgctgtgtacaacgctactaaggaggctagacgccgggctgtcgctgagaatcagccgtttttgatcgaggcaatgacgtaccgcatcggacaccactcgacctcagacgatagctccgcgtaccggtcggtagatgaagttaactactgggacaagcaggatcatcccatctccagactgcgacactacttgctcagtcaggggtggtgggacgaggaacaagaaaaggcttggcgcaagcagtcgagaagaaaggtgatggaggcctttgaacaggctgaacggaaacccaagccaaacccgaatctgctgttcagcgacgtctaccaagagatgccggcccagctccgcaaacagcaggagtctctggcacgtcatttgcagacttacggcgaacactacccgcttgatcatttcgataag

SEQ ID NO: 14651 - DNA, 1335 bp, Artificial Sequence
  derived and/or modified sequence
atggcagtggctatcgcagccgctcgcgtgtggcgcttgaaccggggcctgtcccaggcggccctgctgctgctcagacagccgggtgccagagggctggcgcgctcccatccgcctcgccagcagcaacagttctcctcactcgacgacaagccacagttcccgggggcgagcgcagaattcattgataaactcgaattcatccaaccgaacgtgatctccggcattccgatttacagggtgatggaccggcagggacagatcatcaacccgtccgaagatccacacctcccgaaggaaaaggtcctcaagctgtacaaatccatgaccctcctgaatactatggaccgcatcctgtacgaatcccagaggcagggaagaatctcattttacatgaccaactacggagaggaaggaacccacgtcggtagcgcagcggctctcgacaacaccgatctggtattcgggcaataccgcgaagccggagtcctgatgtacagggactaccctctggagctgtttatggcccagtgctacggcaacattagtgacttgggaaagggtcggcaaatgcccgtgcactacggatgtaaggaacgccacttcgtcaccatctcatcgccgcttgccactcagatccctcaagctgtgggcgctgcctacgccgcaaagagagccaacgcaaatcgagtggtgatctgctacttcggcgagggagctgcttcggaaggagacgcccacgcaggattcaactttgccgccaccctggagtgtcctatcatcttcttttgcagaaacaacggatacgcgatctcgactccgacctccgaacaatatcgcggagacggaatcgcggcccggggtccaggatatggaatcatgtctatccgggtggacggaaatgacgtgttcgccgtgtacaacgccaccaaggaggcgcgacgccgcgccgtcgccgagaatcagcctttcctgatcgaggccatgacctaccgcatcggacaccattccacctcagacgactcctcggcgtatcgctccgtggacgaagtgaattactgggataaacaggaccaccctatttcccggctgagacactacctgcttagccagggatggtgggacgaagaacaggaaaaagcctggcggaagcagtcacgccggaaagtcatggaggcatttgaacaggccgagcgcaaaccgaagccgaacccgaacctgctcttttcggatgtgtaccaagagatgcccgcacagctccggaagcagcaagagagcctggcccgccatctgcagacttatggggagcactacccgctggatcatttcgacaag

SEQ ID NO: 14652 - DNA, 1335 bp, Artificial Sequence
  derived and/or modified sequence
atggctgttgcgattgccgctgcccgcgtatggcgattgaaccgcggattgagtcaagctgctctcctcctgctcaggcagcccggagcaaggggcctagccaggagtcacccaccacgtcaacagcagcagtttagctcactcgacgacaagccccagtttccgggcgcttctgccgaatttatcgataaacttgagttcattcagcccaatgtgatatccgggataccaatatacagggtaatggaccggcagggccagataataaacccaagtgaagacccacatttacctaaggagaaggtacttaaattgtacaaatccatgactttgctcaataccatggacaggattctgtacgagtcccagaggcagggccgaatctccttctacatgactaattatggggaagaaggaacccatgtgggatctgcggctgctctagacaacaccgacctggtattcggacaatacagagaagccggagtgctcatgtatcgcgactatccgcttgaactcttcatggctcagtgctacggcaacatttccgacctcggtaaagggaggcagatgcctgttcattacgggtgcaaagagagacactttgtcactattagctcaccactggccacgcagattccccaggccgtgggggcagcgtacgcagcaaagcgtgctaacgctaatagggttgtcatttgctactttggcgagggagcagctagcgagggggatgcacatgccggttttaattttgccgccactctggagtgtccaatcatttttttctgccgaaataacggctatgcaatctctacccctacctcagagcagtatagaggtgatggaatcgctgctagaggacccggctacggcatcatgtcaatccgagtcgacggcaacgatgtattcgccgtgtacaacgcgacaaaggaggctagaaggagagccgtggccgagaatcagccatttttgattgaggcaatgacgtacaggatcgggcaccactctacctctgacgactcaagcgcttacagatccgtcgatgaagtcaattattgggacaagcaggatcatcccatctccagactgaggcattacctcctgagccaagggtggtgggacgaggagcaggaaaaagcttggaggaagcagtcgaggcgtaaagttatggaggcctttgaacaggccgagcggaaaccaaaaccaaatcccaacctgctgttctccgacgtctatcaggagatgccagcacagctgcgaaagcagcaggagtctctagctcgtcatctccagacatacggtgagcactaccctctggaccacttcgacaag

SEQ ID NO: 14653 - DNA, 1335 bp, Artificial Sequence
  derived and/or modified sequence
atggctgtggccatcgccgctgctcgcgtctggcggctgaacaggggcctctcacaggcggcactgctgctcctgcgccagcccggagccagaggactggctcggagccatccacctcgccaacaacagcaattcagctccctggacgacaagccacagttccctggcgcctcggctgagttcatcgataaactggagtttattcaaccaaacgtcatcagcggtatcccgatctacagggttatggaccggcaaggtcagatcatcaatccatcggaggacccccacctccccaaagaaaaagtgctgaaactgtataagagcatgacgctgctcaacaccatggaccggatcctgtacgagtcccaaagacagggaaggatctcattttacatgaccaattacggagaggagggaactcacgtgggatcagcggcggccctcgacaatactgatcttgttttcggccagtacagagaggcgggcgtcctgatgtacagagactatccgctggaattgttcatggctcagtgctacggaaacatctccgatctcggcaagggtcgccagatgccggtgcactacggttgtaaggagcgacacttcgtgaccatctcaagcccgctcgcgactcagatcccgcaggccgtgggagctgcgtacgccgctaagcgggcaaatgcgaacagagtcgtcatctgctacttcggagagggagcagcttcggagggagacgcccacgcggggttcaacttcgccgcgaccctggaatgcccgattatcttcttttgtcgcaacaacggatacgccatctcaaccccaactagcgagcaatacaggggagacggaatcgccgcccgcggcccgggctacggcatcatgtccattcgggtcgatggaaatgatgtgttcgctgtgtacaacgcaactaaagaggcacgcaggcgcgcagtggctgagaaccagccttttttgatcgaagccatgacttacaggatcggtcaccactccacttcggatgacagcagcgcgtaccgttcggtggacgaagtgaattactgggacaagcaggaccaccctatctcacggttgcgccactacctgctgagccaaggatggtgggacgaagaacaagaaaaagcctggcgcaaacagtcgcggcgcaaagtcatggaggcttttgagcaggcggaaaggaaaccgaagcccaacccaaacctgctcttctcagacgtgtaccaggagatgcccgcgcaactgcgtaagcagcaagagtccctcgcccgccatctgcaaacgtacggcgaacattaccccctggatcacttcgacaaa

SEQ ID NO: 14654 - DNA, 1335 bp, Artificial Sequence
  derived and/or modified sequence
atggcagtcgccatagctgcggcaagagtatggcgactaaaccgtggactcagtcaggctgcccttctcttgcttagacagccaggggccaggggcctggccagatcacatcctcccaggcagcaacagcagttttcatccctagatgataagcctcagtttccgggggcatctgctgagtttatagataaacttgagttcatccagcctaatgtcatttcaggaattcccatttaccgagtgatggaccgccagggccagattattaacccaagtgaagacccacacctcccaaaggagaaagtcctgaagctgtacaagtccatgacactcctcaacacaatggatcgtatcctgtacgagtcgcagcggcagggtcgcattagtttctatatgaccaactatggggaggagggcacccacgtgggttcagcagccgctctggacaacactgatctggtttttggccaataccgggaagcaggcgtgttgatgtaccgggattacccactagagctctttatggctcaatgctacggaaatataagtgatcttggcaaagggcggcaaatgccagtgcactatggatgtaaagaacgccacttcgtgacaattagcagcccactggctactcaaattcctcaggccgttggcgccgcttatgctgcaaagcgggccaacgcgaatagagtagtgatttgttattttggcgagggagcagcttctgagggtgatgctcatgcaggcttcaacttcgctgccactttggagtgcccgataatattcttttgtaggaacaatggatatgcaatctcaactccaacctcagagcagtaccgcggcgatggtattgcggcccgcggacccgggtacgggattatgtccataagggtcgacggcaacgatgttttcgcagtgtataatgctaccaaagaggcccggaggagagcagtggctgagaatcagcccttcctgattgaggctatgacctatcgcatcggccaccattctacttctgacgactccagcgcctaccgcagcgtggacgaggtgaactactgggacaagcaggaccatcctatctctaggcttaggcattatctgcttagccaggggtggtgggacgaagagcaagagaaggcctggcgtaagcagtcaaggagaaaggtgatggaagctttcgagcaggctgagaggaaaccaaagccaaatcctaacctcctgttctccgacgtgtaccaggagatgccggcccagctgaggaagcagcaggagagtctcgccaggcacttgcagacctacggagagcactatcccctcgatcacttcgataag

SEQ ID NO: 14655 - DNA, 1335 bp, Artificial Sequence
  derived and/or modified sequence
atggcagtggcaattgcagcagccagagtctggagactgaatagaggcctgtcacaggccgcgcttcttctgctcagacagcccggtgcacggggtttggcaagaagccatccacctcgacagcaacagcaattttcgtcgcttgacgataagccacaatttcctggagcatcggcagaattcattgacaagctggagtttatacagcccaatgtgatttcgggaattccaatttaccgtgtgatggatcggcaagggcagattatcaacccttccgaggaccctcaccttcctaaagaaaaagtgctgaaactgtacaagtccatgaccctgcttaatactatggaccgtatcctttacgaatcgcaacggcagggtcggatttcattttacatgaccaattacggagaagaaggaacccatgtgggttctgcagcagctctcgacaataccgatcttgtgttcggtcagtacagagaagcaggggtgcttatgtaccgcgactatccacttgaactctttatggcacaatgctacggtaacatttcggaccttggtaaggggcgtcaaatgccggtccattatgggtgcaaggagaggcattttgtgaccatctcaagcccactggcaactcaaattccacaggcagtcggggcagcatacgcagcaaagagagctaacgctaaccgggtggtcatatgttacttcggtgagggtgcagcctcagaaggtgacgcacacgcgggtttcaattttgcagcaactctggagtgccccatcatcttcttttgtcggaacaatgggtacgcaatttcaactcccacttcggaacaataccgaggcgacggcattgcggcccgcggaccgggctacggcattatgtccatcagagtggatggaaatgatgtttttgccgtgtataacgccactaaggaagcacggagacgggccgtcgccgagaatcaaccttttctgattgaggcaatgacttacagaataggacatcattccactagcgacgattcctcagcatatcggagcgtggatgaagtcaattactgggataaacaggatcatcctattagtcgcctccgccactacctgctttcccaaggatggtgggacgaagaacaagagaaggcatggcgcaagcaatcccgtagaaaagtcatggaggcgttcgaacaagcagagagaaagcctaagcctaatccaaatctcctgttttcagatgtgtaccaagaaatgcctgcccaacttcgtaagcagcaggaatccctggcacgtcatttgcaaacctacggagagcactaccctctcgaccactttgacaag

SEQ ID NO: 14656 - DNA, 1335 bp, Artificial Sequence
  derived and/or modified sequence
atggccgtggccatagcagccgcccgagtgtggcggctgaaccggggactgtcgcaggcagccctgcttctgcttcggcaaccgggagcccgaggtttggccaggtcgcacccccctcggcagcagcaacagttttccagtctggacgataagccccaattcccgggcgcttcagcggagttcatcgataagctggaattcatccaaccaaacgtcatctcggggattccaatctaccgcgtgatggaccggcaaggacagattatcaatccttcagaagatcctcacctcccaaaagagaaggtgttgaagctctataagtcgatgaccctgctgaatactatggaccggatcctttacgaatcacagagacagggacggatcagcttctacatgaccaattacggagaagaaggcactcacgtgggatcagcggccgccctggacaatactgacctggtctttggacagtacagagaggccggcgtgctgatgtacagggactaccctctggagctctttatggcgcagtgctacggaaacatttcagaccttggaaagggacgccaaatgccagtgcactacggatgtaaggaacggcatttcgtgaccatctcaagcccgctcgcgactcagatcccgcaagctgtaggagcagcctatgcggcaaagcgagcaaacgcgaaccgcgtggtgatctgctacttcggagagggagcggcttcggagggggacgctcatgccggcttcaacttcgcggcaacccttgaatgtcctattatcttcttctgccgcaacaacggctacgcgatctcgacccctacctcggaacagtatagaggagacgggatcgctgcgcgggggccaggctacggtatcatgtccattcgcgtggacggcaacgatgtttttgcagtgtacaacgccaccaaggaggcccggcggcgagcggtggcggaaaaccaaccgttcctgatcgaggctatgacttacaggatcggacaccactccacctcggacgattcctccgcctacagatcggtggatgaagtgaactactgggataaacaggaccatcctatcagccggctcaggcactacctgctttcgcagggatggtgggacgaagagcaggaaaaagcatggagaaagcagagccggcggaaggttatggaggcattcgagcaggcagaacgcaagccgaagcccaatccgaacctgctcttcagcgacgtgtaccaggaaatgccggcccagctccgcaagcagcaagaatccctggcccggcacttgcagacttacggagaacactatcctctcgaccactttgataag

SEQ ID NO: 14657 - DNA, 1335 bp, Artificial Sequence
  derived and/or modified sequence
atggctgtcgccatcgcagcagctcgcgtttggagactcaacagaggcttatcccaggcagccctcttgctcctgcgccagcccggagccagagggctcgcccggtcccacccccctcgccaacagcagcagttcagttccctcgatgataaacctcagtttccaggggcatccgctgaattcatcgataagctggagttcatccagccaaacgtgataagtgggatccctatatatcgggtcatggatcgacaaggccaaatcattaaccccagtgaggatccacacttgccaaaggaaaaggtcttgaagttgtacaagtcaatgactctcctgaacactatggacaggattctctatgagtctcagcggcagggccgtatctctttttacatgaccaactatggagaggagggtacacacgtgggcagcgctgccgcccttgacaataccgacttggttttcgggcaataccgggaagccggcgtgttaatgtacagagattaccctctggagctgttcatggcccagtgttatggcaacatcagtgacttgggcaagggacgccaaatgcctgtacattatggctgtaaagaaagacactttgtcactataagtagtccactcgccacgcagattccacaggccgttggagccgcttacgccgccaaacgcgctaacgccaaccgcgttgttatttgctacttcggggagggcgccgcaagtgagggggacgcccatgccggattcaacttcgctgccacactcgagtgcccaatcattttcttctgtagaaacaacggatacgctatttccacccctacgtccgagcaatatcgaggagacggcatcgcagcgcgtggaccgggctacggaatcatgtctataagagtggacggaaatgacgtttttgctgtttataacgcgacaaaggaggccaggaggcgcgccgtcgctgaaaatcagccatttctgatcgaagccatgacttaccggatcggacaccactccactagtgatgacagtagcgcttaccgcagtgtggatgaagtcaactattgggataaacaggatcatccaatatcgcgacttagacattatttactatcccaagggtggtgggatgaggaacaggagaaggcctggaggaaacagtcacgcagaaaagttatggaagctttcgagcaagcagagcggaaacctaaacctaatccaaacctgctgttctccgatgtgtatcaagaaatgccagctcaattaaggaagcagcaggaaagcctggccaggcacctgcagacctacggggagcattaccccctggaccacttcgataaa

SEQ ID NO: 14658 - DNA, 1335 bp, Artificial Sequence
  derived and/or modified sequence
atggctgtagctattgccgccgccagggtgtggcgactgaacagaggattgagccaagcagcgctgctgctcctgagacagcctggagcgcgcgggctcgctaggtctcacccccccagacaacagcagcagttctcctccctggacgacaaacctcagtttcccggcgccagcgctgaatttatcgataagctggaattcatccaacctaatgtgatttcggggattcctatctatagggttatggaccggcaaggtcagatcattaatcctagcgaggatccccatttgccaaaagagaaggtccttaagctgtacaagagcatgactcttttgaatacaatggatagaattctgtacgagagtcaacggcagggcagaatcagcttctatatgactaattacggagaggagggcacacacgtgggttcagcggccgccctcgataatacagacctggtgtttggtcagtacagagaggccggtgtgttgatgtaccgggattatcctctcgaactgttcatggctcagtgctatggtaatatttcagacctgggaaagggacgacaaatgcccgtgcactacgggtgcaaagagcggcactttgtgaccattagctctccactcgccacccagatccctcaggccgtcggggcggcatacgccgcaaagagagcgaatgctaacagagtggtcatttgctacttcggtgagggagcggccagcgagggagacgctcacgcggggttcaacttcgccgccactctcgagtgtcctattatcttcttttgtcgcaataatgggtatgctataagcacacccacctcagagcaataccggggcgatggcattgccgctcggggccctggttacggaataatgtccatcagggtggatgggaacgatgttttcgccgtttacaatgcgacaaaggaagctcgaaggagagcagtggcggaaaaccaaccctttctcattgaagcaatgacctaccggattggtcatcactcaacaagcgatgacagctctgcctatcgttctgtggatgaagtgaattactgggacaagcaagatcaccctatctctaggctgcgtcactatcttctatcacagggttggtgggatgaagaacaggaaaaggcatggcggaagcagtccaggagaaaggtcatggaggctttcgagcaggctgaaagaaagccgaaacccaatcccaatttgctgtttagcgatgtgtatcaggaaatgccagcccagcttcggaagcagcaggaatctctcgcccggcatttgcagacttatggcgagcactacccgctggatcattttgacaag

SEQ ID NO: 14659 - DNA, 1335 bp, Artificial Sequence
  derived and/or modified sequence
atggcagtagctatcgccgcagcccgggtgtggaggctgaatcgaggactatcacaagcagctctgctcctgctcagacagcccggagcgagaggtcttgcccgctcccaccctccccggcagcagcaacagttcagctctctcgatgataaaccacagtttcccggagcatccgctgaattcatagacaaactcgaattcatccagccaaacgtcatctctggcattcctatctatcgcgtgatggatcggcagggacagatcataaatccctcagaggatcctcacctcccaaaagagaaggttctgaagctgtacaaatctatgacactgttgaacactatggatcgaatcctatatgaaagccaaagacagggccggatctccttctacatgacaaactacggggaggaaggaacacatgtaggctctgcggccgccctcgacaataccgacctcgtattcggtcagtaccgcgaagccggggtactaatgtatcgggattaccccttagaactgttcatggcccagtgttacggcaacatttccgatctgggaaaaggtcggcagatgcctgtgcactatggttgcaaggaacggcattttgtcacgatttcctctcccctggcgacccaaatcccacaagcagtgggtgctgcctatgctgcaaagagagctaatgccaacagagtcgtaatctgctacttcggcgagggcgctgcttccgaaggcgacgcacatgccggttttaactttgctgcaaccctggaatgtccgatcatattcttctgccgtaataacggttacgctatctcaacccccacttctgaacagtaccgcggcgacggtattgcagcacggggcccaggttacgggatcatgtcaatccgggtggacggaaacgacgtgtttgccgtgtacaacgccaccaaagaagcgagacgcagggccgtggccgagaatcagcctttccttatcgaggctatgacctatagaatcggccatcacagcaccagtgatgatagttctgcatataggagcgtcgacgaagtcaattactgggataagcaggatcacccgatcagtcggttgaggcactacctactcagtcaggggtggtgggacgaggagcaagagaaggcgtggcgaaagcagtcaagacggaaggtgatggaggcatttgagcaggcagaacgcaagcccaaacccaaccccaatctgctgttttctgatgtttatcaggaaatgcccgcacagcttcggaaacagcaggagtccttagcgcgtcacctgcagacatacggagaacactacccccttgatcatttcgacaaa

SEQ ID NO: 14660 - DNA, 1335 bp, Artificial Sequence
  derived and/or modified sequence
atggccgtggccatcgcggcagcacgggtgtggcgcctgaacagaggtttgtcacaggccgcgctgctgctcctgagacaaccgggagccagaggacttgctcgctcccatcctccacgtcagcaacagcagttctcgagcctcgatgacaagccacagttcccgggagcgtcagccgaattcattgacaagctcgagttcatccagccgaacgtgatctccggcatccccatctatcgagtaatggataggcagggacaaatcatcaatccatcggaagatccccacctgcccaaggaaaaagtgctcaaactctacaagtcgatgacccttttgaacacgatggaccggatcctgtacgaatcccagaggcaaggaagaatctcgttctacatgaccaattatggagaggagggaacgcacgtcggaagtgcggcggcgttggacaatactgaccttgtgttcggccagtatcgggaggcgggggtcctgatgtatcgcgattaccccctggagctctttatggctcaatgttacggcaatatcagcgaccttggaaagggcagacagatgccagtgcactacggctgcaaagagcggcatttcgtgactatttcgagtccgttggcgactcaaattccacaggccgtcggggcggcttacgcggctaaacgggccaacgccaaccgtgtcgtgatctgctactttggtgagggggcagcgtccgagggtgacgcacacgccggcttcaacttcgctgcaaccctcgaatgcccgatcatctttttctgccgcaacaacggatatgctatttcaaccccaactagcgaacaataccggggagatggcatcgccgcacgcggcccaggatacggtatcatgtctatccgcgtcgatggaaacgacgtgtttgccgtgtacaacgccactaaggaagcacgcaggcgcgctgtagccgagaatcagccctttctgatagaagctatgacctaccgcattggccatcactccacgtccgatgactcgtcggcataccgctcggtggacgaagtgaactactgggataagcaggatcacccgatcagccggctccggcattacctgctgtcgcaagggtggtgggacgaagaacaggaaaaagcctggcgcaagcagagcagacgcaaggttatggaagcgttcgagcaggcggagcgaaagcctaagccgaacccgaatctgttgttcagcgacgtctaccaagagatgcctgcccagcttagaaaacaacaggaatccctggccagacatctgcaaacctacggcgagcactaccctctggaccacttcgacaag

SEQ ID NO: 14661 - DNA, 1335 bp, Artificial Sequence
  derived and/or modified sequence
atggcggtcgccatagccgcagctagagtatggcgattaaacagaggcctctctcaggccgcattgctgttactacgacagcccggggctcgtggcctggcccggtcgcatccacctcgacagcagcagcagtttagtagcctagacgataagccccagttccctggagcctccgctgagttcatcgataaactcgaattcatccaaccaaatgtcataagtgggatccccatttacagggtcatggacaggcagggccaaattatcaatccctccgaggacccccatctacctaaagagaaagttctgaaactctataagtccatgacacttctgaacaccatggaccgaatcttgtacgagagccaaagacaggggcgcatcagcttctatatgacaaattatggagaggagggcacccatgtgggttctgcagctgccctcgataacaccgacctggtttttggacagtatagggaagctggggtcctaatgtatagagactacccactggagttgtttatggcacagtgctacggtaatatctctgacctgggcaagggaaggcagatgccggtgcattacggatgtaaagagaggcacttcgtgaccatttcttcccccctcgcgacgcagattccacaagccgtgggggcagcatatgccgcaaagcgtgctaacgctaaccgagtggtaatctgctactttggagagggggccgcctccgaaggcgacgcacacgcaggctttaacttcgccgccaccctggaatgcccaatcatctttttctgtcgcaacaacgggtacgccatcagcactccgacatccgagcagtataggggagatggcattgcagcgcgagggccgggatatggcatcatgtctatcagggtggacggtaacgacgtgttcgcagtttataacgctacgaaagaagcccgacgccgagctgtggccgaaaaccaacccttccttatcgaagccatgacatacaggataggacaccactctacctcggacgacagtagcgcttatagatcggtcgatgaagttaattactgggataaacaggaccacccaatttcacgattacgacattacctgttgagccaggggtggtgggatgaggaacaggagaaagcttggcgaaaacaaagcaggaggaaggtgatggaggccttcgagcaggcggagcgtaaacctaaacccaaccccaaccttttgtttagtgatgtataccaggagatgccagcccagctgagaaagcaacaggaaagcctggctagacatctgcaaacttacggtgagcactacccgctggaccacttcgacaaa

SEQ ID NO: 14662 - DNA, 1335 bp, Artificial Sequence
  derived and/or modified sequence
atggcagtggccatcgcagcggccagagtttggaggctgaatcgagggctgtcccaggcggccctgcttctactgaggcagccaggcgcaagaggactcgcaaggtctcacccccccagacagcagcagcagtttagctcgctagacgacaaaccacagttccccggggcttccgccgaatttatcgacaagttagaattcattcagcctaatgtgatctccggcatcccgatatatagggtgatggataggcaagggcagatcattaaccctagcgaggacccccatctccctaaggaaaaggtgcttaaattatacaagtctatgaccctactgaacacaatggaccggatcctatacgaatctcagagacagggacgcatctctttttatatgactaactatggtgaggagggtacccacgttggcagtgccgcagctttagataacaccgatctggtgtttggccagtaccgggaggccggggtgctgatgtatcgcgactatcctttagagctcttcatggcgcagtgctacggaaatatttccgatcttgggaaaggccggcagatgcccgttcactatggctgcaaggaaagacatttcgtcactattagttctcctcttgccacacaaattcctcaagctgttggtgctgcatacgccgctaagcgggccaatgccaaccgggtagtgatctgctactttggggagggagcagcatccgaaggtgatgctcacgccggcttcaatttcgcagccacacttgaatgcccaataatcttcttttgcaggaataacggttatgcgatttctaccccaacttccgaacaatatcgtggagacgggatagccgctcgagggcccggctacggcataatgtccataagagtcgacggtaacgatgtgtttgcggtgtataatgctactaaggaagctaggaggcgggccgtggccgaaaatcagccgtttctgatagaagcgatgacttacagaattggacaccactctacttccgatgacagctccgcatataggtctgtggacgaagtcaactattgggataagcaggatcatccgatatcacggctgagacattacctgctttcgcagggatggtgggatgaggagcaggaaaaggcgtggcggaaacagtccaggcggaaggttatggaggccttcgagcaggctgaacggaagcctaaacctaatcctaacctcctgttttctgacgtataccaggagatgcctgcgcagctgcggaaacaacaggagtctctggcacgacacctccagacgtatggggaacattatcctctggatcatttcgataaa

SEQ ID NO: 14663 - DNA, 1335 bp, Artificial Sequence
  derived and/or modified sequence
atggcagtggctattgcagcagccagagtctggcgtctcaatcggggactctcccaggcggcacttctccttctgcgtcaaccaggtgcgcgaggccttgcacgttcgcacccacctaggcaacaacaacagttttcctcgctggacgataaaccccaattccctggcgcatccgctgagttcattgataagctggagttcatccaacctaacgtcattagcggtatccctatttacagagtcatggatcgtcaaggacagattatcaacccgagcgaggatcctcaccttccaaaggaaaaggtactcaagctctacaagtcgatgacgctgttgaataccatggataggatcctttacgagagccaacgccagggacggatctcgttctacatgaccaactacggggaagaaggtactcatgtcggatcggcagccgcccttgataataccgacctcgtgtttggccagtacagagaggcaggcgtgctgatgtacagggactacccacttgaactgttcatggcacagtgctatggaaatatcagcgatcttggaaaaggtcgccagatgccagtccactacggatgtaaagaaaggcattttgtgaccatcagctccccactggcaactcagataccccaggccgtgggagcagcatatgcagctaagagagcaaacgctaatagagtggtgatctgttactttggagaaggagcagcatccgagggtgatgcacatgccggattcaatttcgccgcaacccttgaatgtcctattatcttcttctgcaggaataatggttacgccatttcaacccctacgtccgagcaataccgaggtgacggaattgcagcacgaggccctggctacggaattatgagcatccgcgtggatggcaacgacgtgtttgcagtctacaatgccactaaagaagcgcggcggagagcagtggcagaaaatcaaccttttcttatagaggcaatgacttaccgaataggtcaccattcaacctcggacgatagctcagcgtacagatcggtggacgaagtgaactactgggataagcaagaccatcccatctcaaggctgcgccattacctcctgagccagggatggtgggatgaagaacaagagaaggcgtggcgtaagcaatcgcgacgaaaggtaatggaagcctttgaacaggctgagagaaagcccaagccaaacccaaatcttctgttttccgacgtgtatcaggaaatgccagctcaattgcggaagcaacaagaaagccttgcacgccatctccagacttacggggagcattaccctctggatcactttgataag

SEQ ID NO: 14664 - DNA, 1335 bp, Artificial Sequence
  derived and/or modified sequence
atggccgtggcaatcgcagcagcgcgggtgtggagacttaaccgcggcctttcacaagcagctcttcttctgttgagacaacccggcgcaaggggtcttgcaaggagccatccaccaagacaacagcaacaattctcatcgctggatgataagcctcagttccctggagcgtcagcagagtttattgacaagctcgagtttatccaaccaaacgtgataagcggaattccaatttaccgggtgatggatcgccagggacaaatcatcaacccatcagaggatccacaccttccaaaggaaaaggtgctgaagctgtacaagtccatgactctgcttaataccatggacagaatcctctacgaatcgcagagacagggaaggattagcttttacatgactaactacggagaagaaggaacccatgtaggaagcgctgcagcactggataataccgatttggtgttcgggcaatacagggaggctggggtgctcatgtacagggactatcctctggaactgtttatggcacagtgttatggcaacatcagcgacctggggaagggacggcaaatgccggtgcattatggatgtaaagaaagacatttcgtcaccatcagcagccccctggcaactcaaattccacaggccgtcggagccgcctacgccgcaaagagagctaacgccaacagagtggtcatctgctacttcggagaaggggccgcaagcgagggagatgcccatgcaggatttaacttcgctgcaacccttgaatgtccaatcattttcttttgccgaaacaatgggtacgctatttccacccctacttctgaacagtaccgcggcgatggtatagcagcaaggggccctggatacggaattatgtccattagagtggacggaaacgatgtctttgccgtgtacaatgcaaccaaggaagcgcgcagacgggcagtggccgaaaaccaaccttttctgatcgaggccatgacttaccggattggtcatcattcaacttcggacgactcgtcggcatacaggtcggtcgacgaagtgaactactgggataagcaggatcatccaatttcaagactgcgacattacctgctgtcccagggctggtgggatgaagagcaagaaaaggcatggcggaaacaaagccgacgtaaggtcatggaggcatttgaacaggccgagagaaagcccaagcccaacccaaatcttctttttagcgatgtctatcaagaaatgcccgcacaacttagaaaacagcaggaatcgctcgcaagacatctgcagacctacggtgagcactacccgctggatcatttcgacaag

SEQ ID NO: 14665 - DNA, 1335 bp, Artificial Sequence
  derived and/or modified sequence
atggctgtggcaattgctgctgctagagtttggagattaaatagaggtttatcacaagctgctcttttattgttgagacaaccaggagcaagaggacttgcaagatctcatccaccacgacaacaacaacaattctcatctcttgatgacaaaccacaatttcctggagcttcagctgaattcattgacaaattagaattcatacaacctaatgttattagtggaattccaatttatagagttatggatagacaaggtcaaattattaatccaagtgaagatccacatttaccaaaagaaaaggttttaaagctttataaatcaatgacattattaaatacaatggatcgtattttatatgaaagtcaaagacaagggagaatatcattttatatgactaattatggagaagaaggtacacatgttggatcagcagcagcacttgataatacagatttagtttttggacaatatagagaagctggagttcttatgtatcgtgattatccattagaactattcatggctcaatgttatggaaatattagtgatttaggaaagggaagacaaatgccagttcattatggatgtaaagaaagacatttcgtaacaatatcatctccacttgctacacaaatacctcaagcagttggagcagcatatgctgcaaaaagagctaatgcaaacagagttgttatttgttattttggagaaggagccgcttctgaaggagatgcacatgcaggttttaattttgccgcaactttagaatgtccaattatttttttttgtagaaataatggatatgcaataagtacaccaacaagtgaacaatatagaggggacggtattgctgcaagaggtccaggatatggaattatgtctattagagttgatggaaatgatgtattcgctgtttataatgcaactaaagaagcaagaagaagagcagttgcagaaaatcaaccatttcttattgaagctatgacctatagaattggacatcatagtactagtgatgattctagtgcttatcgatctgttgatgaagtaaactattgggataaacaagatcatccaattagtcgattaagacattatcttttgtcacaaggttggtgggatgaagaacaagaaaaggcatggagaaaacaatcacgtagaaaagttatggaagctttcgaacaagcagaacgaaaacctaaaccaaatccaaatttactctttagtgatgtatatcaagaaatgccagctcaattaagaaaacaacaagaatcacttgctagacatcttcaaacatatggagaacattatccattagatcattttgacaag

SEQ ID NO: 14666 - DNA, 1335 bp, Artificial Sequence
  derived and/or modified sequence
atggccgtggctatcgcagcagccagagtctggaggctgaataggggactctcgcaggccgctctgctgctgctccggcaacctggcgcccgcggtttggcacgatcccacccgccacgccagcaacagcaattcagctcactcgacgacaaaccacagtttcctggcgcctccgccgagtttattgataagctggaatttatccaacctaacgtgatcagcggaatccctatctatagggtcatggatcgccagggacagataatcaacccgtctgaggacccccatctgccaaaggagaaagtgttgaaactgtacaagtcgatgacgctcctcaataccatggaccggattctgtacgagtcacagcgccaggggaggatctccttctacatgactaattacggagaagaggggacccatgttggctccgcagctgctctggataacactgacctggtgttcggacagtaccgggaggccggagtcctcatgtaccgcgattatccacttgaactgttcatggcccagtgctacggcaatatctccgaccttggaaagggccgccaaatgcccgtgcactacggatgtaaggagagacacttcgtcaccatctcctcacctcttgccacccaaatcccgcaggctgtcggcgctgcctacgctgccaagcgggctaatgccaaccgcgtggtcatctgctacttcggtgagggtgcggcctctgaaggagacgcacacgcgggattcaattttgcagcaaccctcgaatgcccgatcatcttcttctgccgtaacaacgggtacgctatttcgaccccgacttctgagcagtacagaggagatggaatcgccgccagagggccaggctacggcatcatgtccattagagtggatgggaacgacgtattcgccgtgtacaatgcgactaaagaagcgcggcgacgcgcggtggcagaaaaccagccgttccttatcgaggctatgacctacagaataggacaccacagcaccagcgacgactcgtcagcgtacaggtctgttgacgaagtcaactactgggacaagcaggaccatccgatctctcggctgcgccactacctgctctcacagggatggtgggacgaggagcaagaaaaggcctggcggaaacagtcgaggcgcaaggtcatggaggccttcgaacaggccgagcgcaagccgaagccaaatccaaacctgctgttcagcgatgtgtatcaagagatgccggcccagctgagaaaacaacaagagtcgctcgcgcggcacctccagacgtacggagagcattacccccttgaccacttcgataag

SEQ ID NO: 14667 - DNA, 1335 bp, Artificial Sequence
  derived and/or modified sequence
atggcagtggcaattgccgccgctagggtctggagactgaacaggggcttgtcacaggccgcccttctgctcctgcggcagccaggtgcacgggggctggcacgctcccatccgcctagacaacaacaacaattctcgtccctcgatgataagccacaatttccgggagcatcggcggagtttatcgataagttggaattcatccagcccaatgttatttcgggaattccaatataccgtgtgatggacaggcaggggcaaatcattaatccttcggaggacccgcatctgcctaaggaaaaggtgcttaaactttacaagtccatgactctcctgaatacgatggatagaattttgtacgagtctcaaagacaaggaaggatatcgttttacatgactaactacggagaggaaggaacccacgtgggaagcgccgcagcactggacaacaccgatcttgtgtttggacagtacagagaggcaggagtgctgatgtaccgagactatcccctggaactcttcatggcgcagtgctacggaaacatctccgatcttgggaagggccgccaaatgccagtgcactacggctgtaaggagcgacattttgtcactatctcatcaccgctggcaacccaaattcctcaagcggttggcgcagcttacgctgcaaaacgcgcgaacgctaacagggtggtgatttgttacttcggagagggggcggcctccgaaggagatgcccatgcaggtttcaatttcgcagccactcttgagtgcccaatcatctttttctgccgcaataacggttacgcaatttccacccccacctcggagcaataccgtggtgacggaattgcagccaggggacctgggtacggaattatgtcaattcgggtggatggtaacgatgttttcgcagtgtacaacgccaccaaggaagcaagacggcgggcagtggcagaaaatcaaccatttctgatcgaggcaatgacttatcgaatcggacatcatagcacgagcgatgattcctccgcgtacagaagcgttgatgaagtgaactactgggacaagcaagatcacccgatctcaagactgagacattacttgctgagccagggttggtgggacgaggaacaggagaaggcttggcgtaagcaatcccgacgtaaggtgatggaagcattcgagcaggccgagcgaaaacctaagcctaatccaaacctgctgttttcggatgtctaccaggaaatgcctgcccagcttagaaagcagcaagaatcacttgcgagacacttgcagacctacggagaacattatccccttgaccatttcgacaaa

SEQ ID NO: 14668 - DNA, 1335 bp, Artificial Sequence
  derived and/or modified sequence
atggccgtggcaatcgcggccgcaagggtgtggagactgaataggggtctgagccaggctgccctgctgctgttgagacagccaggagcacgcggcctggcccggtcacaccccccaagacaacaacaacagttctcgtcgcttgacgataaaccgcagttcccaggagccagcgcggaattcatcgacaaattggagttcatccagccgaacgtgatctcgggaatccctatctaccgcgttatggacaggcaaggccagatcatcaatccgtcggaggacccgcatttgccgaaggagaaagtgctcaaattgtacaagagcatgaccctcctcaacactatggaccggattctctatgaaagccaacggcaaggacgtatctccttctacatgaccaattacggagaggaagggacgcacgtggggtcggctgcggccctcgataataccgacctcgtctttggccagtaccgcgaggctggagtgctcatgtaccgcgattaccctctggagctgttcatggcgcaatgttacgggaacatctctgatcttggtaagggacgacaaatgccagtgcactacggatgcaaggaaagacacttcgtcacgatttcctcccccctggccacccagatccctcaggcggtgggggcggcctacgcggctaagcgggcaaacgcaaatagagtggtcatttgctactttggagagggagccgcctctgaaggggacgcgcatgccggctttaatttcgctgctactctcgagtgccctatcattttcttctgccgcaacaacggatacgctatctcaactccgaccagcgaacaataccgcggcgacggaatcgccgcacggggaccaggatacggtattatgtcgatcagggttgatggtaatgacgtgttcgcagtgtacaacgccaccaaggaggctcgccgccgcgccgtggcggagaaccagccgtttctgatcgaagcaatgacctaccggatcggccatcacagcacttcagatgactcatccgcctatagatccgtggacgaggtcaactactgggataagcaggatcaccccatctcgcgactgcggcattacctgctgtcccagggctggtgggacgaagagcaggaaaaagcctggcggaagcagtcccgccggaaggtcatggaagcattcgaacaggcggaaagaaaaccaaagccgaacccgaacctgctgttctcggacgtctaccaggaaatgcctgcccaactccgcaagcagcaagaatcacttgcccggcacctgcagacttatggagaacactacccgctggaccattttgataag

SEQ ID NO: 14669 - DNA, 1335 bp, Artificial Sequence
  derived and/or modified sequence
atggctgtcgcgattgctgctgcccgagtgtggcgcctcaaccgcgggttgtcccaggctgcgttgctgctgctccgccagcccggagcccggggtcttgctcgtagccatcctcctcgccagcagcagcagttcagtagtctggacgataagcctcaattccccggcgccagtgccgagttcatagataagctggagtttatccagcccaacgtcatcagcggcatccctatttaccgtgtcatggaccgccaaggtcagattattaacccttctgaggacccgcacctccctaaggagaaggttctgaagctctacaagtccatgaccctgcttaacactatggaccgcattctctacgagagtcaacgtcaggggcgcatctcgttctacatgaccaattacggcgaggaaggaactcacgtcgggtctgccgctgctcttgataacacggacctagtcttcggtcagtaccgggaagccggcgtgctgatgtaccgcgactaccctttggagctctttatggctcaatgctacggcaacatttctgacttgggaaagggccgtcagatgcccgtccattacggctgtaaagagcgccatttcgttactatttcttcgcctctggcgacccaaattcctcaggctgttggtgcggcctacgctgctaagcgcgctaacgctaatcgcgttgttatctgctacttcggcgaaggcgcagcttctgaaggtgatgctcacgcaggcttcaatttcgccgcaaccttggaatgccccatcatttttttctgtcggaataatggttacgccatctcgacaccgacgtctgagcagtaccgtggcgacggtatcgccgcccgcggcccgggctatggcatcatgtccatccgtgtcgacggcaacgacgttttcgctgtctacaacgcaactaaggaggctcgccgtcgcgccgtcgccgagaatcagccctttctcatcgaggctatgacctaccgcattggccaccactctacctccgacgatagttcggcttacaggagcgtcgacgaggtgaattattgggataagcaggaccacccgatcagccgactccgccactaccttttgtcgcagggatggtgggacgaagagcaggagaaggcctggcgcaagcaaagtaggcggaaagtgatggaggcctttgagcaggccgaacgtaagcctaagccaaatccgaacttgcttttctctgatgtttaccaggagatgcccgcgcagttgcgcaagcagcaggaaagcctcgcccggcacttgcagacttacggcgagcactacccgctcgatcacttcgacaag

SEQ ID NO: 14670 - DNA, 1335 bp, Artificial Sequence
  derived and/or modified sequence
atggctgtcgctatcgcagccgctcgggtgtggaggctcaacagaggcttaagccaagccgccttgcttctgctccgccagcctggtgctaggggcctcgctagaagccacccaccacgccagcaacaacaattctcctctctggatgataagcctcagtttccaggggccagtgctgaatttatcgataagctggagttcattcagccaaacgtgatctctggcatccccatctaccgggtgatggatagacagggccaaatcatcaacccatcagaggatcctcatctgcccaaggagaaggtactgaaactgtataagagtatgaccctgctgaacactatggaccgaatactgtatgaatctcaaagacaagggcggatctctttttacatgacgaactacggggaggaaggaacacacgtgggcagcgctgcagctttggataacaccgatctcgtcttcggccagtatagagaagcaggagtattaatgtacagggattatcccctggagctgttcatggctcagtgctatgggaacatcagcgatttaggtaagggtagacagatgccagtgcattatggatgtaaggaaaggcattttgtcactatctcgtctccgctggctacacagatcccacaggctgtaggtgctgcgtatgctgcaaagcgcgcaaacgcaaacagggttgtcatctgctattttggagagggtgctgcttccgaaggcgacgcccatgccgggtttaatttcgctgcaactttggagtgcccaattatttttttttgtagaaacaatggctacgccatttctacccccacttctgagcagtatcgaggggatggcattgccgccagggggccaggctacggaataatgagcatacgcgtcgatggtaacgacgtgttcgcggtctacaacgcgaccaaggaggcgcggcgtagagccgtggctgagaaccagccttttctgatcgaagctatgacatacagaatcggtcaccatagcactagcgatgattccagcgcctatagatccgtggacgaggtgaattattgggataagcaggatcaccccattagcaggctgcgccattatttgctcagccaaggttggtgggatgaagagcaggaaaaggcctggaggaaacagtctaggcggaaggtgatggaagccttcgaacaagcagaacgcaaacctaagcccaacccaaaccttctatttagcgatgtctaccaggagatgccagctcagcttcggaaacagcaggaaagtctcgccaggcacctccaaacttatggtgaacattaccccctggaccattttgataag

SEQ ID NO: 14671 - DNA, 1335 bp, Artificial Sequence
  derived and/or modified sequence
atggccgtggccatcgctgcagcgcgggtgtggaggctgaaccgaggcctgtcccaggctgcattgctgttgctgagacagccaggtgccagggggctcgccaggtcccatccaccccgccaacaacagcagttcagttcactggacgataaaccccagttccccggcgcctcagcagaattcattgataagcttgagtttattcaaccaaatgtgatctccgggatccccatatatcgagtaatggatagacagggccagataatcaaccccagcgaagacccccatctgcccaaggagaaagtgctcaagctgtacaagtctatgaccctgctgaacacaatggatcgaatcctgtacgagtctcagagacaggggcggattagtttctacatgactaattacggagaggagggcacgcacgtaggctctgccgcggctctggataatactgacctcgtgttcggccagtatcgagaggccggggtcctgatgtaccgagattacccactggaactgtttatggcacagtgctatggcaacatttctgatctgggaaagggtcggcagatgcctgtgcactacggctgtaaggagcgccattttgtgaccatcagcagtcccctggccactcagattcctcaggcagtcggggcggcttacgctgcgaagagggcgaatgctaatagagtggtcatctgttatttcggcgaaggagccgcaagcgagggggacgcccacgccggcttcaatttcgccgctacattggaatgcccaattatctttttttgcagaaataacggttatgcgatatctactccaaccagcgaacagtatagaggcgacggcatagctgcacgcggtcctggctacgggatcatgtccatcagggtggacgggaatgacgtgtttgccgtgtacaatgctacaaaagaagcgcggagacgggccgtggcggagaaccaaccattcctgatcgaggccatgacttacaggataggacaccattctacctctgacgacagcagtgcttataggagtgtcgatgaagtcaactactgggacaagcaagatcatccaatttctcgcctgcgccattacctgctcagtcagggttggtgggacgaggaacaagagaaggcctggagaaaacagagccgccgaaaggtgatggaggcttttgagcaggccgaacggaagccgaagccaaatcccaacctcctgttctccgatgtatatcaggagatgcccgcccagttgaggaagcaacaggagagcctggctcggcatcttcaaacctatggggagcattatcccctggaccacttcgacaaa

SEQ ID NO: 14672 - DNA, 1335 bp, Artificial Sequence
  derived and/or modified sequence
atggcggtggctatagctgccgccagagtttggaggcttaaccgcggattgagtcaggcagcactcttgctgttacgacagccaggcgctaggggcctggccagaagccaccctcctaggcagcaacaacagttttccagccttgatgacaagccacagttccctggagcctcggctgagttcattgacaaattggaatttatacagcctaatgtcatctctgggatcccaatctatcgagtgatggaccgtcagggacaaatcatcaacccaagcgaggacccacacttaccaaaggagaaggtgctgaagctctataagtcaatgaccttgctgaatacaatggaccgcatcctctacgagtctcagaggcagggccggatctcattctatatgacaaactatggagaggaaggaacccatgtggggagcgcagcagctttggacaacaccgacctggtattcggtcagtacagggaggccggagtccttatgtatcgagattatccccttgaattgtttatggcccagtgctacggaaacatctctgacctcggcaaaggcagacaaatgccagtccactacggctgtaaagagaggcactttgtgacaatttccagccctctggcgactcagattccacaggctgttggcgcggcttatgcagcaaagcgagcgaacgctaacagagttgtcatttgctatttcggagaaggagctgcatcagaaggcgacgcacacgccggattcaatttcgctgctaccctcgaatgccccatcatttttttctgtaggaataacggctatgccatctccactccaacaagcgagcagtaccgtggagatgggatcgctgcacgcggccctggctatggcatcatgtcaattagagtggatggtaacgacgtgtttgcagtttacaatgcaaccaaagaggcccgccgaagggctgtcgctgaaaaccaaccattcctgatagaagctatgacttatagaattgggcatcactccaccagtgatgacagcagcgcttacagaagcgttgatgaggtgaactattgggacaagcaagatcatccaatcagccggctgaggcattacttgctcagccaaggctggtgggatgaggaacaagaaaaagcatggcgaaaacagagtcgaagaaaggtcatggaggcattcgaacaggctgaacgtaagccaaaaccaaacccaaatctgctgtttagcgacgtgtatcaggaaatgcccgcacagcttaggaaacagcaggagtccctcgcccgccatcttcaaacctacggagagcattaccctcttgatcatttcgataag

SEQ ID NO: 14673 - DNA, 1335 bp, Artificial Sequence
  derived and/or modified sequence
atggccgtggcaatcgccgccgctcgcgtctggagattgaatagaggactgagccaagcagcactcctgctgctgcggcagccgggtgcaaggggactggcacgaagccacccgccacgccagcaacaacaattctcgtcactggacgacaagccgcagttcccaggggctagcgcggagttcatcgacaagctggaattcatccagccaaatgtcatctcgggaataccgatctaccgggtgatggaccggcagggacagattatcaacccgtcagaggacccccacctgccaaaggagaaggttctgaaactgtacaagtccatgactctgctgaacaccatggatcggatcctttacgagtcgcaaagacagggccgcatatccttctacatgactaactatggagaagaaggaactcatgtcgggtcggctgcggcgctcgataatacggacctcgtttttggacagtaccgggaagcgggcgtgctgatgtacagagactacccactggaactgttcatggcccagtgctacggcaacatcagcgatctcggaaaaggccggcagatgccagtccattacggatgcaaggaacgacatttcgtcactatttcgtcacccctcgccacgcagatcccgcaagcggtgggggcagcctacgcggccaagagagcaaatgcaaaccgcgttgtcatttgctacttcggcgaaggggcggcctctgagggagacgcccacgctgggtttaacttcgcagcaactctggaatgtcccatcatcttcttttgcagaaacaatgggtacgctatctcgaccccgacctcagagcaataccggggagacggaatcgccgcgcgcgggcccggatacggtatcatgtccatcagggtggacggcaatgatgtgtttgctgtctacaatgccactaaagaagcccggcgcagggcggttgcggaaaaccagcctttcttgatcgaggcgatgacttacaggatcggacaccacagcacctcagacgatagctcagcctatcgttccgtggacgaggtcaactattgggacaaacaggaccacccgatctcgcggttgcgacactaccttctctcacagggatggtgggacgaagaacaggaaaaggcatggcgcaagcaatcgagacggaaggtcatggaggctttcgagcaggcggaaaggaagccgaagccgaaccccaacctcttgttctcagatgtctaccaggagatgccagcccagctgcggaaacagcaagagtcccttgcgcgccatctccaaacttacggggagcactatcctttggatcatttcgataaa

SEQ ID NO: 14674 - DNA, 1335 bp, Artificial Sequence
  derived and/or modified sequence
atggcggttgcgatagcggcggcgcgagtatggcgtttaaatcgtggtctatcgcaagcggcgttactactactacgacaaccgggtgcgcgtggtttagcgcgatcgcatccgccgcgtcaacaacaacaattttcgtcgttagatgataaaccgcaatttccgggtgcgtcggcggaatttatagataaattagaatttatacaaccgaatgtaatatcgggtataccgatatatcgagtaatggatcgacaaggtcaaataataaatccgtcggaagatccgcatttaccgaaagaaaaagtattaaaactatataaatcgatgacgctactaaatacgatggatcgtatactatatgaatcgcaacgtcaaggtcgtatatcgttttatatgacgaattatggtgaagaaggtacgcatgtaggttcggcggcggcgttagataatacggatctagtttttggtcaatatcgagaagcgggtgttttaatgtatcgtgattatccgctagaattatttatggcgcaatgttatggtaatatatcggatctaggtaaaggtcgacaaatgccggttcattatggttgtaaagaacgacattttgttacgatatcgtcgccgctagcgacgcaaataccgcaagcggtaggtgcggcgtatgcggcgaaacgtgcgaatgcgaatcgagttgtaatatgttattttggtgaaggtgcggcgtcggaaggtgatgcgcatgcgggttttaattttgcggcgacgctagaatgtccgataatatttttttgtcgaaataatggttatgcgatatcgacgccgacgtcggaacaatatcgtggtgatggtatagcggcgcgtggtccgggttatggtataatgtcgatacgtgttgatggtaatgatgtttttgcggtttataatgcgacgaaagaagcgcgtcgtcgagcggttgcggaaaatcaaccgtttttaatagaagcgatgacgtatcgaataggtcatcattcgacgtcggatgattcgtcggcgtatcgttcggttgatgaagtaaattattgggataaacaagatcatccgatatcgcgtttacgtcattatttattatcgcaaggttggtgggatgaagaacaagaaaaagcgtggcgtaaacaatcgcgacgaaaagtaatggaagcgtttgaacaagcggaacgaaaaccgaaaccgaatccgaatttattattttcggatgtatatcaagaaatgccggcgcaattacgaaaacaacaagaatcgctagcgcgacatctacaaacgtatggtgaacattatccgctagatcattttgataaa

SEQ ID NO: 14675 - DNA, 1335 bp, Artificial Sequence
  derived and/or modified sequence
atggcggtggccatcgcggccgcaagagtctggaggctgaaccggggcctgagccaagccgcactcctgctgttgcgccagcccggtgctcgaggacttgcgcggtcgcaccctccccgtcagcaacaacaattttcctcccttgacgataagccacagtttcctggggcatccgccgagttcatcgataaactggaattcatccaaccaaatgtgatttcgggtatccctatttaccgggtaatggacagacagggccaaatcattaaccctagcgaggatccgcatttgccaaaggagaaggtcctcaagctgtacaaatccatgactctcctcaacactatggatcgcatcctgtacgagagccaaaggcagggacgtattagcttctacatgactaattacggcgaagaaggaactcatgttggtagcgcagcagcccttgataatacggaccttgtctttggacagtatagagaagcaggcgtgttgatgtaccgggactaccctctggaactctttatggctcaatgttacgggaacatctctgatcttggaaaaggacggcaaatgccagtgcactacggttgtaaggaacgtcattttgtcaccattagctccccactcgcaacccaaatacctcaagccgtgggagcagcgtacgcagcgaaacgggcaaatgcaaatcgagtggtgatctgttatttcggagaaggagccgcttcggaaggagacgcacatgcaggatttaactttgcggccaccctggaatgccctatcatattcttctgccggaacaacggttatgcgatatcgacccccacgtctgaacaataccggggtgacggaattgccgcacggggaccaggctacggtataatgtccattcgtgtggatggcaacgacgtctttgcagtgtacaatgcaacgaaggaagctcgtcgccgggcagtggccgagaaccaaccatttcttattgaggccatgacctacagaattggccatcattccacttcagatgatagctcagcataccgtagcgtggacgaggtgaattactgggataagcaagatcacccaatctcgcggcttaggcactacctgctgtcgcagggttggtgggacgaagaacaagaaaaggcatggcggaagcaatctcgaagaaaagtcatggaagcatttgagcaggctgaacgaaaacccaagcctaacccaaaccttctttttagcgacgtgtaccaagaaatgcctgcacaacttcgcaaacaacaggaaagcctcgccagacacttgcagacctatggggagcattatccacttgatcatttcgataag

SEQ ID NO: 14676 - DNA, 1335 bp, Artificial Sequence
  derived and/or modified sequence
atggcggttgccatagcggccgcaagggtctggagactgaacagaggtctgagccaagcggccctgctcctgctgaggcagccgggagccagagggcttgcccgatcgcacccacctaggcagcagcaacaattcagctccttggacgataagccccaattcccgggtgcaagtgcggaattcatagacaaactggagttcatccaacccaatgtcatctcggggattccgatctaccgagtgatggatcggcagggccagattatcaacccctcggaagatccccaccttccgaaggaaaaagtgttgaagctgtacaagtcgatgaccttgcttaacacgatggacagaatcctgtatgagtcgcagcggcaaggcagaatctcattttacatgacgaattacggagaagagggaacccacgtgggatccgccgcagcacttgataacactgacctcgtgttcggacaataccgggaagctggagtgctgatgtaccgcgactacccgttggagctgttcatggctcagtgctacgggaatatctcagatctggggaagggccgccagatgccagtgcattacggttgtaaggagagacacttcgttacgatctcgtccccgctggccactcagatcccacaggcggtgggagccgcctatgcggcgaaacgcgccaatgctaaccgggtcgtcatttgctattttggcgaaggagccgcatcggagggagacgcacatgccggattcaatttcgctgccaccctggagtgcccgatcatcttcttctgccggaacaacgggtacgcgatcagtactcctacctcggaacaataccgcggagacggaatcgccgcccggggcccaggttacggcatcatgtcaattcgggtggacggcaatgacgtgttcgccgtgtataacgccactaaggaagcaaggaggcgggcagtggccgaaaaccagcccttcctcatcgaagccatgacttaccggatcggacatcattcaacctcagatgatagctccgcctaccgctcggtcgatgaagtcaactattgggacaagcaggaccacccaatttcacgcctccgacactacctgctcagccagggctggtgggacgaggagcaagagaaggcctggcgcaagcagtccaggcgcaaggtgatggaggcatttgaacaggcagaacgcaaaccgaagccaaacccaaatctcctcttttcagacgtgtaccaggaaatgcccgcgcagcttcgcaaacagcaggaatcactcgcacggcacctccaaacttacggggagcactacccactggaccatttcgacaag

SEQ ID NO: 14677 - DNA, 1335 bp, Artificial Sequence
  derived and/or modified sequence
atggctgtggcaattgctgcagcacgtgtctggcgtttgaatcgggggttatcgcaagctgccttgttgctccttcgacagcctggagctagaggccttgccagatcccacccgccacgacaacaacaacaattttcgtccctggatgataaacctcaattcccaggagcttctgccgagttcatcgacaagcttgagttcattcaaccaaatgtaatctctggcataccaatttatcgagttatggatcgtcaaggacaaattattaatccatctgaagacccacatcttcctaaagagaaggttttgaagctttataaatctatgaccctgttgaacaccatggatagaatactctacgaatcccagaggcagggtagaatcagtttctatatgacgaactatggagaggaaggtacgcacgtgggaagtgcagctgcgttggataacacggatctagtctttggccaatatagggaggcgggtgttcttatgtatcgagattatccacttgaactcttcatggcacaatgctatggaaacatctctgatctcggaaaaggaagacaaatgcccgtgcactatggttgcaaagagcgtcatttcgtgactatctcatcgcccttagcaactcagattccacaagctgtaggtgctgcctatgctgcaaagagggcaaatgcaaatagagtggttatctgttattttggagagggcgccgcaagtgagggagatgcccacgcgggcttcaatttcgccgccacactggaatgtcctattatttttttctgtcgtaacaatggttatgctatttcaacgccaacctctgaacaatatagaggcgacggtatagccgcccgcggaccaggttatggaatcatgagcattcgcgtcgatggaaatgatgtttttgctgtttacaatgcaactaaagaagctcgaagacgggctgttgcagaaaatcagccattcctgatcgaagcgatgacatacagaatagggcatcacagtacttctgacgacagttctgcataccgctccgtagatgaggttaactactgggacaaacaggatcatccaatatccagactccgtcactacttgctcagtcaaggatggtgggacgaagagcaagagaaagcgtggaggaaacaatcgcgacgtaaagttatggaagctttcgagcaggctgaacgaaaaccaaagccaaaccctaacctattattctctgatgtttaccaggagatgcctgcacaattgcgaaagcaacaagaaagcttggcacgccaccttcagacgtatggagaacactatccattggatcactttgataag

SEQ ID NO: 14678 - DNA, 1335 bp, Artificial Sequence
  derived and/or modified sequence
atggcggtggcaatcgcagccgcaagagtttggcgtctgaacagagggctgagccaagccgcacttctgctgctgaggcagccaggagcacggggtctggcccggtcgcatcccccgcgacagcaacaacagttttcctcactggacgacaagccacaattcccgggtgcctccgcagagttcatagataagctcgagtttatccaaccaaacgtcatttcgggcattcccatttacagagtgatggatcgacaaggacagatcattaacccttccgaagatccacatctgccgaaagaaaaggtgctgaaactttacaagtcgatgaccctgcttaacactatggatcgaattctctacgaatcgcagagacaagggcggatttcgttctatatgaccaattacggtgaagagggcacccacgttggttcagccgcagccctggacaacaccgatcttgtctttggacaatacagagaagcaggagtccttatgtacagagactaccctttggagctgtttatggcacagtgttacggaaacatttcagatctgggaaaaggtcgacagatgccggtgcactacggatgcaaagagcggcattttgtgacgatctcgtcccctctcgccactcagatcccacaggcagtcggggcagcatacgctgccaagcgcgctaacgcgaatcgagtggtcatttgttactttggcgaaggtgcagccagcgaaggggatgcacatgcaggtttcaactttgcggccacccttgagtgccctatcatcttcttttgccgcaacaacggatacgccatttcgactcctacctcggaacaataccggggagatggaatcgcagcgagaggcccagggtacggaattatgtcgattagagtggatggaaacgacgtgtttgccgtctacaatgcgacgaaagaagcccgcagaagagcagtggctgaaaaccaacccttcctgattgaggcgatgacctaccgcatcggacaccattcaacctcggacgacagctcagcttacagaagcgttgatgaagtgaactactgggacaaacaagatcacccaatttcgaggcttagacattacctcctttcacaaggctggtgggatgaagaacaggaaaaggcgtggagaaagcagtcaagacgaaaagtgatggaggcgtttgaacaagcagaaagaaaacccaaacctaatcccaacctgcttttttcagatgtctaccaggaaatgcctgcccaactcagaaagcagcaggagagcttggcaaggcatcttcagacttacggcgagcactacccactggaccactttgacaaa

SEQ ID NO: 14679 - DNA, 1335 bp, Artificial Sequence
  derived and/or modified sequence
atggccgtggctattgccgcagctagggtttggcgacttaacaggggactttctcaggcggcactcctcctccttaggcagcccggggcgcgaggactcgcccgatcccaccctccacgacagcaacaacaattctcatccctagatgataaaccccagtttcccggggcctctgctgaatttatcgataagctggaattcatccaaccaaatgtgatctcaggaatccctatctatcgggtaatggatcgtcaggggcagataatcaaccctagtgaagacccccacctgcccaaggaaaaggtgctgaagctatataagtcaatgactctactgaacactatggacaggatcctgtatgaaagccagcgacaagggcgtatctcattttatatgacaaattacggggaagaaggcacccatgttggctcagccgcagcactcgataacacagacctcgtgttcgggcaatacagagaggcaggggtgcttatgtaccgcgattaccccctggagctcttcatggcccagtgttatggcaacatcagtgacctcggaaaagggaggcagatgccagtgcactatggatgtaaggagaggcactttgtgacgatctcatcccccttggccacccagataccacaggcagtgggtgctgcctatgcagctaagcgggcgaacgctaaccgagtggttatctgttattttggcgaaggagctgcctctgagggagatgctcacgccggtttcaacttcgctgccacactcgagtgtcccataatcttcttttgtagaaataacggttatgctatttccacacccactagcgagcagtatagaggggatggcatcgcagcaagaggacccggatacggaataatgagtattagggtggacggcaacgacgtgtttgctgtttacaacgccaccaaagaagcacgaaggagggcggtagctgagaaccaaccctttctgattgaggcgatgacctatcgtatcggccaccattctacaagcgacgacagctccgcctaccgaagtgtggacgaggttaactattgggataagcaggaccaccccatcagtaggctgcgacactatctcttgtcccagggctggtgggatgaagagcaagaaaaagcctggaggaaacagtccagaaggaaagtgatggaggcatttgaacaggccgagagaaaacccaagcccaatccaaacttactgttcagcgatgtctaccaggagatgcccgctcaactgaggaagcagcaagaatctcttgccagacacttgcagacctacggcgaacactaccctctagatcatttcgataaa

SEQ ID NO: 14680 - DNA, 1335 bp, Artificial Sequence
  derived and/or modified sequence
atggcagtggcgattgccgccgcacgggtgtggagactgaatcgaggcttgagccaagctgcgttgctgctgctgcgccagcctggcgcccggggtttggcccgttcccatccccccagacagcaacagcagttttcaagtttggacgacaagccacagttcccgggggcttccgccgaatttatagacaagctggaatttatacagccgaacgtgatatctggcattcccatctaccgtgttatggatcgccagggtcagattattaacccatctgaagacccccacctgccgaaagaaaaagttctgaagctgtataagagcatgacgctgttgaatactatggaccgcattctttatgaatcgcaacgtcagggaaggatttccttctacatgactaattacggtgaagagggaacccatgtcgggagcgcagcggcactggacaatacggatctggtgtttggccaatatcgggaggctggcgtccttatgtaccgcgactatccgctagagcttttcatggcccagtgctatggaaacatttcagacctcggcaagggccgccagatgcccgttcattatggttgcaaggagagacactttgtcacgatctccagtccactggccacgcagatcccccaggccgtcggcgccgcttacgcagcgaagcgggccaatgccaacagggttgtgatatgctattttggtgagggcgcagcatcagagggcgacgctcatgctggatttaactttgctgctacattggagtgtcccattatcttcttctgccggaataacgggtacgccataagcacgccgacatccgaacagtacaggggcgacggaatagcagcacgcgggcctgggtatggcattatgtcaatccgagttgatggaaacgacgtattcgccgtgtataatgcaacaaaggaagctcgccgtagagccgtcgctgagaaccagccattcctaatagaggcgatgacttaccgaatcggacatcatagtacgtcagacgactcctcggcctaccgaagcgtggatgaggtgaactactgggacaaacaggaccaccctattagcagacttcgccactatctccttagccagggttggtgggatgaggaacaggaaaaagcctggcggaaacagtcacggcgtaaagttatggaggcctttgagcaggcggagaggaagcctaagcctaacccaaacctcctattcagtgacgtatatcaggagatgcctgcccagcttcggaagcagcaagagagcctggccaggcacctgcagacgtacggggaacattatcctctggatcatttcgacaaa

SEQ ID NO: 14681 - DNA, 1335 bp, Artificial Sequence
  derived and/or modified sequence
atggcggtcgcaatcgctgcggcccgggtgtggaggctcaaccgcggcctctcgcaggctgcgctgttgctgctgcgccagccaggagcaaggggactggcgcggagccatccaccgcggcagcaacaacagttttcgagcctcgacgataagcctcaattcccgggcgccagcgccgagttcatcgacaagctggaattcatccagccaaacgtcatctcggggatccctatctacagggtcatggaccggcaaggacagatcatcaacccgtcggaggacccgcacctgccgaaggagaaggtccttaagctgtacaagtccatgactttgcttaacactatggacaggatcctctacgagtcacaaagacagggccgcatctcgttttacatgaccaactacggagaagaaggaactcacgtgggatccgcggcagcgctcgacaataccgatctcgtgtttggacaataccgcgaagctggcgtgctcatgtaccgcgattatcctctcgaattgttcatggcacagtgctacgggaacatctccgatcttggtaaggggagacagatgcctgtgcactacggatgtaaggaacggcactttgtgacgatctcatccccgttggccacgcaaatccctcaggctgtcggcgccgcttacgccgctaagcgggcaaacgccaaccgagtggttatctgctacttcggagagggagcggcaagcgagggagatgcacacgcgggctttaacttcgcggctaccctcgagtgccctatcatcttcttctgccgcaacaatggctacgccatctcaactccgaccagcgaacagtaccgcggagacggtatcgctgcaagaggcccgggctatgggatcatgagcatcagagtggacggaaacgatgtgttcgccgtatacaacgcaacgaaggaggcccgacggagggcagtggcagagaaccagccgttcctgatcgaggccatgacttaccgcatcggccaccattcaacttccgacgacagctcagcctaccggtccgtggacgaggtgaattactgggacaaacaagaccatccaatcagccgcctgcgccattacctgctgtcccaggggtggtgggatgaggaacaggaaaaggcctggcgcaagcaatcgcgccggaaagtgatggaagcatttgaacaagcagagcggaaaccgaagcccaacccgaatctcctgttttctgatgtttaccaagagatgccggctcagctgcgcaagcagcaagaatcgctcgcgcgccatctgcagacttacggcgagcactaccctctggaccacttcgacaag

SEQ ID NO: 14682 - DNA, 1335 bp, Artificial Sequence
  derived and/or modified sequence
atggcagtggcaatcgccgccgctagggtttggaggctgaatcggggactaagtcaggcagccctgctgcttcttaggcagccaggggcacgaggtctagcacgcagccacccgcctcgccagcagcagcaattctcaagcctcgatgacaagccccagtttcctggagcctctgccgaattcatcgataagctcgaattcatacagccaaatgtcataagtggtatcccgatctaccgcgtaatggacagacagggacagatcatcaacccttccgaagatccccatcttcccaaagaaaaagtactgaaactctacaagagcatgacgctgctgaacactatggaccgaattctctatgagtcacagcgccaggggagaatcagcttctacatgactaattacggggaagagggtacgcacgttggatccgcagcagcactagacaacactgacttggttttcggtcagtaccgcgaggcgggggtactaatgtaccgagactatccattagagcttttcatggcccagtgttatgggaacatctccgaccttggtaaggggcgccagatgccggtgcactacggatgtaaagaacgtcacttcgttaccatctcaagcccactggcaacccagatcccacaagcagtgggcgctgcttacgctgccaaaagagctaacgccaaccgggtggtcatatgttacttcggcgagggcgcggcctctgagggtgacgcgcacgcaggcttcaattttgcggctactctcgagtgtcctatcatcttcttctgcaggaacaacggctacgctatttccaccccaacgtccgaacagtatagaggggacggcatagccgcaaggggtccgggttatggcattatgagtattcgtgtcgacggaaatgatgttttcgctgtttacaatgccactaaagaggcccgtcgcagagcagtggcggagaatcagccatttttgatcgaggctatgacttatcgcatcggacaccactccaccagtgacgacagttctgcttatcggagtgtcgatgaggtgaattactgggataaacaggaccaccccatttcacggctgagacattatctcttgtctcaggggtggtgggacgaggagcaggagaaagcctggcgtaaacagtctaggcggaaggtaatggaggcgtttgagcaagccgagagaaaacccaagccaaatcccaacttactgttttcagatgtttatcaggagatgcccgcacaactgcggaagcagcaggaaagtctcgcccgtcacctgcaaacttacggcgaacactaccctctggaccatttcgacaag

SEQ ID NO: 14683 - DNA, 1335 bp, Artificial Sequence
  derived and/or modified sequence
atggccgtcgccatcgccgctgcccgggtgtggaggctgaacaggggtctgtcccaggcagccctcctcttgcttagacagcctggcgcacgcggcctcgctcgctctcacccccctcgtcagcagcagcagttctcttccctggacgataaaccacagtttcctggggcaagcgccgagtttatcgataagctggaatttatccagccgaatgtgatctctgggatccccatatatagagtcatggatagacagggccagataatcaacccgtctgaggatccacacctgccgaaagagaaagtgctcaagctgtacaaaagcatgacactcctaaacaccatggatagaattttgtatgaaagtcagagacaaggtcgtattagcttttatatgacgaactacggcgaagaaggcacacacgtaggctcagccgctgcattggacaatacagatcttgttttcggccagtacagggaggcaggggtcctaatgtatagggattacccgctggagttattcatggcacagtgctacggcaacatttctgacctggggaaaggccggcagatgcctgtgcattacgggtgcaaggagagacacttcgtgaccatcagtagtccgctggccactcaaatcccccaggccgtgggtgccgcatacgcggccaagagggctaatgctaacagggtggtaatctgttatttcggggagggggcagcaagcgagggtgacgcacacgctggattcaattttgcggctaccctggagtgcccaataatcttcttctgcaggaataatggatacgccatatccacacccacctcagagcagtaccgcggagatggcatcgctgcaagaggccccggctacggaataatgagtatccgcgtggatggaaacgatgtcttcgccgtgtataacgccacaaaagaggcaaggcgacgcgccgtggctgagaaccagcccttccttattgaggctatgacatatagaattggccaccattctacctccgatgattctagcgcttatcggtctgtagatgaggtgaactattgggacaaacaagaccaccctatatcacgactgcgacattacctgctcagccagggatggtgggacgaagagcaggaaaaggcctggagaaagcagtcgcgcagaaaggtaatggaagctttcgagcaggcggagagaaaacctaagcctaatccaaacttgctgtttagcgacgtctatcaggaaatgcctgcccagttaaggaagcagcaggagtcacttgcccggcacctgcagacctacggcgaacattaccccttggaccacttcgacaaa

SEQ ID NO: 14684 - DNA, 1335 bp, Artificial Sequence
  derived and/or modified sequence
atggcagtggcgatcgccgccgcgcgggtgtggaggctgaacagaggactgagccaagccgcccttctgctcctgagacagccgggagcgagaggactggcaagatcccatccgccgagacagcaacagcagttttcctcgctggatgataagcctcagtttcctggggcctccgccgaattcatcgataaactggagttcatccaaccgaatgtcattagcggaatcccaatctaccgggtgatggaccggcagggacagattatcaatccatccgaggacccgcatcttcctaaagaaaaagttctgaagctctataagtctatgaccttgctgaacaccatggaccgcattctctacgaatcgcagcggcagggaagaattagcttctacatgactaactacggggaagaaggaacccacgtcgggtccgccgccgcgctggataatacggatctggtgtttggacaataccgggaggccggagtcctgatgtatcgcgattacccgctggagctctttatggcgcagtgctacggaaacatctcagacctgggaaaaggtagacagatgccggtgcactacggatgcaaagagcgccacttcgttaccatctcttcccctctggcaacccaaatccctcaagccgtcggagctgcctacgcagccaagcgggcgaacgccaacagagtggttatctgctacttcggcgaaggagcggctagcgagggagatgcgcacgccggtttcaacttcgctgctaccctcgagtgtcccatcattttcttctgtaggaacaacggatacgctatctccaccccgacctcagaacagtaccggggtgacggtatcgccgcacgggggccgggatacgggatcatgtccatccgcgtggacggcaacgacgtctttgctgtgtacaacgcaacgaaggaagcgagacgccgggcggtggctgagaatcagcccttccttatcgaagctatgacttatcgcatcggccatcactcaacctcagacgatagctcagcttaccgctcggttgacgaggtgaactactgggacaagcaggatcacccgatctcacggcttcgccactacctcctgtcacagggctggtgggacgaggagcaggaaaaggcatggcggaagcagagccgccgcaaggtgatggaggcattcgaacaggcggaacggaagccgaaaccaaatccgaatctcctgttctcggatgtgtaccaggaaatgcccgcccaactgaggaaacagcaggagtccctggctcgccacctccagacctacggggaacattacccgttggatcacttcgacaaa

SEQ ID NO: 14685 - DNA, 1335 bp, Artificial Sequence
  derived and/or modified sequence
atggctgtggccatagccgctgcccgtgtgtggagacttaaccgaggactgtcccaggccgcgttgctgctcctgcggcagcctggcgccaggggcctggctagatcacacccacctcgccaacagcagcaatttagctctttagacgacaaaccgcaattccccggagcgtctgcagaatttattgataagctggagttcattcagcctaatgtgatcagcggaattccgatctatcgcgtaatggaccggcagggtcagatcatcaacccctctgaagacccccacttacccaaagaaaaagtcctcaagttgtacaaatctatgaccctcctcaataccatggacagaatcctctatgagagccagagacaaggacggatatccttctatatgacaaactatggcgaagaaggtacgcacgtgggctctgctgctgcactggataacaccgacctggtcttcggccagtaccgtgaagccggcgtgttaatgtatcgggattatccgctggagctcttcatggcccagtgctatggcaatatcagcgacttaggaaagggaaggcagatgcccgtacactatgggtgcaaggaaagacatttcgtgacaatttccagccccttggctacccaaatcccccaagctgtgggcgcggcgtacgccgcaaagcgcgctaacgcaaacagagttgtcatctgttacttcggagagggtgcggcaagcgagggagatgcacacgctggttttaactttgcggctacgcttgaatgtccaataatcttcttctgccggaacaatggctacgccatttcaacacctactagtgagcagtacaggggagacgggatcgccgccagaggcccaggttatggcataatgagcattagagtcgacgggaacgacgtgttcgccgtctacaacgcgacgaaagaggcccgccgtcgcgctgtggccgagaaccagcccttcttaattgaggctatgacttaccggatcggccaccactcaacctccgatgactcttctgcctataggagcgtggacgaggtgaactactgggacaagcaggatcatccgatctcaagattgcgtcactatctgctgagtcagggctggtgggatgaggagcaggagaaagcatggcggaaacagtcgaggcggaaagtgatggaggccttcgaacaggcagagcgcaagccaaagccaaatccaaacctgctattcagcgatgtgtaccaggagatgcccgcccagctgcggaaacagcaggagtcactggcccgacatttgcagacctacggtgaacactacccgctggatcatttcgacaag

SEQ ID NO: 14686 - DNA, 1335 bp, Artificial Sequence
  derived and/or modified sequence
atggccgtggccatcgctgccgccagggtgtggagactgaacagaggcctgtctcaggctgctcttctgcttctgagacagccgggagccagaggcttggcacgctcccatccgccacgccaacagcaacaattctcctctcttgacgacaagccccagttcccaggcgcatccgcggagttcattgataagctcgagttcatccagcccaacgtgatctccggaattcctatttacagagtgatggaccgccagggccagatcatcaatcccagcgaggacccgcacctgccgaaagaaaaggttctgaagttgtacaaaagtatgacacttctcaacaccatggaccgcatcttgtacgagagccaacgccaaggtagaatatccttctatatgaccaattatggcgaggaaggaacccatgtgggtagcgccgcagctctggataataccgacttggtcttcggtcagtatcgcgaggctggcgttttgatgtacagagactaccctttggaactgtttatggcgcagtgttacggtaacattagcgatcttggtaagggtagacagatgccggtccactacggatgtaaggaaaggcacttcgtaacaatttctagcccacttgccactcaaatacctcaagccgttggcgccgcctatgcagccaagcgcgcaaacgcaaaccgcgttgtcatatgctacttcggtgagggagctgcttccgaaggcgacgcgcacgccggtttcaacttcgctgccaccctggaatgccccataatcttcttctgtagaaacaacggttacgcgatctccactcctacctctgaacaatacagaggtgatggcatcgcggccaggggaccaggttacggaatcatgtctatcagggtcgacggaaatgatgtcttcgcggtgtacaacgccaccaaggaggctcgcagacgcgcagtagcggaaaaccaacctttccttatagaggctatgacatataggatcggccaccattctacctccgatgacagtagtgcctacaggtctgtggacgaggtgaactactgggacaaacaagaccatcctattagtagattgaggcattacctcctgagccagggatggtgggacgaggagcaagagaaagcttggagaaaacaatctcgcagaaaggtcatggaagctttcgagcaagctgaaaggaaaccaaagcctaatcctaatctgttgttctcagacgtgtaccaagagatgccggcccagctgcgcaaacagcaggagagcttggcgaggcacctgcagacatatggcgagcactacccactcgatcactttgataag

SEQ ID NO: 14687 - DNA, 1335 bp, Artificial Sequence
  derived and/or modified sequence
atggcggtcgctattgccgctgctcgcgtgtggaggctcaaccgcgggctcagtcaagctgccctcttgttgcttcgtcagccgggcgcgagaggattggctagaagccatcctccacgacagcagcaacaattctctagtttggatgataaacctcagtttcccggagcgtctgctgaattcatcgataagctggagttcatccagccaaatgtgattagtggcattcctatatatcgggtaatggaccgacagggtcagatcatcaacccgtccgaggatccccatttacctaaggaaaaggttctgaaactgtataaatcaatgactctcctcaacacaatggaccggatactttatgagtcccagcgccaaggtcgtatatcgttctatatgacaaactacggggaagagggtactcatgttggttctgccgctgcactcgacaacaccgatttggtattcgggcaatacagggaggctggcgtgctcatgtatcgtgactatccattagaactgtttatggcccagtgctatggcaacatctccgaccttggaaaggggcggcagatgccagtgcactatggctgcaaggagagacacttcgtcaccatctcgagcccccttgcgacccagatccctcaagcagttggagctgcatatgcggccaagcgagccaacgcaaacagagttgtaatctgttactttggcgaaggcgcagcctcagagggcgacgctcacgccggatttaactttgcggcaacactagagtgccctattatattcttctgccgtaacaacggatacgctatttccacaccaacgtccgaacaataccgcggggatggcatcgctgctcgtggccccggctacggcattatgagcatcagagtcgatggcaatgatgtttttgccgtgtataacgccactaaagaggctcgtcgccgtgctgttgctgagaatcagccttttctcattgaagctatgacgtaccgaattggccatcactccacaagtgatgattctagcgcgtaccgatcagttgacgaggttaactattgggataagcaggaccaccccatctcccgcttacggcactatctccttagtcagggctggtgggatgaggagcaagaaaaggcatggcggaagcagagccgaagaaaggtcatggaggcattcgagcaggcggaacgcaaaccgaagccaaatcctaatctccttttcagcgatgtttaccaggaaatgcccgcccaacttaggaagcagcaggaaagtttggctcggcacctccagacttacggagagcattatccattagaccattttgacaag

SEQ ID NO: 14688 - DNA, 1335 bp, Artificial Sequence
  derived and/or modified sequence
atggcagttgccatcgcggctgcacgagtgtggcgacttaatcgcgggctgtcccaggcggcgctgctgctgcttaggcaaccgggtgcacgtgggttggcacggagccatcccccaagacaacagcaacaattttcatcgctggatgataagcctcaatttcccggagcgtccgccgagtttattgacaagctcgagttcatccagccaaacgtcataagcggaattccgatctaccgagtcatggaccggcaaggacagataatcaacccttcagaagatccacaccttccgaaggaaaaggtgcttaagctgtacaagtcgatgactctgcttaatactatggatcggattctttacgagtcccagagacagggacggatttcgttctacatgaccaactatggtgaagagggtactcatgtgggatcggccgcagctttggataacacggatctggtctttggccaataccgagaggccggagtgcttatgtatcgtgactaccctttggaacttttcatggcccaatgctatggcaacatttcggacctgggaaagggtaggcagatgcccgttcactacggatgtaaagaaaggcatttcgttaccatttcgagccctctggcaacccagataccacaagcagtgggagcagcctacgcagcaaagagagcaaatgccaatagagtggtgatctgttactttggcgaaggagccgcctcagagggagacgcacatgcaggtttcaatttcgccgccactctggagtgtccaataatctttttctgccggaacaacggttacgccattagcactcctacttcagagcaatatcggggagatggaatcgcagcacgtggcccagggtacggaattatgtcgatacgcgtggacggtaacgacgtctttgccgtgtacaacgctactaaggaagcacggagaagagccgtagcggagaaccaaccattcctgatcgaagcaatgacttacaggattggtcaccattctaccagcgatgactcgtccgcgtacaggtcggtggatgaagtgaattactgggataagcaggatcaccccatatcgaggctcagacattacctgctttcgcagggctggtgggatgaagaacaagaaaaggcgtggaggaagcagagccggcggaaagtcatggaagcgttcgagcaagccgaacgaaagccaaaacctaatcctaatcttctcttttccgacgtgtaccaagaaatgcctgcccagcttagaaaacagcaagaaagcctcgcaagacacctgcaaacctacggagaacattacccgctcgatcattttgataaa

SEQ ID NO: 14689 - DNA, 1335 bp, Artificial Sequence
  derived and/or modified sequence
atggccgtggctattgcagcagcaagggtgtggcgcctaaatcgtggtctgtcacaggcagcattactgttgttaaggcagcctggggcccgggggctggcccgcagtcatcctccacgccagcagcaacagttctcaagtctggacgataagccacagtttcccggagcttctgccgaatttatcgataaactcgagtttatccagcccaatgtgatttcagggattccgatctatagagtgatggatcggcagggacagataattaacccaagtgaggacccccacctccccaaggaaaaggtgctgaagctatacaagagcatgacactgctgaacactatggaccgaatattgtacgagtcccagagacagggtcggatttccttttatatgacaaactatggggaggagggcactcatgtgggctctgcagccgctttggataacactgacttggttttcgggcagtaccgcgaggccggcgtcttaatgtacagggactatcccttggaactgtttatggctcaatgctatgggaacattagcgacttgggcaaaggccgccagatgccggtgcattacggatgtaaagaacgtcattttgtgacgatttcttctcccttggctactcaaatcccccaggcagtaggagccgcttatgctgcaaaacgggcaaatgccaatcgcgttgtaatctgctacttcggggaaggcgcggcatctgagggcgatgctcacgcaggcttcaactttgctgctactctggagtgcccaataatattcttctgccggaataatggctacgcaattagcacacctacttccgagcagtataggggcgacggaatagccgccagagggccaggttatggcatcatgtctatccgcgtggatggtaacgatgtgtttgcggtgtacaacgctacaaaagaagcaaggaggcgagcggtggcagagaaccagcctttcctgattgaggccatgacctatcggatcggccaccatagcactagtgacgattcttcagcctaccgtagcgtggacgaggtaaactattgggataagcaggatcaccctatttcccggctacggcattacctactttcacagggttggtgggacgaagagcaggaaaaggcatggaggaaacagtccaggagaaaggtgatggaggcttttgaacaggctgagcggaaacctaaacctaacccgaatctcctgttttctgatgtctatcaggaaatgcctgctcagctgcgcaaacagcaagagtccctggctaggcacttacagacctacggagagcattacccactggaccactttgataaa

SEQ ID NO: 14690 - DNA, 1335 bp, Artificial Sequence
  derived and/or modified sequence
atggccgtcgccatagctgctgcaagagtgtggaggcttaaccgcggcctgtcacaagccgcgctcctccttttacggcagcccggcgcgcgcggcctggctcggtctcatccaccaaggcagcagcagcagttctcttcactagacgacaaaccccagttcccgggcgccagcgccgaatttatcgataaactggaatttatccagccgaacgtgattagcggaatacctatctatcgggtaatggacagacagggacagataatcaaccctagcgaggacccacatcttcccaaggaaaaggtgctcaagctctataaatcaatgacactgttgaatactatggatcggatattgtacgagtcacagcgccagggacggatcagcttttatatgaccaattacggagaagagggcacacatgtggggagcgctgcagcccttgacaatactgacctggtgtttggacaatatagagaggccggagtgctcatgtatagagattaccccctggagctgtttatggcgcaatgctacggcaatatctcagatctcggtaagggaaggcagatgcccgttcactacggctgcaaagagagacattttgtcacgatcagctccccactggctacacagattcctcaggcagtgggcgccgcctatgctgccaaaagggccaacgcgaaccgagtagtgatctgttactttggggaaggagcagcctctgagggagacgcgcatgctggtttcaatttcgcggcaaccctggagtgccccatcatctttttctgtcggaataacgggtacgcaatcagcacccccacatccgagcagtataggggagacgggatagctgccagaggaccaggttatggtataatgtccattcgcgtggacggcaacgacgtattcgctgtgtacaacgccacaaaagaagcgagacgccgagcagtcgccgaaaaccagccgtttctgatcgaagctatgacatatagaatcgggcaccatagcacttcagatgatagctccgcctataggtccgtggacgaggttaactattgggataagcaagatcatccaatctcacgccttagacattatctccttagccaaggatggtgggacgaggaacaagaaaaagcttggagaaaacaaagcaggcgtaaggtaatggaggcgttcgaacaggccgagcgaaagcctaaacctaatcccaatctgttgttctcagacgtgtatcaggaaatgcccgcacagcttagaaagcagcaggagtccctggcccggcacctgcaaacctacggcgagcattacccactggaccactttgacaaa

SEQ ID NO: 14691 - DNA, 1335 bp, Artificial Sequence
  derived and/or modified sequence
atggccgtggcgatcgctgccgcccgagtgtggaggttaaaccgcgggttgagccaggctgctctgctccttctccgccagcccggtgctcggggattggcacgatctcatcctccgcggcagcagcaacaattctcttctctggatgacaagccgcaattcccaggcgcttctgcagagttcatagacaagctggagttcattcagccgaacgtcatttccggcatccctatttatcgggtgatggacagacaggggcagattataaacccctccgaagatcctcatctgcctaaggagaaagtcctgaagctgtataaatctatgactttgttaaatacgatggacagaatcctatatgaatcccagagacagggccggatatctttctacatgacaaattatggcgaggaaggcacacatgtggggtctgcagctgctctggacaatactgatctcgtcttcggtcagtacagagaggcaggtgtcctgatgtatagagactatcctctcgaattatttatggctcagtgctacggcaatatctccgacttgggtaaaggccgtcagatgcctgtccactatggatgcaaggaaagacatttcgtgactattagttcccctctggcaactcagatccctcaagccgtgggggccgcgtatgctgcaaaacgcgcaaatgccaatagggtcgttatatgctattttggcgagggagcagcctctgagggcgacgcccacgccggctttaatttcgcggccacccttgagtgtcccattattttcttctgcaggaacaacgggtatgcaatatctacgcctaccagtgaacagtaccgcggggacggcattgccgctcggggcccgggctacggcattatgagcatacgggtggacggaaacgacgttttcgcagtctataacgccaccaaggaggcccgaaggcgcgcagtggccgagaaccagcccttcctgattgaggcaatgacatatagaatcggccatcacagcacctcggacgatagcagtgcctatagatctgtggacgaagtcaattattgggacaaacaagatcaccctatctcacgactgcgtcactacctcctgtcgcagggctggtgggatgaggaacaggaaaaagcctggcggaagcaatccaggcgcaaggtcatggaagctttcgaacaggcggaaagaaaacccaagcctaatcccaatctgctttttagtgatgtgtaccaggagatgcccgcgcagctccgaaagcagcaggagtcactcgctcgacaccttcagacctacggcgagcactacccactggaccactttgacaag

SEQ ID NO: 14692 - DNA, 1335 bp, Artificial Sequence
  derived and/or modified sequence
atggccgtggcaatcgccgcagcaagggtgtggcgcctgaatagggggctttcgcaagcggcacttcttcttctcaggcagcccggagcccgtgggcttgcaagaagccatcctccgcggcaacaacagcagttttcatcgcttgacgataagccacaattcccaggtgcatccgcagagttcatcgataagctcgagtttattcagcctaacgtgatttcgggtatcccaatttaccgcgtcatggacaggcagggtcaaatcataaatccttcagaagatccacatttgcctaaggaaaaagtgctgaaactttacaaatccatgaccttgcttaacactatggaccgcattctctacgaatcacagcgacaaggccgtatttcgttttacatgacgaattacggagaggagggaactcacgtcggcagcgccgcagccctggacaacactgaccttgtgtttggacaataccgagaggcaggagtcctcatgtacagagattaccctctcgaactgtttatggcccaatgctacggtaacatctccgatcttgggaagggtcgccagatgcctgttcattacgggtgtaaagaacggcatttcgtgaccatttcctccccccttgcaactcaaatccctcaggccgtcggtgcggcgtacgcggcaaagagggccaatgccaatcgggtggtcatttgctactttggtgagggcgccgcgtcagaaggagacgcccatgcaggtttcaactttgccgcaaccttggaatgtccaatcattttcttctgtaggaacaatggatacgcaatatcaacgccgactagcgagcaataccgcggagatggcattgcagccagaggtcccggatacgggattatgagcatcagagttgatggcaacgatgtttttgcggtgtataacgcaactaaggaagcacgcaggcgtgcggttgccgaaaaccaaccatttcttatcgaagcaatgacctatagaatcggacatcattcgactagcgatgatagctccgcctaccggagcgtcgatgaagtgaattactgggacaagcaggatcatccaatttcacgccttagacattacctgctctcccaaggatggtgggatgaggagcaggaaaaggcctggcgcaagcaatcgagacggaaagtgatggaagcgttcgaacaggccgaacgtaagcccaagcccaaccctaacctgctgttttccgacgtgtatcaggaaatgcctgcacagctgaggaagcagcaggagtcacttgcccggcatcttcaaacttacggtgaacattaccctctggaccattttgataaa

SEQ ID NO: 14693 - DNA, 1335 bp, Artificial Sequence
  derived and/or modified sequence
atggctgtggcaatcgcggcagcccgggtgtggcgcttgaaccggggactgtcccaagccgcgctgctgctgctgaggcagccaggagcccggggcctcgcaagaagccaccctccccggcagcagcaacaattctcctccttggatgacaagccgcagttcccaggagcgagcgctgaattcattgacaaattggagttcatccagccaaatgtgatctcgggcatcccaatctaccgggtgatggaccggcagggtcagatcatcaacccttcggaagatccacatctgccgaaagagaaggtgctgaagctctacaaatctatgaccctgctgaacactatggaccgtatcctctacgagtcccagcggcaggggcggatctcattctacatgaccaattacggagaggagggaacgcatgtgggatccgcggctgctctggacaacaccgacctggttttcgggcaatacagggaagctggagtgctgatgtaccgagactacccgctggaactgttcatggcccaatgctacggtaacatttcggacttgggaaagggaaggcagatgcctgtgcattacggctgcaaggaacgccacttcgtcactatcagttcaccgctcgccacccaaatcccacaagccgtgggagcagcgtatgcagccaaacgcgcgaatgcaaaccgcgtggtgatctgttactttggagagggtgcagcatcggagggggacgcgcacgcaggattcaatttcgcagctacccttgagtgcccgatcatcttcttctgcagaaacaatggttacgctattagcaccccgacctcagaacaatacaggggagacggcatcgctgctaggggcccgggctacggaatcatgagcatccgggtcgacggcaacgatgtgtttgcagtgtacaacgctactaaggaggctcggaggagagcagtcgccgagaaccagccgttcctgatcgaggcgatgacgtacagaattggacaccattcaacctccgacgactcgtctgcataccgatccgtggacgaagtcaactactgggataagcaggatcatccaatcagccgactccgccactacctgctgtcccaggggtggtgggacgaagagcaagagaaggcttggagaaaacagtcgcggagaaaggtgatggaggcattcgagcaagccgagagaaaacccaagccaaacccgaatctgcttttcagcgacgtctaccaggaaatgccggcccaactgcggaagcagcaagaatcactggcgaggcatcttcagacctacggagaacactatccgctggatcacttcgataag

SEQ ID NO: 14694 - DNA, 1335 bp, Artificial Sequence
  derived and/or modified sequence
atggcagttgcgattgcggcagcaagagtctggaggcttaaccgcggcctctcccaggccgcacttttgttgctgcgtcagccaggagcacggggacttgcacggtcgcatcctcctcggcaacagcagcaattttcctcgcttgatgataagcctcagtttccaggagcgtcggccgagttcattgataaacttgagtttatacaacccaacgtgatttcgggcatcccaatctacagagtgatggataggcaaggtcagatcatcaatccatcggaggacccccatctgcctaaggagaaagtcctgaaattgtacaagtcgatgaccctgctgaataccatggataggattctctatgaatcacaacggcaaggtcgcatatccttctacatgactaactatggcgaagaaggaactcatgtgggttcggctgcggcacttgataacactgacttggtgtttggccagtaccgggaagcgggagtgctcatgtacagggattatccccttgagctgtttatggcccagtgctacggcaacatttcggacctcggtaaggggagacaaatgcctgtgcattacggatgtaaggaacgtcacttcgtgacgatctcctcccctctcgccacccagatccctcaagcagtgggagcagcatatgcggcgaagcgagctaacgccaacagagttgtaatctgttacttcggagagggtgcagcatctgagggagatgcccatgccgggtttaactttgcagccaccctggaatgcccgatcattttcttttgtcgaaacaacggatacgcaattagcacccctacttcggaacagtaccgtggcgacgggatcgctgcccggggtccaggctacggaataatgtccatacgtgtggatggaaacgatgtgtttgctgtgtacaacgcaaccaaagaggcacgacgaagagccgtcgcagaaaaccagcctttcttgattgaagcaatgacttaccgtattgggcatcattcaacctccgacgactccagcgcataccgcagcgtggacgaagtgaactactgggacaagcaggatcaccccattagccggctgagacattacctcctgtcgcaaggatggtgggatgaagaacaagagaaagcctggagaaagcaaagcaggcgcaaggtcatggaggctttcgagcaagcagaacgtaagccaaagcctaacccaaacctcctcttctcggatgtttaccaagaaatgccagcccagcttcgtaagcagcaagaatcgcttgcccgtcacctgcaaacttacggggagcactacccactggatcatttcgataag

SEQ ID NO: 14695 - DNA, 1335 bp, Artificial Sequence
  derived and/or modified sequence
atggctgtggcaattgccgcagctcgcgtgtggcggctcaaccgcgggttgtcgcaggccgctctgctgctgttgcgccagcctggcgctagaggactagcgagaagccatcccccgcgccagcagcaacagttttcctccctggatgataagccgcagtttcccggagcctctgcagagtttattgataaactggagtttattcaaccgaacgttatatctggaatcccgatctaccgtgtgatggatcgccaaggccagatcatcaatcccagtgaagacccccacttaccaaaggagaaggtcctaaaactgtacaagtctatgactttgcttaacaccatggatcggatcttgtatgagtcacagcgacagggaaggatttcattctacatgaccaattacggggaagagggcacacatgtggggagcgcagcagcactggataatacggacctggtgttcggtcagtacagggaggccggtgtgctgatgtaccgggactaccccctggagttgttcatggcccagtgctatggcaacatcagtgacctggggaaaggccgacagatgccagttcattatggctgcaaggaacgacatttcgtgactatctcgagtccccttgccacacagattccgcaggcagtgggggcggcctatgcggctaagcgcgctaatgccaatcgagtggtaatctgttactttggcgagggagcagccagtgaaggagacgcccatgcgggattcaactttgccgccacccttgaatgcccaataatctttttctgccggaataacgggtacgctatctcaacccctacatccgagcagtacagaggcgacggtatagcagctaggggccccggttacggaatcatgtcaattcgggtggacggcaatgatgtattcgccgtgtataatgcgacaaaagaagctagacggcgggccgttgccgaaaatcagccttttctcatcgaagccatgacctatcgcattggtcaccactctacgtcagacgatagtagcgcataccgatctgtggacgaggtgaactattgggataaacaggaccaccccataagtcgcctccgccactacctgctttcacagggctggtgggacgaagaacaagaaaaggcatggcgaaagcagtccaggcggaaggtgatggaggcgtttgagcaggccgaacggaagcctaagcccaaccccaatctcctgtttagcgacgtttaccaggagatgcccgcccaactgaggaaacagcaggagagccttgcccgccatctgcagacatacggcgaacactacccacttgatcatttcgataag

SEQ ID NO: 14696 - DNA, 1335 bp, Artificial Sequence
  derived and/or modified sequence
atggcagtggcaatcgcggcagcccgggtgtggcgtctcaaccgaggcctttcacaggcagcactgcttcttcttcgacagccaggggcacgagggctcgcacggtcacacccacccagacagcaacaacagtttagctctttggatgataagccacaattcccaggagcaagcgcagagttcatcgacaagttggaattcatccaacctaacgtgatttcaggaattcctatttaccgcgtcatggaccgccaaggccagattatcaacccttccgaggatccgcatctgccaaaagaaaaggtcttgaagctctacaaatcgatgacgctcctgaataccatggataggatcctttacgaaagccaaaggcagggtcgaatttcgttttacatgaccaattacggtgaggaagggacgcacgtcggtagtgcggcagccctcgacaataccgaccttgtgttcggacaatatcgggaggccggagtgctgatgtacagagattacccactggaattgttcatggctcagtgttacgggaacatatcggatctgggtaaggggagacaaatgccagttcactatggatgtaaggaacggcattttgtgactatatcctccccactcgcaacgcagatcccacaagcagtgggtgccgcttatgcagcaaaacgggctaacgctaatagggtggtgatctgctactttggagagggagcagcgtctgaaggggatgcgcatgcaggattcaattttgctgccactcttgaatgcccgattatcttcttttgtagaaataacgggtacgccattagcaccccgacttcggaacaataccgcggtgacggtatagcggcacgcggtccagggtacggaattatgtccatacgagttgacggaaacgacgtgtttgccgtgtacaacgcgactaaagaagcacggagaagagccgttgccgagaaccagccttttcttattgaagcaatgacttaccgcattggacaccactcgacctcggatgactcctctgcctacaggtccgtagatgaagtgaattactgggacaaacaagatcatcctatttcaagactgcggcattacctgcttagccaaggctggtgggatgaagagcaagagaaggcctggagaaagcagtccagacgcaaggtgatggaagcgtttgaacaggcagagcgcaaacccaagcctaaccctaacctccttttttcggatgtttaccaagaaatgccggcccagcttaggaagcaacaagagagcctggcaaggcatcttcagacttacggagagcactaccctttggatcacttcgataag

SEQ ID NO: 14697 - DNA, 1335 bp, Artificial Sequence
  derived and/or modified sequence
atggccgtggctatcgcggcggcgcgggtctggcgcctgaatcggggcctgtcgcaggccgccctcctgctgctcagacaacccggcgcacgcggcctcgcgcgctcccaccctccgcgccagcaacaacagttctcaagcctcgacgataagccacaattccctggagcctcagccgagtttatcgacaaactggagtttatccagccgaacgtgatctcagggatcccgatctaccgggtgatggatcggcaggggcagattatcaacccgtccgaggacccgcatctgcctaaggagaaagtgctcaaactctacaagtcgatgactctcctgaatactatggatcggatcctgtacgagagccagagacaggggcgcatctccttttacatgaccaactacggtgaagagggcactcatgttggctcggccgctgcactcgacaacacggatctggtgttcggacagtaccgggaagcgggggtgctgatgtacagggactaccctctcgaactgttcatggcccaatgctacggtaatatcagcgacctcggaaagggtcggcaaatgccggtgcattacggatgcaaagaacgccacttcgtgactatctcctcgccactggctactcagattccacaagcggtcggagccgcgtatgcggcgaaacgcgctaatgcgaaccgcgttgtgatttgctacttcggcgaaggtgccgcgagtgaaggagacgcccacgcagggtttaacttcgccgccacgctggagtgtccaattatcttcttttgccgcaacaacggctacgccatctccactcccaccagcgaacaataccggggtgacgggatcgcggcccgcggcccgggctatggaatcatgagcatccgggtggacggaaatgacgtctttgccgtctacaacgctactaaggaggccaggcgccgggcagtggcagaaaaccagcctttccttattgaagcaatgacctaccggattggacaccactccaccagcgacgatagctccgcgtacagaagcgtcgacgaagtgaactactgggataagcaagaccacccaatctcccggctcaggcattacctcctcagccagggctggtgggacgaagagcaggagaaggcctggcgcaagcagtcgcggcgcaaagtgatggaagcgtttgagcaggcagaaagaaagcccaagccaaatccaaaccttctcttctcggacgtgtaccaggagatgcctgcccagttgcggaagcagcaggaaagcctggctcgccatctgcagacttacggagagcattacccactggatcactttgacaaa

SEQ ID NO: 14698 - DNA, 1335 bp, Artificial Sequence
  derived and/or modified sequence
atggctgttgctatcgctgccgcacgcgtatggcggctgaatagaggcttgagtcaggcggcgcttcttctcctgcgacagccgggggctcgcggactggcgagaagtcacccaccaaggcagcaacagcaattctctagtctcgatgacaaacctcagttccctggcgcaagcgcagaatttatagacaagctcgaatttatacagccaaatgtcatctcagggatacctatctatcgggtgatggaccgccagggtcaaataatcaatcccagtgaagatccacacctgcctaaagaaaaggtccttaaactgtacaagtctatgacactccttaacactatggacaggatactgtacgagtcccagaggcagggaagaattagtttttatatgaccaactacggagaggagggaactcacgtgggtagtgcggctgctctcgacaacacggatctggtatttggccagtatcgggaggccggcgtcctcatgtaccgagactatcccctggaacttttcatggctcagtgctacggtaacataagcgatctggggaagggcaggcagatgcccgtgcactacggctgtaaagagcggcatttcgtcacaatcagctctcctctggccacccagattccacaggcagtaggtgccgcttacgccgccaagagggcaaatgcaaatagagtggtcatttgctatttcggagagggggccgcctctgagggagacgcccacgccggttttaacttcgcagcaacgctcgagtgtcccatcatcttcttttgcagaaataatgggtacgccatttcaactccaacgagcgagcagtacaggggggacggcatcgctgcccgcgggcccggttacggaattatgagcatcagagtggacggcaacgacgtattcgcggtatataacgccactaaagaagctagacggcgcgctgtcgctgaaaaccaaccattcctgatcgaggcaatgacatataggattgggcaccactctacttctgacgactcatctgcttatcgcagcgtggacgaagtgaattactgggataagcaggatcacccaatctctcggctgcggcattacctgctcagtcagggctggtgggacgaagagcaggaaaaagcttggcgcaaacagagtagaagaaaagttatggaggcctttgaacaggcagagagaaagcccaaaccaaatcctaaccttctgttctccgacgtctaccaggaaatgcctgcccagctgaggaagcagcaggaaagtctggctagacatctgcagacttacggggagcattacccgctggaccacttcgataag

SEQ ID NO: 14699 - DNA, 1335 bp, Artificial Sequence
  derived and/or modified sequence
atggccgttgccatcgctgccgctcgtgtctggcgtctgaatcgcggcttaagtcaggctgcactgctgctgctgcgacaacccggcgctcgcggactcgcacggtcacacccgccccggcagcagcagcagtttagtagtttagatgacaagccacagttcccaggagcttccgctgaatttatcgataaactggagttcattcagccgaacgtcatttccggaattccaatctacagagttatggaccggcagggacagataatcaatccctccgaagacccccatttaccgaaagagaaagtactaaagctgtacaagtcaatgaccctcctgaatacaatggatagaattctctatgagagccagcgccagggtaggattagcttctacatgacaaattatggtgaagagggtacacacgtgggctctgctgccgcgctcgacaacaccgacctagtttttggacagtacagggaagccggagtgctcatgtaccgagactatcccctggagctattcatggctcagtgctacggaaatatttcagacttgggtaaggggcgccagatgcctgtacactatggatgtaaggagaggcacttcgttacgatcagttcccctctggcaactcagattcctcaggcagtgggcgcagcatacgccgccaagagggctaatgcaaatagggtagttatttgttacttcggcgaaggagccgcctctgaaggagatgcccacgcgggcttcaatttcgccgccactctcgagtgccccatcattttcttctgccgcaataatgggtacgcaattagcaccccaaccagcgagcagtatcgcggcgatggaatcgctgcacgcggcccaggatatggcataatgtcaatacgtgtggatggcaatgacgtgtttgcagtttacaacgccaccaaggaggcacggagacgggcagtagccgaaaaccagccctttctgatagaagcaatgacctatcggattggccatcatagtacgagtgatgactcaagtgcttataggtccgttgacgaggtaaattattgggacaagcaggaccacccaatctccagactgcggcattatctgctgtctcagggatggtgggacgaggagcaggagaaagcctggcgcaagcagtccaggagaaaggtgatggaagcgttcgaacaggcagagagaaagccaaagcccaaccccaatttactgttctctgatgtctatcaggagatgcctgcacagctcagaaaacagcaggaaagcctcgctagacacctgcagacttatggggaacattatccattagatcatttcgacaag

SEQ ID NO: 14700 - DNA, 1335 bp, Artificial Sequence
  derived and/or modified sequence
atggctgtcgcaatcgctgccgcgagggtttggagactaaatagagggctgtctcaagcagctttgttgcttttgcgtcagccaggggccaggggattagctcgatcgcacccacctcgccagcaacagcagttttcttctcttgatgataaacctcaattccccggggcttccgctgagtttatagataaacttgagtttatccaacctaacgtgattagtggaatacctatttatcgtgttatggatagacaaggacagatcattaacccttcagaagatcctcaccttccaaaggagaaggtactgaagttgtataagtccatgacacttcttaacactatggatcgtatcttgtacgaatcccaacgacaaggacggatttctttctacatgaccaattatggagaagaaggtacccatgtcggatctgcagctgctcttgacaataccgaccttgtctttggacagtatcgagaagctggtgttttgatgtacagagattatccattggagttattcatggcacaatgctacggcaacatcagtgatttggggaaaggtagacaaatgcctgttcattatggttgtaaggaaagacactttgttactatatcttcaccactggcaactcagatcccgcaggcggtaggggccgcatatgctgctaagcgtgcaaatgctaatagggtcgtgatttgctatttcggtgaaggtgcggcttctgaaggtgatgctcatgctggtttcaacttcgcagctactttggagtgcccgataatattcttttgcagaaataatggttatgcgatatctactccaacttcagaacaatatcggggcgatggaattgctgccagaggacctggatacggaataatgagcattagagtggatggtaatgacgtattcgcagtttataatgcgaccaaagaggctcgaagaagagctgtcgctgagaaccagccttttctcattgaagctatgacatataggattggccaccactcaacgtcggatgactcctctgcatatcggagcgttgatgaggttaactactgggataagcaggaccaccccatcagtaggttacgacactatttgctctctcagggttggtgggacgaggagcaggagaaggcctggcggaagcaatctagaaggaaggtcatggaggcgttcgagcaagctgaacggaagcccaagcccaacccaaacttgctcttcagtgatgtgtatcaggagatgcctgcccaattgaggaaacaacaggaatccttagctaggcatttgcaaacttatggtgagcattacccgctggatcactttgataaa

SEQ ID NO: 14701 - DNA, 1335 bp, Artificial Sequence
  derived and/or modified sequence
atggccgtggccattgccgccgctagagtgtggcggttgaaccgggggctctcgcaggctgctctcctgctgctcaggcaacctggtgcacgcggactcgcacgctcccatcctccaagacaacagcagcagtttagctccctggacgataaaccgcagtttccgggagccagcgcagagtttatcgacaaactcgagttcatccaaccgaatgtcatcagcggcattccgatttaccgtgtcatggatagacagggacaaatcattaacccttcagaggatccacatctgccgaaagaaaaagtgctgaaactgtacaagagcatgactctcttgaataccatggatcggatcctttacgaatcacagagacagggacgcatctcgttctacatgactaactacggagaagagggaacccacgtcgggtcagcagccgcacttgacaataccgaccttgtgttcggtcagtaccgggaagcgggcgtcctcatgtaccgcgattacccgctggagctctttatggcccagtgctacggcaacatctcggatcttggaaaaggacggcagatgccggtgcactacggctgcaaggaaagacacttcgtgactatcagctcgccgctggccacccagatcccacaggccgtgggagctgcctatgccgcaaagcgggcgaacgccaatcgggtcgtcatttgctatttcggagaaggcgccgcgtccgaaggcgacgcgcatgctggcttcaacttcgccgctactctggagtgcccgatcatctttttctgccgcaataacggatatgccattagcaccccaaccagcgaacagtatagaggcgacggaatcgcggcacgcgggccgggctacggaatcatgtcaatccgcgtggatggaaacgacgtgttcgccgtgtataacgcgactaaagaggccaggagacgcgccgtcgccgaaaaccagccgttcctgatcgaagcgatgacttaccgaattggtcatcacagcacctcggacgactcttccgcgtacagatcagtggacgaagtcaactactgggacaagcaggatcatccgatctccaggctgagacattaccttttgtcccaaggatggtgggacgaggagcaagagaaggcgtggcgcaagcagtcacggagaaaggtgatggaagcgtttgaacaagccgagcggaagcctaagcctaatccgaatcttctgttcagcgatgtctaccaggagatgccggcacagcttcgcaagcaacaagagtcgctcgctcggcacctgcaaacgtacggagagcactacccgctggatcatttcgataag

SEQ ID NO: 14702 - DNA, 1335 bp, Artificial Sequence
  derived and/or modified sequence
atggcagtggccattgctgcagcacgggtctggaggctcaaccgaggactctctcaggcagccctcctactcctgcgccagcctggagcccgcgggctcgcccgatcccatcctcctcggcagcagcagcagtttagttcattagatgataaacctcagttccccggggccagtgccgagttcattgacaagttagaattcatacagcctaatgtgatatctgggatccccatttaccgggtcatggataggcaggggcagataattaatccatccgaggatccacacttacctaaggaaaaagttcttaaactgtacaagtccatgacattattaaacacaatggatcggattctttatgaatcccagcggcagggacgaatatccttctatatgacaaattatggggaagaggggacgcacgttggatccgccgccgctcttgataatactgatctcgttttcggacagtacagggaagccggagtcttgatgtaccgggattatccattagagctcttcatggctcagtgttacggaaatatctctgatcttgggaaagggagacagatgccagtgcattacgggtgcaaggaaaggcacttcgtgactatctcaagtcccctcgctactcagatcccacaggccgttggagccgcatatgccgccaaaagggcaaacgccaatcgggttgtgatctgctatttcggggagggagccgcatcggaaggagacgcacatgccggattcaactttgctgctacactcgagtgtccaataatcttcttttgtaggaacaatgggtatgctatctcaactcccacatcagaacaatatcgcggggacggaatagctgcaagaggaccaggatatggaataatgtccattcgagttgatggaaacgatgtattcgctgtttacaacgcgactaaggaggcaagaaggcgggccgttgctgagaaccaacccttcctgatagaggcaatgacatatcggatagggcaccatagtacttctgatgattcatcagcctatcggtccgtggatgaagtcaactactgggataaacaggatcaccccatatcccgacttagacactatctcctttcccagggatggtgggatgaagaacaggaaaaagcctggcggaagcagagtcgaagaaaagttatggaggcctttgagcaggctgaaaggaaacctaagcccaacccaaacttactatttagtgatgtctatcaggaaatgcctgcacagctaaggaaacagcaggaatcactcgcacgacatttacagacatatggagaacattatcctcttgatcactttgataag

SEQ ID NO: 14703 - DNA, 1335 bp, Artificial Sequence
  derived and/or modified sequence
atggccgttgcgatcgccgctgctcgcgtttggaggctgaaccgggggctcagtcaggctgcgcttttacttctacgtcagccgggagctcgagggttagctcgcagtcatccaccacgtcagcagcagcagttttcctcgctcgacgataagccacagtttcccggggcttctgccgagttcatcgataagttggagttcattcaaccaaatgtgatttccgggatcccaatatatagggtcatggaccggcagggccagattataaaccccagcgaagatcctcacctgcctaaggagaaggtgctaaagctctacaaatcgatgacactccttaacacaatggatcgtatcttgtacgaatcccagcgccaggggcgtattagcttctacatgactaattatggggaagaaggaacccatgtggggtcagccgctgcgctcgataatacagacctggtgttcggacagtatcgggaggcaggagtcttgatgtatagagattacccactggagctgttcatggctcagtgctatggaaatatctctgatttggggaaagggcggcagatgccagttcactacgggtgcaaggagcgccatttcgtcacaatttcttcccccctcgccacacagatcccccaggcggtgggggccgcctacgcagctaagagggctaacgctaatcgcgtggtaatatgttattttggtgagggtgctgcatcagaaggggatgcacacgcgggattcaacttcgccgccaccctcgagtgtcctatcatattcttctgtcgcaataatgggtatgctatttccacccctacttccgaacagtatcggggcgacggcatcgccgctcgagggccaggatacgggattatgtctataagggtggacgggaatgacgtattcgcggtctataacgcgacaaaggaggcgagacgaagggctgtcgctgagaatcagccatttctgatagaagcaatgacatatcgcatcggccaccactccacctctgacgactcatctgcctaccgttctgtcgatgaagtaaattattgggataagcaggaccacccaataagtcggctgcggcactacctactgtcgcagggctggtgggacgaggagcaggaaaaagcgtggcggaaacagtctcgacgtaaagtgatggaggccttcgagcaagccgaacgaaagccaaaacctaaccccaatcttctgttttctgacgtgtaccaggagatgccagcgcagctgcgtaagcagcaggaatctctggcacgtcacctccagacctacggcgaacactaccctctagaccacttcgataaa

SEQ ID NO: 14704 - DNA, 1335 bp, Artificial Sequence
  derived and/or modified sequence
atggctgtcgcaatcgcagccgccagagtatggagactgaatcgtggtctcagccaagccgcattgttgcttttgaggcagcccggagcccgcggcctggcccgcagtcaccctccacgccagcagcagcagttttctagcctggatgacaagccccagttccccggcgcatccgcagaattcatcgacaaactggagtttattcaacccaacgtcatctctggtattccaatatatcgcgtcatggaccgtcagggacaaataattaatccatccgaggacccacatcttcccaaggagaaggttcttaaactctacaagagtatgactctgctcaatacaatggacaggatcctctacgaatctcagcgccaaggccgcatttctttttacatgaccaactacggtgaggagggcactcacgtgggctcagctgcagcactggacaacactgacttggttttcggacagtaccgcgaggccggcgtgttgatgtatcgcgactatccattggaactgttcatggcccagtgctacggaaacatctccgacctgggaaagggcaggcagatgcctgtgcactatggatgcaaggagaggcatttcgtcaccattagctcaccccttgcaacacagatacctcaagccgttggcgctgcttatgctgctaagagggctaacgcaaacagggtggtgatctgttatttcggcgaaggcgctgcctctgagggagacgctcacgccggtttcaactttgcagctacactggaatgccctatcatctttttctgccgtaataacggctacgccatctctactccaacatccgagcaatatcgcggagacggtattgccgctcgcggtcctggatacggcataatgtctattagggtggacggtaatgacgtgttcgccgtctacaatgccacaaaggaggcacgtcgtagggccgtggctgaaaatcagccattccttatcgaggcaatgacataccgtatcggtcaccactctacctctgatgactcctctgcttatcgctcagtggacgaggtcaattactgggacaagcaggaccatccaatttcaagactgagacattatctcctgtcccaaggatggtgggacgaggagcaggaaaaagcctggagaaagcaatcaaggagaaaggtgatggaggctttcgagcaggccgagaggaagcctaagcccaatccaaacttgttgttttctgatgtataccaggagatgcccgctcagttgagaaagcaacaagagagcttggcccgtcacctgcaaacctacggagaacattaccccttggatcacttcgataag

SEQ ID NO: 14705 - DNA, 1335 bp, Artificial Sequence
  derived and/or modified sequence
atggcagtcgccatcgcagccgcaagggtgtggcgcctcaatcgcggcttgagccaggccgcactgcttctgcttaggcagccgggagctagagggctggcgaggagccacccgcctcgccagcaacagcaattttcttcgctggacgacaagccacaattccctggggcatcagcagaattcatagacaagctcgagttcatccagccgaacgtgatttcgggcatccccatttatcgagtgatggacaggcaaggtcaaatcatcaatccgtcggaagatccacatctgcctaaggagaaggtgctcaaactttacaagtcaatgacccttctgaatactatggacagaatcctgtacgagtcccagagacaaggaaggatttctttttacatgacgaactacggagaagaaggaacccacgtcggaagcgcagccgctctggataatactgacctggtgttcggccagtaccgggaagcaggcgtcctcatgtaccgcgactaccctctcgaactgtttatggcacagtgctacggaaacatctccgacctgggcaagggtcgccagatgccggtgcactacgggtgcaaagagcggcatttcgtgaccatcagctcaccgctggcgacccagataccacaggccgtgggtgccgcgtacgcagcgaagagggcgaatgccaatcgggtggtgatctgttacttcggagaaggagctgcctctgaaggagacgcccacgccggattcaatttcgccgcgacgcttgagtgtccgatcatcttcttttgccgaaacaacgggtacgcgattagcaccccaacttcagagcagtaccggggtgacggaatcgcggcccgcggcccggggtacggaattatgtcaatccgggtggacgggaacgatgtctttgccgtctacaacgccactaaagaggcccggcgtcgggctgtcgcggaaaaccagccattcctcattgaggcaatgacctacagaatcgggcaccattcaacttcagatgattcctcggcctatcggtccgttgacgaagtcaactactgggataaacaagatcatcctatctcgcgcctccgccattacctcctgagccagggttggtgggacgaagaacaggagaaggcttggagaaagcagtcacgacggaaggtgatggaagccttcgagcaggcggagcggaagccgaaaccgaaccccaacttgctgttctcggatgtctaccaggaaatgcccgctcaactgcgcaaacagcaggaatcgcttgccagacaccttcaaacctacggagagcactatcccctggaccatttcgataaa

SEQ ID NO: 14706 - DNA, 1335 bp, Artificial Sequence
  derived and/or modified sequence
atggctgttgccattgcggcagctcgagtctggcggttgaaccgaggactaagtcaggccgccctattattactccggcaaccaggagctagggggcttgcccggtctcatccacccaggcaacagcaacaattttcttccctggacgacaagccacagtttcccggagcttctgcagaattcatagataagttggaattcatacagccgaacgtgatttcaggcattccaatttatcgagtaatggatagacagggccagattatcaacccatccgaggatccccacttgccgaaggagaaagtactgaagctgtacaagagtatgaccctacttaacaccatggaccgcattctgtatgaaagccagagacagggacgcatttccttctacatgaccaattatggcgaagagggcacgcatgtgggatctgccgcagctctcgacaatacagatttggtttttggacagtatagggaggcaggcgtgttgatgtacagagactaccctctggagctgtttatggcccagtgctacgggaatatcagcgatctgggcaagggccgtcagatgcccgtgcattacgggtgcaaagagagacactttgtaaccatttcttctccccttgcaactcagattcctcaggcagtgggggccgcctatgccgcaaagcgggctaatgcaaacagagtcgtgatctgttactttggggaaggggctgccagcgagggcgacgcacacgccggctttaattttgctgccacactggaatgccccatcatcttcttttgcagaaacaatgggtacgccataagtactcctacctccgagcagtaccggggtgacggtatcgctgcaaggggtccaggatacgggattatgagcatcagggttgacggtaatgacgtctttgccgtgtataatgccacaaaagaagcccggaggagagccgttgctgaaaaccagccttttttgattgaggcaatgacgtacaggatcgggcaccattctaccagtgatgacagtagtgcatacaggagcgtggatgaagtgaattactgggataagcaggatcacccaatttctaggctgcggcattatctattatctcagggttggtgggacgaggagcaggaaaaggcgtggcggaagcagtcccgtcgcaaggtaatggaggccttcgagcaggccgaacgaaagccaaagcccaatccaaatctgctcttctccgatgtctatcaagagatgccagctcagctgagaaaacaacaggagtctctagctcggcatctgcaaacctacggagagcactatcctttggaccacttcgataag

SEQ ID NO: 14707 - DNA, 1335 bp, Artificial Sequence
  derived and/or modified sequence
atggcagtggccattgccgctgcgagagtgtggaggctgaataggggcttgtcccaagcggcccttctgctgctccgccagccgggtgctaggggacttgctagatcgcaccccccgcgacaacaacaacagttctcgtcccttgatgacaagccgcaattcccgggagcctcagccgaattcatcgacaagctcgaattcatccagccaaacgtgatcagcgggatcccgatttacagagttatggaccggcaaggacaaatcatcaacccgtcggaagatccgcatttgcctaaggagaaagtcctgaagctctacaaatcaatgactctgctgaacactatggacagaatcctgtacgaatcccagcgccaaggacgcatcagcttttacatgaccaactatggcgaggaaggaactcatgtggggtccgccgctgccctggacaacaccgacctcgtgttcggccagtaccgggaggcaggagtgctcatgtacagagattatccgctggagctcttcatggcccagtgctacgggaatatctcagacctgggtaaagggcggcaaatgcctgtgcactacggttgcaaggagaggcacttcgtgactatctcgtcccctctcgctacccagatcccacaagcggtgggtgccgcttacgccgcaaagagagccaacgccaacagagtcgtcatctgttacttcggagaaggagcggctagcgaaggcgatgcacacgccggattcaacttcgcggcaactctcgaatgccctatcatcttcttctgccggaataacggatacgccatttccacgccgacttcggaacagtaccggggtgatggaatcgcagctcggggacccggctacggaatcatgtctatccgggtggatggaaacgatgtgttcgccgtgtacaatgcaaccaaggaggcccggcgccgcgccgtggccgagaaccaaccattcctcatagaagccatgacgtatcggatcggccaccactcgacctctgatgattcgtcggcataccgcagcgtcgacgaagtcaattactgggacaagcaagaccatccgatttctcggctgagacattacctgctgagccaaggatggtgggatgaagaacaagagaaagcctggcggaagcaaagccgccgcaaagtgatggaagccttcgagcaggccgagcgcaagcctaagccaaaccccaatctcttgttctcagatgtgtaccaggaaatgcccgcacagctgagaaagcagcaggagtccttggcgcggcacctccaaacttatggcgagcactaccctttggaccattttgacaag

SEQ ID NO: 14708 - DNA, 1335 bp, Artificial Sequence
  derived and/or modified sequence
atggcggtagccatcgctgcagctcgcgtatggagactgaatagagggctctcacaggccgcactcttgctacttcggcagcccggagccagaggactagctaggtctcatccgcctagacagcagcagcagttcagttcgttagatgacaagcctcagttccctggggcctccgctgagttcatcgataagttggaatttatccagcccaacgtgatcagtgggatcccgatttacagagttatggatcggcaagggcagattatcaaccccagtgaggaccctcatctccccaaagaaaaagtgcttaaactctataaatctatgacactacttaacactatggataggattctatatgaatctcaacggcaggggagaatctcattctacatgacaaattacggggaagagggaacacacgtagggtcagcagccgccctcgataacacagatttagtctttgggcagtatagggaagccggagtgctgatgtatcgtgattatcctctagagctattcatggcacagtgttatgggaacatctctgatctcgggaaaggacgccagatgcccgttcactatggatgtaaagaacggcattttgttacaatatcctctccactggccacacagatcccccaggcagttggggccgcatatgcagccaaacgcgctaatgccaatagggttgtcatctgttatttcggggaaggagccgccagtgaaggggatgcccatgccgggtttaacttcgctgccactttagaatgccctatcatttttttttgtcggaataatgggtacgccatatcaactccaacgagtgaacaatatcgaggggatgggattgctgcccgcgggcccgggtacggaatcatgtctatcagagtggatggaaatgatgtattcgccgtatataatgctacaaaagaagcccggaggcgggcagtggcagaaaatcagccctttcttatcgaggccatgacttatagaatagggcaccattctacatcagacgattcatccgcttatcggtcagtggatgaagtgaattattgggataaacaggatcaccctatatctcggctccggcactatctcctatctcagggatggtgggatgaagaacaggaaaaagcctggcgaaagcaatctcggaggaaggtaatggaagcttttgagcaggccgaaaggaaacccaaaccaaatcccaatctcctcttctccgatgtataccaggaaatgccagctcagctccggaaacagcaggagtccttggctcggcatcttcagacatacggagagcactatcctttagatcattttgataaa

SEQ ID NO: 14709 - DNA, 1335 bp, Artificial Sequence
  derived and/or modified sequence
atggcggtggcaatagccgcagccagagtgtggagactgaatcggggactgtcacaggcagcacttctgttgctgaggcaacccggggcgcggggacttgcacggagtcatccgccccgccagcagcaacaattctcgtcgcttgatgataagccacagtttccaggggcatccgctgagtttatagataagctcgagtttattcagccaaacgttatttcagggattccgatttatcgagtcatggacagacaaggtcagatcataaaccccagcgaagatcctcatcttcctaaggagaaagtgctcaaactgtacaagtccatgactctccttaataccatggaccggattctttacgaatcacaaagacaaggacggatttccttttacatgaccaactacggcgaggaaggtactcacgtgggatcggcagcagcgctggataataccgatcttgtgtttggacaataccgagaagcaggcgtgttgatgtatagagattaccctctcgagctgttcatggctcagtgctacggtaatatctccgacctggggaagggcagacagatgcctgtccattacggttgtaaggaacgccattttgtcaccatttcgtcccctcttgcaacccagattcctcaggctgtgggagcggcctacgcagcaaagagagccaatgccaaccgcgttgtgatctgttactttggcgagggtgcagcatcggaaggagacgcccatgcagggtttaacttcgctgcaaccttggaatgtcccataatcttcttttgccgtaataacggatacgcgattagcacccccactagcgaacaatatcgtggagacgggatcgcagcaaggggaccgggatacggtatcatgagcattagagtggatggtaatgatgtctttgcagtctacaacgcaactaaggaagcacgcagacgtgcagtggccgaaaaccaaccatttcttatcgaagcaatgacctacaggattgggcaccacagcacttcggacgattcctctgcataccgcagcgttgacgaggtgaactattgggataaacaggaccatccgatttccaggctgcggcattatcttctgagccaggggtggtgggatgaagaacaagaaaaagcctggcgcaagcaatcgcgccggaaagtgatggaagcatttgagcaggcagaacgtaagcctaagcccaaccctaatctcctcttttcagatgtgtaccaggaaatgccagcacagctgcgaaagcagcaagaatcccttgcccgccatctgcagacctacggcgagcattacccactggatcactttgataaa

SEQ ID NO: 14710 - DNA, 1335 bp, Artificial Sequence
  derived and/or modified sequence
atggctgttgcaattgcagccgcgagagtatggcgcttaaaccgcgggctgtctcaagcggccttgcttctgttaaggcagcccggcgccaggggactggctcggagtcaccccccacgccagcagcagcaattcagctctctggacgataaaccccaatttccaggcgcatccgcggaattcattgataagcttgagtttatacagcccaacgtaatctcaggaatcccgatttaccgggtcatggaccgccagggtcagatcattaacccctctgaggatcctcacttgcccaaggaaaaggtcctgaagctgtataaaagcatgacactgctcaatacgatggaccgcattctttatgagagccagcgccaggggcgaatcagcttttacatgaccaactatggagaggaggggacccacgtgggctcagcggccgcactggacaacacagatcttgtgtttgggcagtacagagaggcgggagtactgatgtacagagactatccgctagaactattcatggcccagtgctacggcaatatctcggacttgggtaagggccggcagatgcctgtgcattacggctgtaaagagagacattttgtgacaatttccagcccgctggcaacacagattcctcaggctgtcggcgccgcgtacgctgccaagcgagccaacgctaatcgggtggtgatctgctacttcggggaaggggctgccagcgagggggacgcccatgccggcttcaacttcgccgcgacgttggagtgtcctattattttcttctgtaggaacaatggatacgccatcagtactcccacatccgaacagtaccggggggacggcatcgcagccagaggaccaggctatggcattatgtccattcgtgtcgacggtaatgacgtgttcgctgtgtataatgctacaaaagaggctagacggcgggcggtggctgagaaccaaccattcctgatcgaggccatgacctataggattggccaccactccacctccgacgatagcagtgcctacaggtcggtcgatgaagtgaactactgggacaagcaggaccatcccattagccggctcaggcattacctattgagccaaggatggtgggacgaagagcaggagaaggcgtggcggaaacaaagtagaaggaaggtgatggaagcctttgaacaggcagagcggaagccgaagccgaacccaaaccttttattttcggacgtgtaccaagaaatgcctgctcagcttaggaaacagcaagaatccttagcaagacacttgcagacttacggagaacactatcccctggaccattttgacaag

SEQ ID NO: 14711 - DNA, 1335 bp, Artificial Sequence
  derived and/or modified sequence
atggcagtggcaattgcggcagcgcgcgtttggcggttgaacagaggtctttcgcaggcagcactgcttctgcttcgtcaaccaggggcaagggggctcgcacgatctcaccccccacgtcaacagcaacaattctcgagcctggatgataagccgcagttccctggggcctcggcggaattcatcgataaactggagtttatccaacctaatgtgatttccggaattcctatctacagagtgatggaccgccaaggacaaatcattaaccctagcgaagatccccacctgccgaaggaaaaggtcctgaagctctacaagtccatgactctgttgaacacgatggatagaattctgtacgaatcacagcggcagggacggatttcattttacatgactaactacggcgaagaaggtactcatgtgggaagcgcagcagccctcgataacactgatctcgtgttcggacagtatcgggaagcaggagtgctgatgtaccgcgactacccccttgaactgtttatggcacaatgttatggcaatatctctgaccttggaaaggggcggcaaatgcctgtgcactacggctgtaaagaaagacattttgtcaccatctcctcccccctcgcgacccagatcccccaagcggtcggcgcggcatacgcagcgaagcgcgcaaatgccaaccgcgtggtgatttgttactttggtgaaggagctgcgtcagaaggagacgcacatgcgggttttaacttcgcagcaactcttgaatgcccaatcattttcttctgtagaaacaacggatacgcgatctctacccctacttcggaacagtaccgcggtgacgggattgcagccagaggccctgggtacggtattatgagcatcagggtggacggcaacgatgttttcgcagtgtacaatgccaccaaggaagcccgaaggagagcggtcgcggagaaccagccgtttcttatagaggccatgacctacagaattggacatcattccacgtcggatgactcctccgcctaccgtagcgtggacgaagtaaactactgggacaaacaagaccatccaatcagcaggcttaggcactacctgctcagccagggatggtgggacgaggagcaggaaaaggcctggaggaaacagtcgcgtcgtaaggtgatggaagcgtttgaacaggcagaaaggaaacctaagccaaaccctaacctcttgtttagcgatgtgtaccaagaaatgcctgcacaactgcggaagcaacaggaatcgctggccagacacctccagacctatggagaacattaccctctggatcattttgacaaa

SEQ ID NO: 14712 - DNA, 1335 bp, Artificial Sequence
  derived and/or modified sequence
atggctgtcgctattgccgcggcgagagtgtggcggcttaataggggcctgtcacaagcagcactcttgcttctgcgtcaacccggcgcccgcggcttggctcgctctcatccccccagacagcagcagcaattttcctccttggatgataaacctcagttccccggcgcaagcgccgaatttatcgacaaactcgagtttattcagccaaacgtaatcagcggcattccgatttatcgagtgatggaccggcagggtcagatcattaatccaagcgaagatccacatctccccaaagagaaagtgctgaagctctataagagcatgaccctgctcaatacaatggataggatactctacgagagccagcgacagggtaggattagcttttacatgacgaattacggggaggaggggacccacgttgggagcgcagccgcattggacaatacagatctggtcttcggacagtaccgcgaggcaggcgtcctgatgtatcgtgactaccctctagagctctttatggcacagtgctatggcaacatctctgacttgggtaaaggtagacaaatgcctgtccactacggctgcaaggaacggcactttgtcaccatttccagtccactcgccacccaaatcccccaggccgtgggcgctgcctacgctgcaaagcgtgccaacgccaatcgggtggtcatatgttactttggcgaaggcgccgcgtccgagggggacgctcatgccggcttcaactttgctgctactctggagtgccctataattttcttttgtcggaataatggttatgcgatatccaccccaacgagcgaacagtatcgaggtgacggaattgccgcacggggtcccggctatggaattatgtcaattcgtgtcgatggtaatgatgtgttcgcagtttataacgcgaccaaagaggcccgacgccgcgcggtggcagaaaatcagccttttttaatagaggccatgacatatcggattggacaccattctacctcagacgattcgagcgcctatcggtccgtggatgaagtcaattattgggacaagcaggaccacccaatctctaggctgaggcactatctacttagccagggctggtgggatgaagaacaggagaaggcctggaggaagcagagcagacgcaaagtcatggaagcctttgaacaggcagagcgcaagcctaagccaaaccctaatttactgttttcagatgtgtaccaagaaatgccagcacagctcaggaagcagcaggagtctctggcccgtcatctgcagacctatggagagcactatcccctcgaccacttcgacaaa

SEQ ID NO: 14713 - DNA, 1335 bp, Artificial Sequence
  derived and/or modified sequence
atggccgttgcaatagccgccgctcgtgtgtggagactcaatcgcggcctatctcaggctgcactgctgttgttgagacagcccggcgcccgaggtctagcacgttcacacccacctagacaacagcagcagttctccagtctcgatgataaaccccagtttcccggcgcctctgcggagttcatagacaaactggagtttatccaacctaacgtgatctccggaatccccatctacagggtgatggaccggcagggacaaatcatcaatcctagcgaagacccccacttgccaaaggaaaaggtcctcaagctgtataagtcaatgactctcttgaatacgatggatagaatcctatatgagtctcaaagacagggcaggatttccttttacatgacgaattatggtgaagagggaacccacgttggctctgcagcagccctggacaatacggatttagtgttcggacagtatagggaggccggtgtgcttatgtatagggattaccccctcgagttgttcatggctcagtgttatggcaacatctccgacttgggcaaggggcgccagatgccagtgcactatggctgtaaggagaggcactttgtcactatatcatcaccattagcaactcaaataccccaggctgtcggagctgcttatgccgctaagagagctaacgcaaacagagtggtaatatgctattttggggagggcgccgcaagcgaaggggacgctcatgccgggtttaacttcgccgcaacactcgaatgccccataatatttttttgtcgtaataatgggtatgccataagtaccccaactagcgaacagtacaggggcgatgggatcgctgcaagaggacccggatacgggatcatgtcaatcagagtggacggaaatgatgtgtttgctgtgtataatgcgacaaaagaggccaggcgtagagcagtcgctgaaaaccagccattcctgattgaggccatgacctatcgaattggacaccactcaacatcagatgactcgtctgcataccgcagcgtggacgaggtgaactactgggacaaacaggatcaccccatcagcagattacggcactacctactgagccagggatggtgggacgaagaacaggaaaaggcttggcggaaacagagccgccggaaagtcatggaggcgttcgagcaggccgagagaaaacccaagcctaaccctaaccttctttttagtgacgtgtaccaagaaatgcctgcacaactgagaaagcaacaggagtctctggcacgccatcttcagacatatggcgagcactatcctttagaccattttgacaag

SEQ ID NO: 14714 - DNA, 1335 bp, Artificial Sequence
  derived and/or modified sequence
atggctgtagcaattgcagcagctcgcgtctggcgattgaaccgtggactttcacaggccgcgctgttattgttacggcaacccggcgctcgcggtttagccagaagtcatcctccgagacagcagcagcaattttcttctctggatgataaaccgcagtttccgggcgcgtccgcagaatttattgacaagctcgaatttatccaaccgaacgtaattagcggcattccaatataccgcgttatggacagacaaggacagatcattaacccttcagaagatccacatctgccgaaagaaaaagtgctgaaattatataaatctatgaccctattgaatacgatggatcgtattctgtatgagagccagcgacagggacgcatttcgttttatatgacaaattatggagaagaaggaacacatgtaggttccgcggctgctcttgacaatacagacttggtattcggacagtacagggaagcaggagtcttaatgtatagagactatcctttggagctatttatggcccagtgctacggaaacatctccgatcttggcaaaggcagacaaatgccagttcattacggctgcaaagaaagacattttgttactatctcttcaccgttagcaacacaaattccgcaagccgttggagccgcttatgctgcaaaacgggcgaacgcaaatagggtggtgatctgctattttggcgagggcgcagcgagcgaaggagatgcacacgcgggattcaattttgccgcaacccttgaatgcccgatcattttcttttgtcgcaataatggatacgcaataagtacacctacatcagaacaatatcgtggtgacggcattgcagcgcgtggccctggttatggaataatgtccatacgggtggatggtaatgatgtctttgcagtttacaatgcaacgaaagaagcacgccgtcgtgccgtggcagaaaatcaacccttcctcatcgaggcgatgacctacagaattggccaccactcgacatccgatgatagctctgcttacaggagcgttgacgaagtaaattattgggataaacaggatcatccaatttcacgcctgcgccactaccttctcagtcaaggttggtgggatgaggaacaggaaaaagcctggcgtaaacagagccgtcgcaaagtaatggaggcattcgagcaagctgaacggaaaccgaagccgaatcctaaccttcttttttctgacgtttatcaggaaatgccggcacaattgagaaaacagcaagaatcacttgcaagacatcttcaaacgtatggcgaacattacccgttagatcattttgacaaa

SEQ ID NO: 14715 - DNA, 1335 bp, Artificial Sequence
  derived and/or modified sequence
atggctgtggccatcgcagctgcccgagtctggcgtctgaatcgcggcctatcacaggccgccctcttgctgctgcggcagccaggcgccagaggccttgcaaggagccaccccccacgtcagcagcaacagttcagttcccttgacgacaagcctcagttccctggtgcctcagctgagtttatcgacaagctagaatttatacagcctaacgttatttcaggcatccctatctatcgcgtgatggacaggcagggacagattattaacccctccgaggacccgcatctgcccaaggagaaagtactgaagctttataaaagtatgaccctgctgaatactatggatcgcatactgtatgaatcccagagacaggggaggatttcgttctatatgacgaactacggagaggagggtacccacgtgggtagtgccgctgccctggacaatacagatttagtgttcgggcagtaccgagaagctggagtgctcatgtatcgggattatccactcgaattgtttatggcccagtgctacggaaacatttccgatcttgggaagggcaggcagatgcccgttcactatggctgtaaagagcggcactttgttaccattagcagtcctctcgcaactcagattccccaagccgttggcgcagcatacgcggcaaagcgggccaatgccaacagagtggtcatatgctactttggcgagggcgctgcgagcgagggcgacgcacacgctggctttaatttcgctgcgacgctggagtgccctatcatctttttctgtaggaacaacggctatgctatatcaactccgactagtgaacagtacagaggggacgggatcgccgcgcgtggtcccggttacgggattatgagcatacgggtagacggtaatgatgtttttgccgtgtataatgctaccaaggaagctagacgtcgcgctgtcgcggaaaaccaaccattcttgatcgaggctatgacctaccggatcggacatcattctaccagcgacgactcctcagcctaccgcagcgttgacgaagtcaattactgggacaaacaagatcacccaatcagcaggctgagacactatctgctgtcacagggctggtgggatgaggaacaggagaaagcttggcgaaagcagagccggagaaaggtcatggaggcgttcgagcaggcagaaaggaaacctaagcccaatccgaaccttcttttctccgacgtttaccaggagatgcctgcacagttgcgaaagcagcaggaatcgctggcacgccacctgcagacttatggggagcattaccccctcgatcattttgataaa

SEQ ID NO: 14716 - DNA, 1335 bp, Artificial Sequence
  derived and/or modified sequence
atggcagtggccattgccgcagcgagagtctggcgtctgaaccgaggtttgagccaggccgcgctgctgcttctcagacaacctggtgcgaggggccttgccaggtcacatccacctcgacaacagcaacagttctcctcccttgatgacaagccacagtttcctggggcatcagcagaattcatcgataagctggagtttatccagccaaatgttatttccggcatacccatttaccgggtgatggacagacaaggtcaaatcattaacccttcagaagatccgcatttgcctaaagaaaaggtgcttaaactttacaagagcatgactctgctcaacacgatggacagaattctttatgagtcccagcgtcagggacgcatatcattttacatgacgaattacggtgaggaaggcacccacgtgggctcagcggcagcactcgacaacactgatctcgtgttcggacaatacagagaggcaggtgtgctgatgtaccgagactacccacttgagctgtttatggcacaatgctatggcaatatcagcgatctgggaaaaggaaggcagatgcctgtccactacggatgtaaggaacgccactttgtgaccatttcttcccccctcgcaacccaaatcccccaagcggtcggggcagcatacgctgccaagagggcaaacgctaatagagtggtcatctgttactttggagagggagcagcgtcggaaggggatgcacatgccgggtttaactttgcagccaccctcgaatgcccaatcattttcttttgtaggaacaacgggtacgctatctcgactcccacctcggaacagtaccggggagatggaatcgcggcccgtggtccggggtacggtattatgtccattagggtcgatggaaatgatgtgttcgcggtctacaacgcaactaaagaagcgagacggagagccgttgccgagaaccaaccttttcttatcgaggcaatgacgtacagaatcggtcatcacagcacttcggacgattcatcggcatacagatcggttgacgaagtcaactactgggacaaacaagaccatcctatctccagactcagacactaccttttgtcacaggggtggtgggatgaggaacaagaaaaggcatggagaaagcaaagccggcggaaggtgatggaagcattcgaacaagcggagagaaagcctaaacccaatccaaatttgctcttttccgatgtctaccaggagatgcccgcgcaactgcgaaagcagcaagaatccctggcgcgacatcttcagacctacggtgaacattaccctctggatcatttcgacaaa

SEQ ID NO: 14717 - DNA, 1335 bp, Artificial Sequence
  derived and/or modified sequence
atggccgtcgccattgcggccgcccgcgtctggcgcttgaaccggggtttgagccaggccgccttgctgctgctccggcaaccaggggcacgtggcctggctagaagccacccgccccgtcagcagcaacagttcagctctctcgatgacaagccacagtttcccggggcatcggccgagttcatagataagctagagtttatacagcccaatgtgataagtggaatacccatctatcgagtgatggatcgacagggacagattattaatccatcagaagacccccacctcccaaaggaaaaggtccttaagctatacaagtctatgacgcttctgaacacgatggatcgcattctgtatgagtcccagaggcagggacggatcagcttttatatgactaattacggagaagagggaacccacgtgggcagcgcggccgccttggataacacggacctggtgttcggtcagtaccgcgaggccggtgtgctaatgtaccgagactaccctttggagctgttcatggcccagtgctatggcaacatatccgacctgggcaagggtcgacaaatgccggtgcactacggctgcaaagagaggcatttcgtcacaattagttccccactggccacccagatcccacaggcagtgggcgctgcgtacgccgcgaagcgggcgaacgccaaccgagtcgttatctgctacttcggagagggagcggcatccgaaggcgacgcccacgccggatttaacttcgcggcaaccctagaatgccccatcatcttcttttgtcgtaataacggctatgccattagtaccccgacgtccgaacagtatcgcggcgatggcatcgctgcaaggggtccaggctacggcattatgtcgattcgtgttgatggtaacgacgtattcgctgtctacaacgcgactaaggaggcacgacgccgagcagtcgccgagaatcagccgtttctaattgaagccatgacataccgtatcggacatcattcaacgtcggatgattcgtcggcctatagatccgtcgatgaggtaaactattgggataagcaggatcatcctatctcacgcttgcgccattacctgctgagtcagggttggtgggatgaggagcaggaaaaagcctggaggaagcagagtcgacgcaaagtgatggaggccttcgagcaggctgagagaaaacccaagcctaaccccaatctgctgttctctgatgtgtaccaagagatgcctgcccagttgcgaaagcagcaagagtcccttgcccgccacctgcagacctacggagaacactacccgcttgatcacttcgacaag

SEQ ID NO: 14718 - DNA, 1335 bp, Artificial Sequence
  derived and/or modified sequence
atggccgtggcaatcgctgcagcccgcgtgtggcggctcaaccgcggcctctcgcaagccgccctgctgctgctgcgacagccaggagcacgcgggttggccagatcgcatccgccccgccaacaacaacaattctcaagcctggatgacaaaccccagttcccaggagcgtccgcggagtttatcgacaagctggagtttattcagccgaacgtcatctccggcatcccgatctaccgtgtcatggaccggcagggacaaatcattaacccatcagaggacccacatctccccaaggaaaaggtgctcaagctgtacaagtcaatgaccctgctgaataccatggatcggatcctctacgaaagccaacggcagggtcggatctccttctacatgacgaattatggggaagagggcactcacgttggctcagcagcggcactggataacactgacctggtttttggacagtatagagaggccggagtgttgatgtaccgggactaccctctggaacttttcatggcacagtgctacggaaatatctccgacctcggaaaaggacggcagatgcccgtccactacggctgcaaggaacgccatttcgtcactatcagctcccctctcgcaactcagatcccacaggccgtcggagcagcgtacgcggccaagcgcgccaatgcgaaccgggtcgtgatctgttacttcggagaaggtgcagccagcgagggcgatgcgcatgccggcttcaacttcgccgctaccctggaatgtccgatcattttcttttgccggaacaacggatacgcgatttccaccccaacgtcggaacagtatcgcggggacgggatcgccgcccggggaccaggatacggaattatgtcaatccgggtggacggaaatgatgtgtttgctgtttacaacgcgaccaaggaggctagacgcagagcggttgcggaaaaccaaccttttctcatcgaggcgatgacgtaccgcattggacatcactcaacctccgatgactcgagcgcttaccggtcagtggatgaagtgaactactgggacaaacaggatcatccgatctcacggctccggcattacctgctgtcacagggatggtgggatgaagagcaggagaaagcctggcggaagcaatctcgccgaaaagtcatggaagcctttgaacaggcggaacgcaagccgaagccgaacccaaatctgctgttttcggacgtctatcaggagatgcccgcccaactgcggaagcagcaagaatcgcttgcgaggcacctccaaacttacggagagcactatccgctggaccacttcgacaag

SEQ ID NO: 14719 - DNA, 1335 bp, Artificial Sequence
  derived and/or modified sequence
atggcagtcgcaatagccgcagcacgagtgtggcgccttaatcggggattgtcacaagcagcacttcttctgctcagacaaccaggagctagaggtctggcaagatcccaccctccacgccagcagcaacaatttagttccttggatgataagccccagtttccaggtgctagcgccgaattcatcgacaaattggagtttatacaaccaaacgtgatatcggggattcctatctacagagtgatggacaggcaaggtcagatcatcaatccgtcagaggaccctcatcttcccaaggaaaaggtgctgaagctgtacaagtcgatgacccttctgaacacgatggacagaatcctgtacgaatcccagcggcagggtcggatttcattctacatgactaactacggggaagaggggactcacgttggatcagccgcagccctcgacaacacggatctggtttttggacagtacagagaagcaggtgtgcttatgtacagagattaccccctggaacttttcatggcacagtgttacggcaatatcagcgaccttgggaagggacggcaaatgcccgtgcattacggatgtaaggaaagacactttgtgactatttcgagcccgctcgccacgcagattccgcaagcagtgggtgcggcatacgcagcaaagagggctaacgccaacagggtggtgatttgttactttggtgaaggagcagcaagcgagggggacgcgcatgcaggcttcaattttgcagcgaccctggaatgccccatcatattcttctgccggaacaacggctacgcaatatcgactccgacctcggagcagtatcggggtgatggaatcgccgcaagaggccccggttacggaattatgtcgattagagtggacggcaacgatgtatttgcagtgtacaatgccaccaaagaggcaagacgaagggcagtggcagaaaatcagccttttttgattgaagccatgacttacagaatcggccatcacagcaccagcgatgattcgtcagcgtacagaagcgtcgatgaggtcaattactgggataaacaagaccatccaatatcaaggcttagacattatctcctgtcacaggggtggtgggacgaagagcaggaaaaggcatggcgcaagcaaagcagaaggaaggtcatggaagcattcgaacaggccgaaagaaagccaaagcctaaccctaacctgcttttcagcgacgtctaccaagaaatgcccgctcagctgcgcaaacaacaagagagccttgcaagacatctgcaaacctacggagaacattaccctctggatcattttgataag

SEQ ID NO: 14720 - DNA, 1335 bp, Artificial Sequence
  derived and/or modified sequence
atggccgtagccattgccgccgctagggtgtggcggttgaatcgcgggctgagccaggctgccctgctgttgttgcgacagccaggcgcacggggcctggcgcgaagccatccaccaaggcagcagcagcagttctctagccttgacgataaaccacagtttcccggcgcaagtgcagagtttatcgacaagctggagtttattcagccgaatgtgattagcggaatccccatatatcgggtgatggatcgccagggtcagatcatcaaccccagtgaggacccgcacctgccaaaggagaaagtactgaagctctataagagcatgaccctgctgaacactatggatagaatcctctatgagagccagaggcaagggaggatttccttctatatgaccaattacggggaggaagggacacatgtaggctccgccgctgcactcgacaatacggacctggtctttggacaatatcgggaagccggggtcctgatgtaccgagattacccgctggaactgtttatggcccaatgttacgggaatatctccgacctgggaaagggcagacagatgcccgtgcattatggttgcaaggaaagacatttcgtcaccatcagtagcccgctcgccacacagatacctcaggcggtaggggctgcatacgctgccaaaagagctaatgcaaatcgcgtggtaatttgttactttggagaaggggcagcctcagagggagacgctcacgcaggctttaattttgcagcaacactggaatgtcctatcatcttcttctgtcgaaacaacgggtacgcaatctccacacctacatccgagcagtaccggggcgacggcattgctgcacgggggccaggctacgggatcatgagtattcgggtggatggcaatgatgtgtttgccgtgtacaatgcaacaaaggaggccagaagacgagctgtcgccgagaaccaacctttcctgatcgaggccatgacataccggattggacatcacagcacaagtgacgacagttctgcctacagatccgtggacgaggtcaattattgggataaacaggatcacccgatctcccggctgagacactatctgctgtcccaggggtggtgggacgaggaacaggaaaaagcatggagaaagcaatcccggcgaaaggtcatggaggccttcgaacaggcggagcgcaaacccaagcccaatcctaacctgctgttctctgacgtgtaccaggagatgcctgctcagctgagaaagcaacaggaatccctcgctagacacctgcagacttacggcgaacactacccactggaccatttcgacaaa

SEQ ID NO: 14721 - DNA, 1335 bp, Artificial Sequence
  derived and/or modified sequence
atggcagtggctattgccgctgcgagagtgtggagactgaacagaggactgtctcaggcggcgttgttgctcctgcgtcagccgggtgcacgtggactcgcacgatcccaccctccacggcagcaacaacagttttcgtccctcgacgataaaccgcaattccctggggcctcggctgagttcatagataagctggaattcatccaacccaatgtcatttcgggcatacctatatacagggtcatggataggcagggacaaatcatcaatccctccgaggatccacatctgccaaaggaaaaggtgcttaagctgtacaaaagcatgacgctcctgaataccatggataggattctgtacgagtcccaaagacagggcagaatctccttttacatgaccaattacggagaggagggaacccatgtgggctcggctgctgcactggacaacactgatctggtctttggacagtacagggaagcgggagtgcttatgtaccgggactatccccttgaactcttcatggcccagtgttacggcaacatatcagacctggggaagggacggcaaatgccggtccactacggatgtaaggaaaggcactttgtgacgatttccagcccactggcaactcagatccctcaagccgtcggggcggcatatgcagcgaagcgtgcaaacgcgaatagggtggtgatctgctactttggcgagggagcagcaagcgaaggcgacgcacatgcagggtttaacttcgccgcgactctggaatgtccaataatcttcttctgtcgtaataacggctacgcgatttcaactccaactagcgaacaataccgtggagatggaattgcagcaaggggacctggctacgggattatgtccattagagtggacggtaatgatgtctttgcggtttacaatgcaaccaaggaagcacgccgtagagcagtggcagaaaaccaaccttttcttattgaggcaatgacgtaccggattggacatcactcaacttcggatgattccagcgcataccggtcggtggacgaagtgaactactgggacaagcaggaccatcctatctcgcgcctgcgccattaccttctgtcgcagggctggtgggacgaagaacaggagaaagcatggcgaaagcaatcgagacgaaaggtgatggaggcctttgaacaagcggagcggaagcccaaaccgaacccaaacctccttttcagcgatgtgtaccaggaaatgccagcacaactgcgtaagcaacaggaatccctcgcgcggcatcttcagacttacggagagcattatccactggatcactttgataaa

SEQ ID NO: 14722 - DNA, 1335 bp, Artificial Sequence
  derived and/or modified sequence
atggccgtggctatagccgctgcacgtgtgtggcggttaaacaggggactgtctcaggctgccctgctgctactgaggcaacccggggcccgtgggctagcccggtctcaccccccaagacaacaacagcagttctcttcccttgacgacaagccccaattccccggtgcatcagctgagttcatcgataaacttgagttcatccaaccaaacgtcattagtggtattccaatttaccgtgtcatggatcgtcagggccagatcatcaatcctagtgaggacccccacctgcctaaggagaaagttctcaagctctataaatctatgactcttctgaacacaatggacagaatactgtacgagtctcagcggcagggtaggatcagcttctatatgacaaactacggtgaggaggggacccatgtcgggtccgctgctgccctggacaacactgatctagtgttcgggcagtaccgggaagccggtgttctgatgtatagagactaccctctggaactgtttatggcccaatgctacggaaacatatcagatctgggtaagggccgtcagatgcccgttcactatggttgtaaagagaggcacttcgttaccatctctagtccactagcaacacagatcccacaggctgttggcgcagcctatgctgctaaacgcgcaaacgccaaccgcgtggtcatctgttattttggggagggagccgcctccgagggcgacgctcacgcaggctttaatttcgcagctaccttggagtgtccaattatcttcttctgtcgaaataacggttacgcaatatctacccctactagtgaacaatacaggggcgacggtatcgccgccagaggcccaggatacgggataatgagcatcagagtggatggaaacgacgtcttcgccgtctataatgccaccaaggaggctagacgccgcgccgtcgctgagaaccagccattcctaatcgaagcaatgacttatagaataggccaccacagcacttctgacgattctagcgcctaccgcagtgttgacgaggtgaattattgggataagcaggaccatccaatatctaggctgcgtcactacctgttaagtcagggatggtgggatgaggagcaggaaaaggcatggcggaaacagtctaggcgtaaggttatggaagcatttgagcaggccgaacgcaaaccaaaacctaaccctaaccttctgttctccgatgtttaccaagaaatgcctgcccaacttagaaaacagcaggagagcctcgctcggcacctgcagacctacggagagcattaccctctggaccacttcgataag

SEQ ID NO: 14723 - DNA, 1335 bp, Artificial Sequence
  derived and/or modified sequence
atggcagtggcaatagcagcagcaagagtgtggcgtttgaatcgggggctttctcaggcagcacttcttcttcttaggcaacctggtgcacgtggactggcaaggtcccaccctccccgacaacaacaacaattttcatcgctcgacgacaagcctcagtttccaggtgcatccgcggagttcattgataaactcgaattcattcagcccaacgtcatctccggcatccccatctaccgcgtcatggatagacagggacagattatcaacccatccgaagatccacatctgccgaaggagaaggtgcttaagctgtacaagtccatgaccctgctgaacactatggatcggattctttacgaaagccaaaggcaagggcgtatttcgttctacatgactaactacggagaagagggtactcacgtgggctccgcagcagcactggacaataccgacctggttttcggacaatacagagaagccggtgtgcttatgtacagagactaccccctggaactgtttatggctcagtgctacggaaacatctccgacctgggaaagggtaggcaaatgccagtgcactacgggtgtaaggagaggcactttgtgaccatatcgagcccactcgcaactcagattcctcaggcagtgggagccgcatacgcagcaaagcgcgcaaacgcgaatagagtggtcatttgttacttcggagagggcgcagcatcggagggagatgcacatgcaggttttaactttgcggcgactctcgaatgtccaatcattttcttttgcagaaataacggttacgcaatcagcactcctaccagcgagcaataccgtggtgatggtatagctgcacgcggtccgggatatggaatcatgtcgatcagagtggatggtaacgacgtgttcgcagtgtacaatgcgactaaagaagcccgtagacgcgcagtggccgagaaccagcctttcttgatcgaagcgatgacctacagaatcggacaccactccacctcagatgactcctcagcctaccggtcagttgacgaggtgaattactgggataagcaagatcatcccatatcccgacttaggcactaccttctgtcccaaggatggtgggacgaggagcaggagaaggcctggagaaaacagtcacggagaaaggtgatggaagcgttcgaacaagcagaaagaaaacctaagccaaacccgaacctgcttttttcagacgtgtaccaagaaatgcccgcccagcttaggaagcaacaagaatcgttggcaagacatctgcagacctacggggagcattaccctcttgaccatttcgacaaa

SEQ ID NO: 14724 - DNA, 1335 bp, Artificial Sequence
  derived and/or modified sequence
atggccgtggccattgctgccgcgcgcgtctggcgtctcaataggggcttaagccaggccgcacttctgctgctgcgccagcctggagctcgtggcctggcccgcagccacccacctcgtcagcagcagcaattttcttcgctagacgacaagcctcagttccccggcgcaagcgccgagttcatcgataagctggagttcattcagcctaatgtgatcagcggcattcctatttatcgtgtgatggatcgccaaggccagatcatcaacccttctgaggacccgcatcttcctaaggaaaaggtgctcaagctatacaagagcatgactctgctgaataccatggatcgcattctgtacgaatcccagcggcagggcagaattagcttctacatgacgaactacggcgaggaaggcacacacgtgggttccgctgcggcactggataacaccgatttagtgttcggtcaatatcgcgaagcgggagtcctgatgtaccgtgactacccgctggagcttttcatggcacagtgctacggaaacatcagcgacctgggcaaaggtcgtcaaatgcctgtgcattacgggtgcaaagaacgccattttgtgactataagctctccgcttgccactcagattccgcaggcagtcggagccgcatatgctgcgaagcgggcaaatgcgaaccgcgtggtgatttgttacttcggcgagggagcggcctcagagggggacgcccacgccggcttcaacttcgccgccacactcgaatgcccgattattttcttttgcagaaataacgggtatgcgatttcaaccccgacttctgagcagtatcgtggcgacggaattgcggctcgaggtccaggttatggcataatgtccatccgggtggacggcaatgacgttttcgcagtttataatgcaaccaaggaagcccggcgcagggcggttgccgagaatcaaccttttctgatcgaggctatgacctatcgaattggtcaccatagcaccagcgacgattcttccgcctaccgctcggtcgacgaagtaaactactgggataaacaggatcacccaatcagccgcctgcgccattacctgctgagccaaggttggtgggatgaagagcaggaaaaggcctggcgtaaacagtcacgtagaaaggttatggaggccttcgagcaggcagaacgcaagccaaagccgaacccgaacctgctcttcagtgatgtttaccaagaaatgccagcacagctgcgcaagcagcaggagagtcttgcgcgtcacctgcagacctacggtgagcattatccactggaccacttcgacaag

SEQ ID NO: 14725 - DNA, 1335 bp, Artificial Sequence
  derived and/or modified sequence
atggccgtggcaatcgctgcagctcgagtgtggaggttgaaccgcggactatcacaggcagccttactgttactccggcagcccggcgcaaggggcctagctcgctcccatcccccacgtcagcagcaacagttctcgtccctggacgacaagccgcagttcccaggggcctccgctgagtttattgacaagctggaatttatacaacccaatgttatctcaggcatccccatctatcgtgtcatggaccggcaggggcagattatcaatccatccgaagatccacatctgcctaaggaaaaggttcttaaactttacaagtctatgactctgctaaacactatggacaggatcctctacgagtcccagcgtcagggtcgcatttctttttatatgaccaattatggagaggaagggacgcatgtggggagtgccgccgcacttgataataccgatttggttttcgggcaatacagagaggcgggggtactgatgtaccgcgactatccactagaattattcatggcacaatgctacggaaacatcagtgatctcggcaaggggaggcagatgcctgtccattatgggtgtaaggaaaggcactttgtgaccatttctagccctctggctactcagatccctcaggccgtaggcgccgcatacgccgccaaaagggccaacgccaatagagtggtcatatgttacttcggcgaaggcgccgctagcgaaggggacgcccatgctggatttaatttcgcggcgacgctcgaatgccccattattttcttttgtcgtaacaacggctacgcgatctccacaccgacgtccgagcagtatcggggagacggaatcgcagctagaggtccgggttacggtataatgagcataagggttgacggcaacgatgtttttgccgtgtataatgctaccaaagaagcccgccggcgggcagtggctgaaaaccagcccttcttgattgaggccatgacctatcgcatcggacatcactctaccagcgacgactcaagcgcatacaggagcgtagacgaggtgaactattgggacaagcaggaccaccccatcagtcgactccgccattacctgttaagtcagggctggtgggacgaagaacaggagaaggcgtggcgcaagcaaagccggagaaaagtgatggaggcttttgagcaggcggagcgcaaaccaaagcctaatccaaacctactcttctctgacgtataccaggagatgcctgctcaacttcgaaagcaacaagagtctctcgcacgacacttgcagacttacggggaacactacccgctcgatcactttgacaag

SEQ ID NO: 14726 - DNA, 2103 bp, Artificial Sequence
  derived and/or modified sequence
accaacaatctggctccgcccagtcccacctcctaactctggcaacgccattggacatttgggaacagaaggcaggccttggcattgatccgctttactctgggcccccgggccctaaatccctgaggccctggtcaggttgccctcttctttgcctgttacaggagtaactacaatgaggcgattggagaaaattttgggtagatagatttttttttctccaaatctctgtgcattctatctaccacagaacgggaagaagatggttttcttgtcagatggtgctggagtttgcgtcaggcacataaagaggcagccccgaatctagcctacgtgagtgccggaccgctgagtggttgttagccaagatggcggtagcgatcgctgcagcgagggtctggcggctaaaccgtggtttgagccaggctgccctcctgctgctgcggcagcctggggctcggggactggctagatctcacccccccaggcagcagcagcagttttcatctctggatgacaagccccagttcccaggggcctcggcggagtttatagataagttggaattcatccagcccaacgtcatctctggaatccccatctaccgcgtcatggaccggcaaggccagatcatcaaccccagcgaggacccccacctgccgaaggagaaggtgctgaagctctacaagagcatgacactgcttaacaccatggaccgcatcctctatgagtctcagcggcagggccggatctccttctacatgaccaactatggtgaggagggcacgcacgtggggagtgccgccgccctggacaacacggacctggtgtttggccagtaccgggaggcaggtgtgctgatgtatcgggactaccccctggaactattcatggcccagtgctatggcaacatcagtgacttgggcaaggggcgccagatgcctgtccactacggctgcaaggaacgccacttcgtcactatctcctctccactggccacgcagatccctcaggcggtgggggcggcgtacgcagccaagcgggccaatgccaacagggtcgtcatctgttacttcggcgagggggcagccagtgagggggacgcccatgccggcttcaacttcgctgccacacttgagtgccccatcatcttcttctgccggaacaatggctacgccatctccacgcccacctctgagcagtatcgcggcgatggcattgcagcacgaggccccgggtatggcatcatgtcaatccgcgtggatggtaatgatgtgtttgccgtatacaacgccacaaaggaggcccgacggcgggctgtggcagagaaccagcccttcctcatcgaggccatgacctacaggatcgggcaccacagcaccagtgacgacagttcagcgtaccgctcggtggatgaggtcaattactgggataaacaggaccaccccatctcccggctgcggcactatctgctgagccaaggctggtgggatgaggagcaggagaaggcctggaggaagcagtcccgcaggaaggtgatggaggcctttgagcaggccgagcggaagcccaaacccaaccccaacctactcttctcagacgtgtatcaggagatgcccgcccagctccgcaagcagcaggagtctctggcccgccacctgcagacctacggggagcactacccactggatcacttcgataagtgagacctgctcagcccacccccacccatcctcagctaccccgagaggtagccccactctaaggggagcagggggacctgacagcacaccactgtcttccccagtcagctccctctaaaatactcagcggccagggcggctgccactcttcacccctgctcctcccggctgttacattgtcaggggacagcatctgcagcagttgctgaggctccgtcagccccctcttcacctgttgttacagtgccttctcccaggggctgggtgagggcacattcaggactagaagcccctctgggcatggggtggacatggcaggtcagcctgtggaacttgcgcaggtgcgagtggccagcagaggtcacgaataaactgcatctctgcgcctggctctctacca

SEQ ID NO: 14727 - DNA, 1213 bp, Artificial Sequence
  derived and/or modified sequence
gatggcggtagcgatcgctgcagcgagggtctggcggctaaaccgtggtttgagccaggctgccctcctgctgctgcggcagcctggggctcggggactggctagatctcacccccccaggcagcagcagcagttttcatctctggatgacaagccccagttcccaggggcctcggcggagtttatagataagttggaattcatccagcccaacgtcatctctggaatccccatctaccgcgtcatggaccggcaaggccagatcatcaaccccagcgaggacccccacctgccgaaggagaaggtgctgaagctctacaagagcatgacactgcttaacaccatggaccgcatcctctatgagtctcagcggcagggccggatctccttctacatgaccaactatggtgaggagggcacgcacgtggggagtgccgccgccctggacaacacggacctggtgtttggccagtaccgggaggcaggtgtgctgatgtatcgggactaccccctggaactattcatggcccagtgctatggcaacatcagtgacttgggcaaggggcgccagatgcctgtccactacggctgcaaggaacgccacttcgtcactatctcctctccactggccacgcagatccctcaggcggtgggggcggcgtacgcagccaagcgggccaatgccaacagggtcgtcatctgttacttcggcgagggggcagccagtgagggggacgcccatgccggcttcaacttcgctgccacacttgagtgccccatcatcttcttctgccggaacaatggctacgccatctccacgcccacctctgagcagtatcgcggcgatggcattgcagcacgaggccccgggtatggcatcatgtcaatccgcgtggatggtaatgatgtgtttgccgtatacacagccacagggggtcccaaggcacgtgcttcagttggtccctcatctccgtcaaccacaggcacttgtgggattatgatgccattgcatgccatgggcctctggcatcctgtttcccatcagcaagagctcagcgcggcgcccaagcccaaaggcacaaccaaaccaatcctggaatcctatcttaagagtcatctcctgggacactccaggtatcaactctatatccatcaggatgcagtcaggagagaaaaaccacagagtaacttgaacagggaaagtttaatatag

SEQ ID NO: 14728 - DNA, 1338 bp, Artificial Sequence
  derived and/or modified sequence
atggccgtggccatcgccgccgccagagtgtggagactgaacagaggcctgagccaggccgccctgctgctgctgagacagcccggcgccagaggcctggccagaagccacccccccagacagcagcagcagttcagcagcctggacgacaagccccagttccccggcgccagcgccgagttcatcgacaagctggagttcatccagcccaacgtgatcagcggcatccccatctacagagtgatggacagacagggccagatcatcaaccccagcgaggacccccacctgcccaaggagaaggtgctgaagctgtacaagagcatgaccctgctgaacaccatggacagaatcctgtacgagagccagagacagggcagaatcagcttctacatgaccaactacggcgaggagggcacccacgtgggcagcgccgccgccctggacaacaccgacctggtgttcggccagtacagagaggccggcgtgctgatgtacagagactaccccctggagctgttcatggcccagtgctacggcaacatcagcgacctgggcaagggcagacagatgcccgtgcactacggctgcaaggagagacacttcgtgaccatcagcagccccctggccacccagatcccccaggccgtgggcgccgcctacgccgccaagagagccaacgccaacagagtggtgatctgctacttcggcgagggcgccgccagcgagggcgacgcccacgccggcttcaacttcgccgccaccctggagtgccccatcatcttcttctgcagaaacaacggctacgccatcagcacccccaccagcgagcagtacagaggcgacggcatcgccgccagaggccccggctacggcatcatgagcatcagagtggacggcaacgacgtgttcgccgtgtacaacgccaccaaggaggccagaagaagagccgtggccgagaaccagcccttcctgatcgaggccatgacctacagaatcggccaccacagcaccagcgacgacagcagcgcctacagaagcgtggacgaggtgaactactgggacaagcaggaccaccccatcagcagactgagacactacctgctgagccagggctggtgggacgaggagcaggagaaggcctggagaaagcagagcagaagaaaggtgatggaggccttcgagcaggccgagagaaagcccaagcccaaccccaacctgctgttcagcgacgtgtaccaggagatgcccgcccagctgagaaagcagcaggagagcctggccagacacctgcagacctacggcgagcactaccccctggaccacttcgacaagtag

SEQ ID NO: 14729 - DNA, 1212 bp, Artificial Sequence
  derived and/or modified sequence
atggccgtggccatcgccgccgccagagtgtggagactgaacagaggcctgagccaggccgccctgctgctgctgagacagcccggcgccagaggcctggccagaagccacccccccagacagcagcagcagttcagcagcctggacgacaagccccagttccccggcgccagcgccgagttcatcgacaagctggagttcatccagcccaacgtgatcagcggcatccccatctacagagtgatggacagacagggccagatcatcaaccccagcgaggacccccacctgcccaaggagaaggtgctgaagctgtacaagagcatgaccctgctgaacaccatggacagaatcctgtacgagagccagagacagggcagaatcagcttctacatgaccaactacggcgaggagggcacccacgtgggcagcgccgccgccctggacaacaccgacctggtgttcggccagtacagagaggccggcgtgctgatgtacagagactaccccctggagctgttcatggcccagtgctacggcaacatcagcgacctgggcaagggcagacagatgcccgtgcactacggctgcaaggagagacacttcgtgaccatcagcagccccctggccacccagatcccccaggccgtgggcgccgcctacgccgccaagagagccaacgccaacagagtggtgatctgctacttcggcgagggcgccgccagcgagggcgacgcccacgccggcttcaacttcgccgccaccctggagtgccccatcatcttcttctgcagaaacaacggctacgccatcagcacccccaccagcgagcagtacagaggcgacggcatcgccgccagaggccccggctacggcatcatgagcatcagagtggacggcaacgacgtgttcgccgtgtacaccgccaccggcggccccaaggccagagccagcgtgggccccagcagccccagcaccaccggcacctgcggcatcatgatgcccctgcacgccatgggcctgtggcaccccgtgagccaccagcaggagctgagcgccgcccccaagcccaagggcaccaccaagcccatcctggagagctacctgaagagccacctgctgggccacagcagataccagctgtacatccaccaggacgccgtgagaagagagaagccccagagcaacctgaacagagagagcctgatctag

SEQ ID NO: 14730 - RNA, 1496 nt, Artificial Sequence
  derived and/or modified sequence
gggaaauaagagagaaaagaagaguaagaagaaauauaagagccaccauggcaguggcaauugcagccgccagggucuggcggcugaacagagggcugucacaggcggcacuccugcugcuccgccagccuggggcacgaggccuggccagaucgcaucccccucgucagcaacaacaauucagcucccuugaugauaaaccucaguucccgggugcgagcgccgaguuuaucgauaagcucgaguucauccaaccuaaugugauuagcggaauuccgaucuaccgggugauggacagacaaggacaaaucauuaacccaucggaggauccacaucugccuaaggagaaagucuugaagcucuacaaguccaugacucuucuuaacacuauggaccgaauacuuuacgaaucacagcgccagggaaggaucucguuuuacaugaccaauuacggugaagagggaacccaugugggaucggcagcagcacuggacaauaccgaccucguuuucggucaguaccgggaggcaggagugcucauguauagggacuacccacuggagcuguuuauggcccaaugcuauggcaacauuagcgaucuggguaaagguagacagaugccagugcacuacggguguaaggaacggcacuuugucacuauuucgagcccucuugcaacucaaauaccccaagcugucggagcagcauacgcagcaaagcgggcaaaugcaaacagaguggugaucuguuacuucggagaaggugcagcaucggaaggagacgcgcacgcaggcuucaacuuugcugcgacucuugaaugccccauuaucuucuuuugucggaacaacggcuaugcaauaagcacgccuaccucagaacaguaccgcggagaugguaucgccgcuagggguccaggguacgggauuauguccauuagaguggauggaaacgauguuuuugcgguguacaaugcgacgaaggaagcacgucgcagggccgucgcagaaaaccagccuuuucugauugaggccaugaccuaccgcaucggacaucauuccaccucagaugauucuucggccuaccgauccguggacgaagucaauuacugggauaaacaggaucaucccauuuccagacuucgucauuaccuucugucgcagggcuggugggaugaagaacaggaaaaagccuggcgaaagcaaucaagacgcaaagugauggaagccuuugaacaagcugagagaaagccaaagccuaauccaaaccuucuguuuuccgacguguaccaagaaaugccagcgcaacuccgcaagcaacaagaguccuuggcuagacacuugcaaaccuacggcgaacauuacccccuugaucacuuugacaagugauaauaggcuggagccucgguggccaugcuucuugccccuugggccuccccccagccccuccuccccuuccugcacccguacccccguggucuuugaauaaagucugagugg

SEQ ID NO: 14731 - protein, 353 aa, Artificial Sequence
  derived and/or modified sequence
MASSWPPLELQSSNQSQLFPQNATACDNAPEAWDLLHRVLPTFIISICFFGLLGNLFVLLVFLLPRRQLNVAEIYLANLAASDLVFVLGLPFWAENIWNQFNWPFGALLCRVINGVIKANLFISIFLVVAISQDRYRVLVHPMASRRQQRRRQARVTCVLIWVVGGLLSIPTFLLRSIQAVPDLNITACILLLPHEAWHFARIVELNILGFLLPLAAIVFFNYHILASLRTREEVSRTRCGGRKDSKTTALILTLVVAFLVCWAPYHFFAFLEFLFQVQAVRGCFWEDFIDLGLQLANFFAFTNSSLNPVIYVFVGRLFRTKVWELYKQCTPKSLAPISSSHRKEIFQLFWRN

SEQ ID NO: 14732 - DNA, 1062 bp, Artificial Sequence
  derived and/or modified sequence
atggccagcagctggccccccctggagctgcagagcagcaaccagagccagctgttcccccagaacgccaccgcctgcgacaacgcccccgaggcctgggacctgctgcacagagtgctgcccaccttcatcatcagcatctgcttcttcggcctgctgggcaacctgttcgtgctgctggtgttcctgctgcccagaagacagctgaacgtggccgagatctacctggccaacctggccgccagcgacctggtgttcgtgctgggcctgcccttctgggccgagaacatctggaaccagttcaactggcccttcggcgccctgctgtgcagagtgatcaacggcgtgatcaaggccaacctgttcatcagcatcttcctggtggtggccatcagccaggacagatacagagtgctggtgcaccccatggccagcagaagacagcagagaagaagacaggccagagtgacctgcgtgctgatctgggtggtgggcggcctgctgagcatccccaccttcctgctgagaagcatccaggccgtgcccgacctgaacatcaccgcctgcatcctgctgctgccccacgaggcctggcacttcgccagaatcgtggagctgaacatcctgggcttcctgctgcccctggccgccatcgtgttcttcaactaccacatcctggccagcctgagaaccagagaggaggtgagcagaaccagatgcggcggcagaaaggacagcaagaccaccgccctgatcctgaccctggtggtggccttcctggtgtgctgggccccctaccacttcttcgccttcctggagttcctgttccaggtgcaggccgtgagaggctgcttctgggaggacttcatcgacctgggcctgcagctggccaacttcttcgccttcaccaacagcagcctgaaccccgtgatctacgtgttcgtgggcagactgttcagaaccaaggtgtgggagctgtacaagcagtgcacccccaagagcctggcccccatcagcagcagccacagaaaggagatcttccagctgttctggagaaactag

SEQ ID NO: 14733 - DNA, 1062 bp, Artificial Sequence
  derived and/or modified sequence
atggcctcatcgtggccgccacttgagctgcagagcagcaaccagtctcagctattcccccagaacgccacagcctgcgataacgcacctgaggcctgggacctgctacatcgtgtactgccaacctttatcatcagtatttgtttctttggcttgcttggcaacctttttgtcctcctggtattcctattgcctagaaggcaacttaacgttgccgagatctatttggctaatctcgccgcctctgatctagtgttcgtactggggctacctttttgggccgagaatatctggaatcagttcaattggcccttcggcgccttactttgcagggtgatcaatggcgttataaaggccaacctgtttatctccattttcctggtggtggctatcagtcaggatagataccgcgttctggtccatcccatggctagccgccggcagcagcgcaggagacaggcacgggtgacgtgtgtcctcatttgggtcgtcggaggcctccttagcatccccaccttccttttacgctccatacaggccgttcccgatctgaacatcaccgcgtgcatcctgctcctgcctcacgaggcctggcactttgccagaattgtggagctgaatattctagggttcctgctgccactggccgccatagtgttttttaactaccacatcctggcttctctgagaactagagaggaagtcagtagaactcgatgtggaggtcgcaaagattcaaagactacagcgctgatcttgacccttgtcgttgcgtttcttgtttgctgggctccataccacttcttcgctttcctcgagtttcttttccaggtacaagccgtgagggggtgtttctgggaggatttcatcgatctagggctccaactggcaaatttcttcgcatttaccaactccagtttgaatccggtcatttacgtgtttgtcgggcgcctgttcaggaccaaagtctgggagctgtacaagcaatgcacccccaagtcactagctccaatcagtagctcacatcgaaaggagatttttcagctattttggcgaaactag

SEQ ID NO: 14734 - DNA, 1062 bp, Artificial Sequence
  derived and/or modified sequence
atggccagctcctggccacccctggagctgcagagcagcaaccagagccagctgttcccccagaatgccacagcctgtgacaatgcccctgaggcctgggacctgctgcaccgggtgctgcccaccttcatcatcagcatctgcttcttcggcctgctgggcaacctgtttgtgctgctggtgttcctgctgccccggcggcagctgaatgtggccgagatctacctggccaacctggccgccagtgacctggtgtttgtgctgggcctgcccttctgggccgagaacatctggaaccagttcaactggccctttggagccctgctgtgcagggtcatcaacggggtcatcaaggccaacctcttcatcagcatcttcctggtggtggccatcagccaggaccgctacagagtgctggtgcaccccatggccagccggcggcagcagaggcggcggcaggcccgggtgacctgtgtgctgatctgggtggtgggcggcctgctgagcatccccaccttcctgctgcggagcatccaggccgtgcctgacctgaacatcacagcctgcatcctgctgctgccccatgaggcctggcactttgccagaattgtggagctgaacatcctgggcttcctgctgcccctggccgccatcgtgttcttcaactaccacatcctggccagcctgcggacccgggaggaggtgtccaggacccgctgtggcggcaggaaggacagcaagaccacagccctgatcctgaccctggtggtggccttcctggtgtgctgggccccctaccacttctttgccttcctggagttcctgttccaggtgcaggccgtgcggggctgcttctgggaggacttcatcgacctgggcctgcagctggccaacttctttgccttcaccaacagcagcctgaaccctgtgatctacgtgtttgtgggccgcctcttccgcaccaaggtgtgggagctgtacaagcagtgcacccccaagagcctggcccccatcagcagcagccacaggaaggagatcttccagctgttctggaggaactag

SEQ ID NO: 14735 - DNA, 1062 bp, Artificial Sequence
  derived and/or modified sequence
atggccagcagctggccccccctggagctgcagagcagcaaccagtcccagcttttcccacaaaacgccacggcatgtgacaacgccccggaagcgtgggatcttctgcatcgagtcctgcccacgttcatcatttccatctgcttcttcggattattgggtaacttattcgtgctacttgtctttctcctcccgagaaggcagctgaacgtggccgaaatctatctggccaatctggccgcatctgacttggtgttcgttctgggtctgcctttctgggcagaaaatatctggaaccagtttaattggcccttcggggcgctgctgtgtagggtgatcaatggggttattaaggctaacctgttcatctccatctttctggttgtcgccattagtcaggatcgttaccgcgtgctggtgcacccaatggcttccaggcgtcagcagcgcaggcggcaggcaagggtgacctgtgtgttaatctgggtcgtcgggggccttctgtccatccccacgttccttttgagatcaattcaagctgtccccgacctgaatatcacagcctgtattcttctgctgccccacgaagcctggcacttcgcacggattgtagaactgaatattctcggcttcctcctgcctttggcggctatagtctttttcaactaccacattctcgcctcgcttaggacacgggaagaagtcagtcgtacccgctgtggtgggcgaaaggattctaaaacgactgccctgatccttaccctggttgtggctttcttggtatgctgggcaccctatcacttcttcgcctttctcgaattcctcttccaagtacaggctgtgagaggttgtttttgggaggactttatcgatctgggcctgcagctggcaaacttctttgcatttactaattcaagtctgaatcctgtgatctatgtttttgtgggacggctgtttcgcacaaaggtatgggaactgtacaagcagtgcactcccaagtcactcgcaccgatatcctccagccaccgaaaagagatcttccagctcttttggagaaactag

SEQ ID NO: 14736 - DNA, 1062 bp, Artificial Sequence
  derived and/or modified sequence
atggcctcctcgtggcccccactagaattgcaatcatctaaccaatcccaactgtttccacagaacgccactgcctgtgataatgcgccagaggcctgggatctactgcaccgggtcctgcctacattcatcatttccatctgtttcttcggcctgcttggcaatctcttcgtgctgcttgtgtttctactgcctcgtaggcaactcaatgttgccgaaatctacctcgccaacctggctgcatctgatctcgtgtttgtgctcggattacctttctgggctgaaaacatatggaatcagttcaactggcctttcggtgctctgctgtgtagggtgatcaatggagtgatcaaagcaaacctcttcattagcatattcctggtggtcgcgatctcccaggatcggtacagggtactagtgcatcccatggcgtctaggcgccagcagcgcagacggcaggcgcgtgtgacgtgcgttctcatctgggtggtcgggggactgctaagcatccctacattcctcctgcggagcatccaagcagtgcccgaccttaatatcacggcctgcattctgctactccctcacgaagcctggcatttcgccagaatagttgaactgaacatcctgggatttctactccctctggcggctatagtcttctttaattaccatatactggccagcctgcgaacgcgtgaagaggtgtccagaacccgatgcggcggacgaaaggactctaagactacggcattgattctgactcttgtcgtggctttcctggtatgctgggctccatatcacttttttgcattcttagagtttctcttccaggtgcaagccgtgagagggtgcttttgggaggactttatagatctagggctgcagttggccaacttctttgccttcaccaactctagtctcaacccggtaatctacgtgtttgttggacgcctgtttagaacaaaggtgtgggaattgtacaagcaatgcacccccaaaagtctggcacctataagcagtagccaccggaaagaaatattccagttattttggagaaactag

SEQ ID NO: 14737 - DNA, 1687 bp, Artificial Sequence
  derived and/or modified sequence
attcgaagtggctcccacaaaagctgctgcagagccccagacattcagaagccaatagtgaaggggccaaaagccatccctcaatgttcactgacactttgcgagccttggggcaagttggcgatgtcaaaacatgtttttagggcgtgtttgccaacatacaggtcttgggcaggattgcagacctctgcagatggtaccaaagtaaagggggagatggtagctgaataatctcttatcatccctaaagtgcaaagtgaaatgagagtggatttttccttccaaatccacttggagtgagtcccgaaagactcacttttgcggcaatccccacaatgacatcactggagcggaggttatataatttaaagcaaccacatctccacagcacttcccagaagagaaaactcctccaaaagcagctctcactatcagaaaacccaactacagttgtgaacgccttcattttctgcctgaggtctcagtccgtcggcccagactgaagtgcagtggcacaatcatagctcgctgcagcctcgaccttccaggcttaaacgattctcccacctcagcctctcgagttgctgggaccacaggtcactgtgcatggcatcatcctggccccctctagagctccaatcctccaaccagagccagctcttccctcaaaatgctacggcctgtgacaatgctccagaagcctgggacctgctgcacagagtgctgccaacatttatcatctccatctgtttcttcggcctcctagggaacctttttgtcctgttggtcttcctcctgccccggcggcaactgaacgtggcagaaatctacctggccaacctggcagcctctgatctggtgtttgtcttgggcttgcccttctgggcagagaatatctggaaccagtttaactggcctttcggagccctcctctgccgtgtcatcaacggggtcatcaaggccaatttgttcatcagcatcttcctggtggtggccatcagccaggaccgctaccgcgtgctggtgcaccctatggccagccggaggcagcagcggcggaggcaggcccgggtcacctgcgtgctcatctgggttgtggggggcctcttgagcatccccacattcctgctgcgatccatccaagccgtcccagatctgaacatcaccgcctgcatcctgctcctcccccatgaggcctggcactttgcaaggattgtggagttaaatattctgggtttcctcctaccactggctgcgatcgtcttcttcaactaccacatcctggcctccctgcgaacgcgggaggaggtcagcaggacaaggtgcgggggccgcaaggatagcaagaccacagcgctgatcctcacgctcgtggttgccttcctggtctgctgggccccttaccacttctttgccttcctggaattcttattccaggtgcaagcagtccgaggctgcttttgggaggacttcattgacctgggcctgcaattggccaacttctttgccttcactaacagctccctgaatccagtaatttatgtctttgtgggccggctcttcaggaccaaggtctgggaactttataaacaatgcacccctaaaagtcttgctccaatatcttcatcccataggaaagaaatcttccaacttttctggcggaattaaaacagcattgaaccaagaa

SEQ ID NO: 14738 - protein, 206 aa, Artificial Sequence
  derived and/or modified sequence
MAVKKIAIFGATGQTGLTTLAQAVQAGYEVTVLVRDSSRLPSEGPRPAHVVVGDVLQAADVDKTVAGQDAVIVLLGTRNDLSPTTVMSEGARNIVAAMKAHGVDKVVACTSAFLLWDPTKVPPRLQAVTDDHIRMHKVLRESGLKYVAVMPPHIGDQPLTGAYTVTLDGRGPSRVISKHDLGHFMLRCLTTDEYDGHSTYPSHQYQ

SEQ ID NO: 14739 - DNA, 621 bp, Artificial Sequence
  derived and/or modified sequence
atggcagtgaaaaagattgcaatctttggggccacggggcagaccggcctgactactcttgctcaagccgtgcaggcagggtacgaggttaccgtgctggttcgggactcaagcagactcccctctgaaggaccacggccagcccatgtggtcgtgggggacgttctgcaggccgcagacgtggacaagactgtagctggacaagatgcagtgatcgttctcctagggacacggaacgaccttagccccaccacagtgatgtccgagggcgctagaaatatcgtggccgcaatgaaggcacacggcgtggacaaggttgtcgcatgcacctctgcgtttctgctgtgggatcccaccaaagttccgcctcggctgcaggcagtgactgacgatcacatacgcatgcacaaggtgctgcgagaatctgggctgaagtacgtggccgtgatgccgccccacataggtgatcagcctttaacaggtgcctacacagttaccctcgatggtaggggacccagcagagttatcagcaaacacgacctgggccactttatgttgcgttgcttgactaccgacgagtacgacggacattctacatatccttcccatcaataccagtag

SEQ ID NO: 14740 - DNA, 621 bp, Artificial Sequence
  derived and/or modified sequence
atggctgtgaagaagatcgccatctttggagccaccggccagacaggcctgaccaccctggcccaggccgtgcaggccggctatgaggtgacagtgctggtgcgggacagcagccggctgcccagcgagggccccaggcctgcccacgtggtggtgggagatgtgctgcaggccgcagatgtggacaagacagtggccggccaggatgctgtgattgtgctgctgggcaccagaaatgacctgagccccaccaccgtgatgtctgagggcgccaggaacatcgtggccgccatgaaggcccatggagtggacaaggtggtggcctgcaccagcgccttcctgctgtgggaccccaccaaggtgcccccccggctgcaggccgtgacagatgaccacatccgcatgcacaaggtgctgcgggagagcggcctgaagtatgtggccgtgatgccaccccacatcggggaccagcccctgaccggggcctacacagtgaccctggatggccggggccccagcagggtcatcagcaagcatgacctgggccacttcatgctgcgctgcctgaccacagatgaatatgatggccacagcacctaccccagccaccagtaccagtag

SEQ ID NO: 14741 - DNA, 621 bp, Artificial Sequence
  derived and/or modified sequence
atggccgtgaagaagatcgccatcttcggcgccaccggccagaccgggctcaccactttggcccaggcagttcaggcaggctacgaagttaccgtgcttgttcgcgacagctccaggctcccctccgaggggccccgccccgcccatgttgtggtgggggacgtgctccaggcagctgacgttgacaaaaccgtggctgggcaagatgcagttatcgtgcttcttggcaccagaaacgacctttcaccgaccaccgtgatgtcggagggtgctaggaatatcgtagccgcaatgaaggctcacggtgtggacaaggttgtggcttgcaccagtgctttcttattgtgggacccgacgaaagtcccgcctaggctgcaggccgtgactgacgatcatatacggatgcacaaagtgttgcgggagtccggcctgaagtatgttgcagtcatgccccctcatatcggtgatcagccgctcaccggagcttatacggtgacactcgacggccggggaccaagtcgcgtgataagtaaacatgatctgggacatttcatgctacgttgtctgacaactgacgagtatgacggccatagcacctatccaagccaccagtatcaatag

SEQ ID NO: 14742 - DNA, 621 bp, Artificial Sequence
  derived and/or modified sequence
atggcagtaaagaagatcgcgatatttggggctaccggccagaccggactaaccacactggctcaggcagtgcaagcaggttatgaggtaaccgtgctagtgagagattcatctaggcttccgtctgagggtccgagacccgcacatgttgttgtgggtgacgtcctgcaggctgctgatgtagataagacagttgctgggcaagacgcggtgatcgtcttgctgggtacaaggaacgacctgtcccccaccaccgtgatgtcagaaggagcacgcaacatcgttgctgccatgaaggcccacggcgtcgataaggtggtggcttgcacatctgccttccttttatgggatcccacaaaggtgccaccacggttgcaggctgtgactgatgatcatatacggatgcacaaggtcttgagggagagcggactgaagtacgtagccgttatgcccccacacatcggcgatcaacctttaaccggcgcatacactgtgaccctggatggtcgcggtccatccagagtcatctcgaagcacgatctgggacactttatgctccgctgccttaccacggacgagtatgacggacactctacctatccgtcccaccaataccagtag

SEQ ID NO: 14743 - DNA, 854 bp, Artificial Sequence
  derived and/or modified sequence
ggcgtggcccttcgagccagctccgccccgttgttcctggcttgagtagggcagagagcaccgcccagcagccagtgggttcccgcgcgtgccgagactctgaggccttgcacccccacgatcccgtacgatggccgtcaagaagatcgcgatcttcggcgccactggccagaccgggctcaccaccctggcgcaggcggtgcaagcaggttacgaagtgacagtgctggtgcgggactcctccaggctgccatcagaggggccccggccggcccacgtggtagtgggagatgttctgcaggcagccgatgtggacaagaccgtggctgggcaggacgctgtcatcgtgctgctgggcacccgcaatgacctcagtcccacgacagtgatgtccgagggcgcccggaacattgtggcagccatgaaggctcatggtgtggacaaggtcgtggcctgcacctcggctttcctgctctgggaccctaccaaggtgcccccacgactgcaggctgtgactgatgaccacatccggatgcacaaggtgctgcgggaatcaggcctgaagtacgtggctgtgatgccgccacacataggagaccagccactaactggggcgtacacagtgaccctggatggacgagggccctcaagggtcatctccaaacatgacctgggccatttcatgctgcgctgcctcaccaccgatgagtacgacggacacagcacctacccctcccaccagtaccagtagcactctgtccccatctgggagggtggcattctgggacatgaggagcaaaggaagggggcaataaatgttgagccaagagcttcaaattactctagagaaaccg

SEQ ID NO: 14744 - DNA, 621 bp, Artificial Sequence
  derived and/or modified sequence
atggccgtgaagaagatcgccatcttcggcgccaccggccagaccggcctgaccaccctggcccaggccgtgcaggccggctacgaggtgaccgtgctggtgagagacagcagcagactgcccagcgagggccccagacccgcccacgtggtggtgggcgacgtgctgcaggccgccgacgtggacaagaccgtggccggccaggacgccgtgatcgtgctgctgggcaccagaaacgacctgagccccaccaccgtgatgagcgagggcgccagaaacatcgtggccgccatgaaggcccacggcgtggacaaggtggtggcctgcaccagcgccttcctgctgtgggaccccaccaaggtgccccccagactgcaggccgtgaccgacgaccacatcagaatgcacaaggtgctgagagagagcggcctgaagtacgtggccgtgatgcccccccacatcggcgaccagcccctgaccggcgcctacaccgtgaccctggacggcagaggccccagcagagtgatcagcaagcacgacctgggccacttcatgctgagatgcctgaccaccgacgagtacgacggccacagcacctaccccagccaccagtaccagtag

SEQ ID NO: 14745 - protein, 312 aa, Artificial Sequence
  derived and/or modified sequence
MRMLLALLALSAARPSASAESHWCYEVQAESSNYPCLVPVKWGGNCQKDRQSPINIVTTKAKVDKKLGRFFFSGYDKKQTWTVQNNGHSVMMLLENKASISGGGLPAPYQAKQLHLHWSDLPYKGSEHSLDGEHFAMEMHIVHEKEKGTSRNVKEAQDPEDEIAVLAFLVEAGTQVNEGFQPLVEALSNIPKPEMSTTMAESSLLDLLPKEEKLRHYFRYLGSLTTPTCDEKVVWTVFREPIQLHREQILAFSQKLYYDKEQTVSMKDNVRPLQQLGQRTVIKSGAPGRPLPWALPALLGPMLACLLAGFLR

SEQ ID NO: 14746 - DNA, 939 bp, Artificial Sequence
  derived and/or modified sequence
atgcgcatgctgctcgccctgctggccctcagcgcagcccggcccagcgcttccgccgagtctcactggtgttatgaggtacaggctgagtcatctaattacccatgcctggtgccagtcaagtggggcggcaattgtcagaaagatagacagtctcccatcaacattgtgaccaccaaggccaaagtagataagaagttaggacggttcttcttttccggttacgacaagaaacaaacctggacggtgcagaacaatggccactctgtgatgatgttactggaaaacaaggcatcaatatcaggtggaggactcccagcgccttaccaagcaaaacagctgcacttgcactggagtgacttaccctacaaggggtcagagcattcacttgacggggagcatttcgctatggaaatgcatattgtccacgagaaagaaaagggaacttcacggaacgtgaaagaggctcaagatcctgaagatgaaatagccgtcctggcctttttggttgaagccggcacccaggtgaatgaaggcttccagcctttggtggaagccctgtccaatatccctaagccagagatgagcaccaccatggcagaatcttccttgctggatctgttacccaaggaggaaaagcttcgtcactattttaggtacctggggtcgctgactacacccacttgcgacgagaaagtggtgtggacagtcttccgtgaacccattcagctccaccgggaacaaatcctggcattttcacagaagttgtactacgacaaggagcagactgtgagcatgaaagacaacgtgcgacccttgcagcaactgggacagaggactgtcattaagtcaggggcgccaggccggcccctaccttgggcactgcccgcccttctcggacctatgctcgcctgtctgctcgcaggcttcctgcggtag

SEQ ID NO: 14747 - DNA, 939 bp, Artificial Sequence
  derived and/or modified sequence
atgaggatgctgctggccctgctggccctgtctgctgcccggcccagcgccagcgctgagagccactggtgctatgaggtgcaggccgagagcagcaactacccctgcctggtgcctgtgaagtggggcggcaactgccagaaggaccggcagagccccatcaacatcgtgaccaccaaggccaaggtggacaagaagctgggccgcttcttcttcagcggctatgacaagaagcagacctggacagtgcagaacaacggccacagcgtgatgatgctgctggagaacaaggccagcatcagcggcggcggcctgcctgccccctaccaggccaagcagctgcacctgcactggagcgacctgccctacaagggcagcgagcacagcctggatggagagcactttgccatggagatgcacatcgtgcatgagaaggagaagggcaccagcagaaatgtgaaggaggcccaggaccctgaagatgaaattgctgtgctggccttcctggtggaggccggcacccaggtgaatgaaggcttccagcccctggtggaggccctgagcaacatccccaagccagagatgagcaccaccatggccgagagcagcctgctggacctgctgcccaaggaggagaagctgcggcactacttccgctacctgggcagcctgaccacccccacctgtgatgagaaggtggtgtggacagtgttccgggagcccatccagctgcaccgggagcagatcctggccttcagccagaagctgtactatgacaaggagcagacagtgtccatgaaggacaacgtgcggcccctgcagcagctgggccagaggacagtcatcaagagcggggcccctggccggcccctgccctgggccctgcctgccctgctgggccccatgctggcctgcctgctggccggcttcctgaggtag

SEQ ID NO: 14748 - DNA, 939 bp, Artificial Sequence
  derived and/or modified sequence
atgcggatgctgctggccctgctggccctgagcgccgcccggccctcagcttcggccgaatcccactggtgttacgaagtccaggctgaatcttctaattacccttgtctggtgccagtcaaatggggtggtaattgtcagaaagatagacagtcccccataaacatcgtgacaacaaaagctaaggtcgataagaagcttggcaggttttttttctccggatacgataagaaacagacctggacagtccagaataacggccacagcgtcatgatgctcctcgagaacaaggccagcatcagcggtggcggccttcctgccccatatcaagctaagcagctccacttgcactggtcggaccttccttataagggcagcgagcattcactggacggggagcattttgctatggagatgcatatcgttcacgagaaggagaagggcactagtagaaacgtgaaggaggctcaggaccctgaggacgagatcgctgtgctcgcgtttcttgtcgaggctggcacacaagtgaatgaagggttccagccacttgtggaagcccttagtaatatacctaaacccgagatgtccacaacgatggctgagtctagcttgctggacctcctgccgaaagaggagaagctgcgccattatttcaggtacctggggagcctaacaacgcctacttgtgacgagaaagtggtctggactgtgtttcgggaaccgatccagctacaccgcgagcagatcttggcatttagccaaaagctctattatgataaggagcagaccgtgtcgatgaaagacaacgtgcgcccactgcagcagctgggccagcggacagtgatcaaatccggagcaccagggcggcctctcccgtgggcacttccagctctgctgggacctatgttggcatgtctgttggccggtttcctgagatag

SEQ ID NO: 14749 - DNA, 939 bp, Artificial Sequence
  derived and/or modified sequence
atgcgcatgttgcttgccttgcttgctctttccgcagcccgaccatcagctagcgctgagtcccactggtgttatgaggtgcaggccgaatcttccaattacccatgtctggtacctgtgaagtggggaggaaattgccagaaagaccgtcagtccccgattaacatagttactactaaggcgaaagtcgacaagaagctgggcaggttcttcttctctggttacgataaaaagcagacttggacagtgcaaaataatggacactcagtgatgatgcttctagaaaataaagcaagcatcagtggtggcggactgcccgcaccatatcaggccaagcaactccacctgcattggtctgatctcccctataagggctccgagcattcattagatggagagcattttgcaatggaaatgcatattgtacacgaaaaagaaaaaggcacaagtcgcaacgtgaaggaggcacaggatcctgaggatgagattgcggttctggcctttctcgttgaagctggcactcaggtcaacgaaggctttcagcccttggtcgaggcactgtctaatatcccaaaaccagagatgagtaccacaatggcagaatccagccttctggatctgctacccaaggaagagaagctccgccattactttcgttacctcgggtccctgaccaccccgacctgcgacgagaaagtggtttggactgtgttccgggaaccgatccagctgcaccgggagcagatactcgctttctcacagaagctgtactacgacaaggaacagactgtgagcatgaaggacaacgtccggccattacagcaacttgggcagcggactgtgattaagtctggagccccaggtcggccattgccttgggcgctgccagcactgttggggcctatgctggcatgcctgttagcagggtttctgcgttag

SEQ ID NO: 14750 - DNA, 1150 bp, Artificial Sequence
  derived and/or modified sequence
cgctataaaacccaggccggcaggatcgctgcacccgcggcggcctcctcggtgcgcgacccccggctcagaggactctttgctgtcccgcaagatgcggatgctgctggcgctcctggccctctccgcggcgcggccatcggccagtgcagagtcacactggtgctacgaggttcaagccgagtcctccaactacccctgcttggtgccagtcaagtggggtggaaactgccagaaggaccgccagtcccccatcaacatcgtcaccaccaaggcaaaggtggacaaaaaactgggacgcttcttcttctctggctacgataagaagcaaacgtggactgtccaaaataacgggcactcagtgatgatgttgctggagaacaaggccagcatttctggaggaggactgcctgccccataccaggccaaacagttgcacctgcactggtccgacttgccatataagggctcggagcacagcctcgatggggagcactttgccatggagatgcacatagtacatgagaaagagaaggggacatcgaggaatgtgaaagaggcccaggaccctgaagacgaaattgcggtgctggcctttctggtggaggctggaacccaggtgaacgagggcttccagccactggtggaggcactgtctaatatccccaaacctgagatgagcactacgatggcagagagcagcctgttggacctgctccccaaggaggagaaactgaggcactacttccgctacctgggctcactcaccacaccgacctgcgatgagaaggtcgtctggactgtgttccgggagcccattcagcttcacagagaacagatcctggcattctctcagaagctgtactacgacaaggaacagacagtgagcatgaaggacaatgtcaggcccctgcagcagctggggcagcgcacggtgataaagtccggggccccgggtcggccgctgccctgggccctgcctgccctgctgggccccatgctggcctgcctgctggccggcttcctgcgatgatggctcacttctgcacgcagcctctctgttgcctcagctctccaagttccaggcttccggtccttagccttcccaggtgggactttaggcatgattaaaatatggacatatttttgg

SEQ ID NO: 14751 - DNA, 939 bp, Artificial Sequence
  derived and/or modified sequence
atgagaatgctgctggccctgctggccctgagcgccgccagacccagcgccagcgccgagagccactggtgctacgaggtgcaggccgagagcagcaactacccctgcctggtgcccgtgaagtggggcggcaactgccagaaggacagacagagccccatcaacatcgtgaccaccaaggccaaggtggacaagaagctgggcagattcttcttcagcggctacgacaagaagcagacctggaccgtgcagaacaacggccacagcgtgatgatgctgctggagaacaaggccagcatcagcggcggcggcctgcccgccccctaccaggccaagcagctgcacctgcactggagcgacctgccctacaagggcagcgagcacagcctggacggcgagcacttcgccatggagatgcacatcgtgcacgagaaggagaagggcaccagcagaaacgtgaaggaggcccaggaccccgaggacgagatcgccgtgctggccttcctggtggaggccggcacccaggtgaacgagggcttccagcccctggtggaggccctgagcaacatccccaagcccgagatgagcaccaccatggccgagagcagcctgctggacctgctgcccaaggaggagaagctgagacactacttcagatacctgggcagcctgaccacccccacctgcgacgagaaggtggtgtggaccgtgttcagagagcccatccagctgcacagagagcagatcctggccttcagccagaagctgtactacgacaaggagcagaccgtgagcatgaaggacaacgtgagacccctgcagcagctgggccagagaaccgtgatcaagagcggcgcccccggcagacccctgccctgggccctgcccgccctgctgggccccatgctggcctgcctgctggccggcttcctgagatag

SEQ ID NO: 14752 - protein, 2339 aa, Artificial Sequence [sequence omitted]

SEQ ID NO: 14753 - DNA, 7020 bp, Artificial Sequence
  derived and/or modified sequence
atggtccggttcggggacgaactcggaggacggtacggcgggccggggggtggcgagcgcgcgcgagggggtggcgccggcggagcaggaggaccagggcccggagggctgcaacccggccaacgggtcttgtacaaacagtcgatcgctcagagagcgcgcactatggctctatataaccctatacccgttaaacagaattgcttcactgttaaccgatctctgtttgtgttcagcgaagataatgtggtgcggaagtatgctaagcgcattaccgagtggccaccattcgagtatatgatcttggcaactatcattgccaactgcatcgttcttgccctcgaacagcatctccctgatggcgataagacccccatgtcggaacggctggatgatacagagccatatttcattgggatcttctgttttgaagccggcattaagattatcgcgttgggtttcgtgtttcataaggggagctatctgagaaatggctggaacgtcatggatttcgttgtggtcctgacgggaatattggccaccgcgggaaccgattttgatctgcgcacacttagggctgtgagggtacttcgcccactgaagctggtttcaggcatcccaagcctgcaggtggtgctcaagtccatcatgaaggccatggttccactcctgcagatcggtttgcttctgttcttcgctatcttgatgtttgcaataatcgggttagaattttatatggggaaattccacaaggcttgtttcccaaacagtacagatgcagagcctgttggcgactttccatgtggcaaggaagcccctgcccgcttatgcgagggagataccgagtgtagagaatattggcccggtccaaatttcggtatcacgaatttcgataatatcctctttgccatcctgaccgtgttccagtgcatcaccatggaggggtggacagacatactatacaacacgaacgacgcagccgggaatacctggaactggctctactttatccctcttattatcattgggtccttcttcatgttaaatctggtccttggcgtgttgtccggagagtttgccaaagagcgggaacgggtggaaaacagaagagcttttctgaagctccggaggcagcagcaaatagaaagggaattaaacggctacctagaatggatattcaaagccgaagaagtaatgctggcagaagaggaccgaaacgcagaggagaagtcacctctggacgtgcttaaaagagcagcgacaaagaaatctcggaatgaccttatccacgcagaggagggagaggatcgcttcgcagatctgtgtgctgttggaagtccgtttgcccgagccagcttaaaaagcggtaagaccgaatcctcctcctatttccgtcgcaaggagaagatgttcaggttctttatcaggcgcatggttaaagctcagagtttctattgggttgtgctgtgcgtggtggctcttaatactctctgcgtggcaatggtccactacaatcagcctcgtaggctgacaaccaccctgtatttcgccgaatttgtatttctcggcctcttcctgaccgagatgagccttaaaatgtacggtttgggcccccgaagctacttccgatctagtttcaattgtttcgactttggagtgattgtggggagtgtttttgaagtagtttgggccgctatcaagcccggctcatctttcggcatctcagtattgagggcactaagactgctgcggatctttaaagttactaaatactggtctagtctaaggaacctggtggtgagtctcttaaacagtatgaagagcatcatatccttattgtttttactgtttctgttcatcgttgtattcgctttattaggcatgcagcttttcggtggccaatttaactttcaggatgagacgccaaccacaaattttgatacctttccggcggcgattttgacagtattccagatcctcaccggcgaggactggaacgccgtgatgtaccatggtatcgagtcccagggaggagtgtctaaaggaatgttctccagcttttattttattgtgctgaccctgttcgggaattatactttgctgaatgtgttcctggccattgcagtcgataatcttgcgaatgcacaggaacttacaaaggacgaggaagaaatggaagaagccgcaaatcaaaagctagcgctgcagaaggcaaaagaggtggctgaggtttcgcctatgtccgccgccaatatctccattgcagcccggcagcaaaacagcgctaaagcgagatccgtgtgggagcagagggccagtcagctccgcctgcagaatctgcgcgcttcttgcgaagccctctactcagaaatggatcctgaagagcggctgcgattcgccacaacacgccacctgagaccggacatgaaaacccatctcgatcggcctttggtggtcgagcttgggcgggatggtgcgcgcggcccagtgggtggcaaagctaggcctgaagccgctgaggctcctgaaggtgtggaccctccacgcagacaccaccgccatagagacaaagataaaactccagccgcgggggaccaggaccgcgcggaggctcccaaggcagaaagtggagagccgggcgctcgtgaagaaagacccaggccgcatcgttctcactcgaaagaggcagccggtccgcccgaagctcgaagtgagcgcggcagaggccctggtcctgaaggcgggagacgacaccaccgccgggggtccccggaggaagcggcggagcgggagcctaggcgtcatcgggctcatcgccaccaggacccctccaaagagtgcgcgggagccaaaggcgagcgccgcgctcggcatcgcggaggtccgcgggctggcccgagagaggctgagagcggcgaggagcctgcccgccgccatagagctaggcacaaggcacagccagcccatgaagcggtggagaaagaaactaccgagaaagaagctacagagaaggaggccgagatagtagaagccgacaaagagaaagagttgcgcaaccatcagcctagggagccgcactgtgatctcgagacaagcgggactgtgacggtgggcccgatgcatactctcccttctacttgtctgcagaaagtggaggagcagcccgaagatgccgacaatcagcggaacgttacacgtatgggtagccagccacccgacccaaatactatcgtgcatatcccagtcatgctcaccggtccattaggtgaggccactgtcgttccgagcggaaacgtggatctggagtcacaagctgaaggaaaaaaagaagtcgaggcagacgatgtgatgagatcaggaccccgcccaattgtgccatattcttctatgttctgcttgtcccccactaacctgctgagacgcttctgccactacatcgttacaatgagatactttgaagtggtcattttagtcgtcatcgcactgtcctctattgctctggcagccgaggacccagtcagaaccgattcaccccgcaataacgccttgaagtatctggattatattttcaccggcgttttcacattcgagatggtgattaagatgattgatctgggcctgcttttgcaccctggagcttatttcagagatctgtggaatatactggatttcatcgtggtgtcaggagccttggttgcgtttgccttttccggcagtaaaggtaaagacattaacaccataaagagcctccgagttctaagggtcttgcggccacttaagaccattaaaaggctacctaaacttaaggccgttttcgactgcgtcgtcaattctcttaagaacgttctgaatatactcatcgtgtatatgctgttcatgtttatcttcgctgtgatagccgtacaattgtttaagggcaagttcttttactgcacagatgagagtaaagaactggagcgtgactgtcgcgggcagtatctggattacgagaaggaggaagtggaagcacagcccaggcagtggaagaagtatgacttccattacgacaacgtcctctgggctctgcttacactgtttacagtatcaactggcgaaggctggccaatggttctcaagcactccgtggatgccacatatgaggagcagggacccagcccaggatacagaatggagctgtccattttctacgtggtgtatttcgtggtttttcctttcttcttcgtcaatattttcgttgcattaatcattattacctttcaggagcagggcgacaaggtcatgagcgagtgctcactggagaaaaacgagcgggcctgcatcgactttgccatcagtgctaagccgctaacacgctacatgccgcagaaccgccaatcttttcagtataaaacgtggacctttgttgtttctcccccatttgagtattttatcatggcaatgatcgctctgaacaccgtggtgctcatgatgaagttttacgatgctccatacgaatacgagctgatgctcaagtgtctgaacatagtctttacatcaatgtttagcatggaatgtgttcttaagataatcgcgtttggggtgttaaactatttccgtgatgcctggaatgtgtttgatttcgttaccgttttgggctctatcaccgacattttagttacagaaatcgcagagaccaacaactttatcaatctaagcttcctgcgactctttagggccgcgcggctaatcaagctcctccgccaagggtacaccatcaggattctgttgtggacatttgttcagtcttttaaggccctgccatatgtttgcttgctcatcgcgatgctgtttttcatttacgctatcatcgggatgcaggtgtttggcaacatcgcgctcgacgatgatacctccattaaccggcacaacaacttcagaacttttctccaggccctcatgcttctatttagatctgctactggagaagcctggcatgagatcatgctgtcttgtttaagcaaccaagcatgcgacgaacaggccaatgccaccgagtgtggctcagactttgcttacttctattttgtgtcctttatattcctgtgcagctttttgatgctcaatctctttgtcgcagtgataatggataattttgagtatcttaccagggactcaagtatcctcggaccacaccatctggacgaattcataagggtgtgggctgagtacgatcccgctgcctgtgggagaataagctataacgacatgtttgaaatgctgaagcatatgtctccccccctaggtttaggcaaaaaatgtcccgccagagttgcctataagaggttggtcaggatgaatatgcctatctctaatgaggacatgaccgtgcactttaccagcacactcatggctctgatccggactgctcttgagatcaaactggctcctgcaggaacaaagcagcaccaatgcgacgctgagctgagaaaggaaatttcagtggtgtgggcaaatctccctcaaaaaaccttggacctgttagtgcctccgcataagcccgacgaaatgacagtggggaaggtgtacgctgctttaatgattttcgatttctacaaacaaaataaaacaactagagaccaaatgcagcaggctcctggtggtctcagtcagatgggtcccgtctctctgtttcatcctttaaaagcaaccctcgagcagacccagccggccgtgctcaggggcgcccgtgtctttctacggcaaaaatcctctacttccctgagcaacggtggggcaatccagaatcaggaatcagggatcaaggaatctgtttcatggggcactcagcggacacaggacgccccccatgaagcgcgccccccactggagcggggacacagtacggaaattccagtaggccgctcaggagctctggccgttgacgttcagatgcagtctatcactcgccgcggccccgacggtgagccgcagcccggcttggagagtcagggtagggccgcaagcatgccacgtctggccgccgaaacacagcctgtgacagacgcctcacctatgaaacggtccataagcaccctggcccaaaggccccgcggcacacatctgtgctccactacccccgacaggcccccgccaagccaggcatctagtcatcaccatcaccacagatgccaccgaagacgcgatcggaagcaacggagtctagaaaagggcccaagtctgagcgccgatatggacggcgcaccaagcagcgcagtgggaccaggattgccgcctggcgaagggccgaccgggtgtcgacgggaacgcgagaggcggcaggagagagggcgctcacaggagcgacgtcagccatcctcctcttcctctgaaaaacagcgcttttatagttgcgataggttcggcggcagagaacctcctaagcccaagccctcgctgtcatctcaccctactagccccacagccggacaggaaccggggccacatcctcagggatcaggctccgtgaatggctcgcccctgctaagcacaagcggcgcgagtacacctgggcgcggagggaggcgtcagttacctcagaccccattgaccccacggccaagcatcacatacaaaaccgcaaacagtagccctatccacttcgccggggcccagacctccctgcccgcattttcacctggccggctctcacgtggtctttccgaacacaacgccttacttcaaagagacccactgtctcagcccctagcaccgggatcaaggatcggatcagacccttacctgggccaaagactggacagcgaggccagcgtgcatgctctcccagaagacactttaacattcgaagaggcagtggccacaaatagcggccgctcgagtcggacttcttatgtgtcctccctgacgagccagtcccatcccctgcgccgtgtgcctaatggatatcattgcacactaggcctctcctctggcggtcgcgccagacactcctaccatcacccagaccaggaccactggtgttag

SEQ ID NO: 14754 - DNA, 7020 bp, Artificial Sequence
  derived and/or modified sequence
atggtgcgctttggagatgagctgggcggccgctatggaggccctgggggcggggagcgggcccggggcggcggggccggcggggccggcggccctggccctgggggcctgcagcccggccagagggtgctgtacaagcagagcatcgcccagagggcccggaccatggccctgtacaaccccatccctgtgaagcagaactgcttcaccgtgaacagaagcctgtttgtgttttctgaggacaacgtggtgaggaaatatgccaagaggatcacagagtggcccccatttgagtacatgatcctggccaccatcatcgccaactgcatcgtgctggccctggagcagcacctgcctgatggagacaagacccccatgtctgagcggctggatgacacagagccctacttcatcggcatcttctgctttgaagctggcatcaagatcatcgccctgggctttgtgttccacaagggcagctacctgagaaatggctggaatgtgatggactttgtggtggtgctgaccggcatcctggccacagctggaacagactttgacctgcggaccctgcgggctgtgcgggtgctgcggcccctgaagctggtgtctggcatccccagcctgcaggtggtgctgaagagcatcatgaaggccatggtgcccctgctgcagatcggcctgctgctcttctttgccatcctgatgtttgccatcatcggcctggagttctacatgggcaagttccacaaggcctgcttccccaacagcacagatgctgagcctgtgggggacttcccctgtgggaaggaggccccagcccggctgtgtgagggggacacagagtgccgggagtactggccaggccccaactttggcatcaccaactttgacaacatcctgtttgccatcctgaccgtcttccagtgcatcaccatggagggctggacagacatcctgtacaacaccaatgatgctgctggcaacacctggaactggctgtacttcatccccctcatcatcatcggcagcttcttcatgctgaacctggtgctgggcgtgctgagcggggagtttgccaaggagcgggagcgggtggagaacagaagagccttcctgaagctgcggcggcagcagcagatcgagcgggagctgaatggctacctggagtggatcttcaaggccgaggaggtgatgctggccgaggaggacagaaatgctgaggagaagagccccctggatgtgctgaagagagctgccaccaagaagagcagaaatgacctgattcatgctgaggagggagaagatagatttgctgacctgtgtgctgtgggcagcccctttgcccgggccagcctgaagagcggcaagacagagagcagcagctacttccggaggaaggagaagatgttccgcttcttcatccggaggatggtgaaggcccagagcttctactgggtggtgctgtgtgtggtggccctgaacaccctgtgtgtggccatggtgcactacaaccagccccggcggctgaccaccaccctgtactttgctgagtttgtgttcctgggcctcttcctgacagagatgagcctgaagatgtatggcctgggccccaggagctacttccgcagcagcttcaactgctttgattttggagtcatcgtgggctctgtgtttgaggtggtgtgggccgccatcaagccaggcagcagctttggcatctctgtgctgcgggccctgcggctgctgcgcatcttcaaggtgaccaagtactggagcagcctgaggaacctggtggtgtccctgctgaacagcatgaagagcatcatcagcctgctcttcctgctcttcctgttcatcgtggtgtttgccctgctgggcatgcagctgtttggaggccagttcaacttccaggatgagacccccaccaccaactttgacaccttccctgctgccatcctgactgtgttccagatcctgactggagaggactggaatgctgtgatgtaccatggaattgagagccagggcggcgtgtccaagggcatgttcagcagcttctacttcatcgtgctgaccctgtttggaaactacaccctgctgaatgtgttcctggccatcgctgtggacaacctggccaatgcccaggagctgaccaaggatgaggaggagatggaggaggccgccaaccagaagctggccctgcagaaggccaaggaggtggccgaggtgagccccatgtctgctgccaacatcagcattgctgcccggcagcagaacagcgccaaggcccggtctgtgtgggagcagagggccagccagctgcggctgcagaacctgcgggccagctgtgaggccctgtacagcgagatggaccctgaggagcggctgcgctttgccaccaccaggcacctgcggccagacatgaagacccacctggaccggcccctggtggtggagctgggcagagatggagcccggggccctgtgggcggcaaggcccggcctgaggccgctgaggcccctgagggcgtggaccccccaagaagacaccaccgccaccgggacaaggacaagaccccagctgctggggaccaggacagagctgaggcccccaaggccgagagcggggagcccggggcccgggaggagcggccccggccccacaggagccacagcaaggaggccgccggccccccagaggcccggtctgagcggggccggggccctggccctgagggcggccgccgccaccaccggcggggcagccctgaggaggccgctgagcgggagcccaggaggcaccgggcccaccgccaccaggaccccagcaaagaatgtgccggggccaagggggagcggcgggcccggcaccggggcggcccccgggccggcccccgggaggccgagagcggggaggagcccgcccggcggcaccgggcccggcacaaggcccagcctgcccatgaagctgtggagaaggagaccacagagaaggaggccacagagaaggaggccgagatcgtggaggccgacaaggagaaggagctgaggaaccaccagccccgggagccccactgtgacctggagaccagcggcaccgtgacagtgggccccatgcacaccctgcccagcacctgcctgcagaaggtggaggagcagccagaagatgctgacaaccagagaaatgtgaccaggatgggcagccagcccccagaccccaacaccatcgtgcacatccctgtgatgctgaccggccccctgggggaggccaccgtggtgcccagcggaaatgtggacctggagagccaggccgagggcaagaaggaggtggaggctgatgatgtgatgaggagcggcccccggcccatcgtgccctacagctccatgttctgcctgagccccaccaacctgctgcggcgcttctgccactacatcgtgaccatgagatactttgaggtggtgatcctggtggtgattgccctgagcagcatcgccctggccgctgaggaccctgtgaggacagacagccccagaaataatgccctgaagtacctggactacatcttcaccggggtcttcacctttgagatggtgatcaagatgattgacctgggcctgctgctgcaccctggggcctacttccgggacctgtggaacatcctggacttcatcgtggtgtctggggccctggtggcctttgccttcagcggcagcaagggcaaggacatcaacaccatcaagagcctgcgggtgctgcgggtgctgcggcccctgaagaccatcaagaggctgcccaagctgaaggctgtgtttgactgtgtggtgaacagcctgaagaatgtgctgaacatcctgattgtgtacatgctgttcatgttcatctttgctgtgattgctgtgcagctgttcaagggcaagttcttctactgcacagatgagagcaaggagctggagcgggactgccggggccagtacctggactatgagaaggaggaggtggaggcccagccccggcagtggaagaagtatgacttccactatgacaacgtgctgtgggccctgctgaccctcttcaccgtgtccactggagagggctggcccatggtgctgaagcacagcgtggatgccacctatgaggagcagggccccagccctggctacaggatggagctgagcatcttctacgtggtgtactttgtggtgttccccttcttctttgtgaacatctttgtggccctgatcatcatcaccttccaggagcagggcgacaaggtgatgtctgaatgttccctggagaagaatgaaagagcctgcatcgactttgccatcagcgccaagcccctgacccgctacatgccccagaaccggcagagcttccagtacaagacctggacctttgtggtgtccccaccatttgagtacttcatcatggccatgattgccctgaacacagtggtgctgatgatgaagttctatgatgccccctatgaatatgagctgatgctgaagtgcctgaacatcgtgttcacctccatgttctccatggagtgtgtgctgaagatcatcgcctttggagtgctgaactacttcagagatgcctggaatgtgtttgattttgtgacagtgctgggcagcatcacagacatcctggtgacagaaattgctgagaccaacaacttcatcaacctgtccttcctgcggctcttccgggccgcccggctcatcaagctgctgcggcagggctacaccatccgcatcctgctgtggacctttgtgcagagcttcaaggccctgccctacgtgtgcctgctgattgccatgctgttcttcatctatgccatcatcggcatgcaggtgtttggaaacatcgccctggatgatgacaccagcatcaacagacacaacaacttccgcaccttcctgcaggccctgatgctgctcttccgcagcgccactggagaggcctggcatgagatcatgctgagctgcctgagcaaccaggcctgtgatgagcaggccaatgccacagaatgtggcagtgactttgcctacttctactttgtgtccttcatcttcctgtgcagcttcctgatgctgaacctgtttgtggccgtcatcatggacaactttgagtacctgacccgggacagcagcatcctgggcccccaccacctggatgagttcatccgggtgtgggccgagtatgaccctgctgcctgtggccgcatctcctacaatgacatgtttgagatgctgaagcacatgagcccccccctgggcctgggcaagaagtgcccagcccgggtggcctacaagaggctggtgaggatgaacatgcccatcagcaatgaagacatgacagtgcacttcaccagcaccctgatggccctgatcagaacagccctggagatcaagctggccccagctggcaccaagcagcaccagtgtgatgctgagctgaggaaggagatctctgtggtgtgggccaacctgccccagaagaccctggacctgctggtgcccccccacaagccagatgagatgacagtgggcaaggtgtatgctgccctgatgatctttgacttctacaagcagaacaagaccacccgggaccagatgcagcaggcccctgggggcctgagccagatgggccctgtgtccctcttccaccccctgaaggccaccctggagcagacccagcctgctgtgctgcggggggcccgggtcttcctgcggcagaagagcagcaccagcctgagcaatggaggagccatccagaaccaggagagcggcatcaaggagagcgtgtcctggggcacccagaggacccaggatgcccctcatgaggcccggccccccctggagcggggccacagcacagagatccctgtgggccgcagcggggccctggccgtggatgtgcagatgcagagcatcacccggcggggcccagatggagagccccagcccggcctggagagccagggccgggccgcctccatgccccggctggccgctgagacccagcctgtgacagatgccagccccatgaagaggagcatcagcaccctggcccagaggccccggggcacccacctgtgcagcaccaccccagaccggcccccacccagccaggccagcagccaccaccaccaccaccgctgccacagaagaagagacaggaagcagaggagcctggagaagggccccagcctgtctgctgacatggatggagcccccagcagcgctgtgggccctggcctgcccccaggagagggccccaccggctgcagaagagagcgggagcggcggcaggagcggggccgcagccaggagcggcggcagcccagcagcagcagcagcgagaagcagcgcttctacagctgtgacagatttggaggccgggagccccccaagcccaagcccagcctgagcagccaccccaccagccccacagctggccaggagcccggcccccacccccagggcagcggctctgtgaatggcagccccctgctgagcaccagcggggccagcaccccaggccggggcggccggcggcagctgccccagacccccctgaccccccggcccagcatcacctacaagacagccaacagcagccccatccactttgctggggcccagaccagcctgcctgccttcagccctggccgcctgagccggggcctgtctgagcacaatgccctgctgcagagggaccccctgagccagcccctggcccctggcagccgcatcggcagtgacccctacctgggccagaggctggacagcgaggcctctgtgcacgccctgcctgaggacaccctgacctttgaggaggccgtggccaccaacagcggccgcagcagcaggaccagctatgtgagcagcctgaccagccagagccaccccctgcggcgggtgcccaacggctaccactgcaccctgggcctgagcagcggcggccgggcccggcacagctaccaccacccagaccaggaccactggtgctag

SEQ ID NO: 14755 - DNA, 7020 bp, Artificial Sequence
  derived and/or modified sequence
atggtgcggttcggcgacgagctgggcggccggtacggcggccccggaggcggcgagagagcccgtgggggcggggctggcggagctgggggccccggtccaggagggttgcagcctggtcagcgggtgttgtacaaacaaagcatcgctcagcgcgcacggacaatggccctctacaatccgattccagtgaaacagaattgtttcacagtgaatcgctccctgtttgtctttagcgaagataatgttgtccggaaatacgctaaaaggataacggagtggccaccctttgagtatatgatcctggctaccataattgctaactgcatagtgctggcgttggagcagcatctccctgacggcgacaagactccaatgagtgagcgccttgatgacacagagccatacttcatcggaatcttttgtttcgaggccggcattaaaattatcgcactggggttcgtgtttcacaagggttcatatctgaggaatgggtggaatgtgatggacttcgtcgttgtcttgaccgggatcttggccaccgccggcaccgactttgacctaaggacacttcgcgccgtccgggttcttcggcctctgaagcttgtctcgggcatcccgtcgctgcaggtggtcctgaaaagtatcatgaaagccatggtccccctgcttcagatcggtcttctgttattcttcgctatactcatgttcgccattattgggctggagttttatatgggcaagttccacaaggcatgcttccccaatagcacggatgcagagccagtgggtgactttccatgcggcaaggaggcaccagccaggctctgcgaaggcgatactgagtgccgtgaatattggcccggcccaaatttcggcataacaaattttgacaacattctctttgcaattctcactgtgttccagtgcataacaatggagggctggaccgatattctctacaacaccaatgacgctgccgggaacacatggaactggttatactttatccctctaataatcattggcagcttctttatgttgaatctggtactgggggtcctgtccggggaatttgccaaagagcgggagcgagtagagaatagaagggcttttttaaaactccggcgtcaacagcagatcgaaagagaactgaacgggtacctggagtggatcttcaaggccgaagaggtcatgctggccgaggaggatcgcaacgctgaagagaaaagccctctggatgtcctgaagcgcgcagctaccaaaaaaagcagaaatgatttgatccacgctgaggaaggtgaagataggttcgctgacctttgtgctgtcggcagtcccttcgctagggcctccctgaaaagtggcaagactgagtcctcttcctatttccggcgaaaggagaaaatgtttcgcttttttatcaggaggatggtaaaagcccagtccttctattgggtggtgctgtgtgtggtcgccctcaacacgctgtgcgttgcaatggtccattacaatcagccaaggcggttaaccaccactttgtatttcgccgaattcgtctttttgggcctgttcttgaccgaaatgtccttgaaaatgtatgggctgggcccacggtcgtatttcaggtcgagctttaactgctttgatttcggcgtcattgtcgggtcagtctttgaagtagtgtgggccgcaattaagccaggctcttcattcggtattagcgtactacgtgccttgcggttgcttcgaattttcaaagtaacaaaatattggtcgtcgctccggaaccttgtggtatccctgctgaattctatgaagtccatcatctccttgttattcctcttatttctgtttatcgtggtgttcgctctgcttggcatgcagttatttgggggacagttcaatttccaagacgaaactcctaccaccaatttcgatactttccctgccgctattctgaccgtttttcagatactgactggagaagactggaatgcggtcatgtaccatggcatagagtcccagggcggggtgagcaaagggatgtttagttcattctatttcatcgtactgaccctgtttggcaactacacccttctgaacgtctttctggccatcgccgtcgataacctcgccaatgcccaggagctgacgaaggatgaggaagagatggaagaagccgctaatcagaagctcgcattgcagaaagccaaagaagtggctgaagtatctccaatgtccgccgccaatatatctatcgccgctcgtcagcagaactcagccaaggcacgctcggtgtgggaacagagagcctctcagctccgcctgcagaacctgagggcctcttgtgaggccctgtacagcgagatggatccagaggagaggctgcgcttcgcgaccacccgccacctgcgacctgatatgaagacccacttagacagacccctggtggtcgagctcggtagagacggcgccagaggacctgtggggggaaaggccaggcccgaagccgcagaagccccagaaggggtggatccccctcggagacatcatagacatcgggataaggacaagacaccagcagccggagaccaggaccgggctgaggcacctaaagcagagtccggcgagcctggtgcccgcgaagagcgacctcgtccccacagaagtcattccaaggaggcagccggccccccagaagctagaagtgagcgcggacgcggaccgggtcctgagggcggccgccgacaccatagaaggggatccccggaggaagcagctgaaagagaaccgaggcgacaccgcgcgcacaggcaccaggacccttctaaagagtgtgccggcgcaaagggcgagcgaagggcaagacaccgtggaggccccagggctggccctcgagaagcagagtcgggcgaggaacctgcccgcagacatagagccaggcacaaagcacagccagcccacgaagccgtggagaaggagactactgaaaaggaagccacggaaaaggaggccgaaatagtggaagctgataaggagaaggaattgcgtaatcaccagccccgggagccccattgcgacctcgaaacatctggcacagtgaccgtgggccctatgcacaccttaccgtctacatgcctccagaaagtcgaggagcaacccgaagatgcggataaccaacgtaatgttactcgaatggggtcacagccacccgatcctaataccattgtgcacatcccagtgatgttaacaggccctttaggagaggccaccgttgtccccagcggcaacgtcgacctggagtcacaagcagagggcaagaaagaggtggaagccgacgacgtgatgcggtcaggccctcggcctattgtgccatattcgtcaatgttttgtctctcccccaccaatcttctgagacgattttgtcattatatcgtgaccatgcggtacttcgaagtggtgatcctggtggtgattgcgctgtcctctattgctcttgccgcggaggatccggtgcgcactgattcccctaggaacaacgcccttaagtacctggattatatcttcaccggtgtgtttaccttcgagatggtgataaagatgattgacctcggactgctgctacatccgggggcctacttccgagatttgtggaatattctggactttatcgtcgtttccggagcactggttgcctttgccttctcgggctccaaggggaaagacattaataccatcaagtcacttcgggttctcagagtgctgcgcccactcaaaactatcaagaggctgccaaagttaaaggccgtattcgattgtgtagtgaattcactgaaaaacgtgctgaatatcctgattgtctatatgctcttcatgtttatctttgcagtaattgctgtacagctcttcaagggcaaattcttttattgcaccgatgaaagcaaggaactggagagggactgcaggggccaatacctggattacgaaaaagaggaggtcgaagcccagccccgacaatggaaaaagtatgacttccactatgataacgtgctatgggccttactgacactgtttactgtaagtacaggagaaggttggccgatggtactgaagcattctgtggacgccacctatgaggagcagggcccatctcctgggtataggatggagctcagtattttctacgtggtatattttgttgtattccccttttttttcgttaacatcttcgtggctctcataatcattacctttcaggagcagggtgacaaggtgatgtccgagtgctctctggagaaaaatgagcgtgcttgtatagactttgcaatcagcgctaagcctctgacaagatacatgcctcaaaatcgccagtcctttcaatataagacctggaccttcgtggtgtcccctccattcgaatactttatcatggccatgatcgccctcaatactgttgtgctgatgatgaagttttacgatgcaccttacgagtacgagctcatgcttaaatgcctcaatatcgttttcacatccatgttcagcatggagtgtgtgctgaagatcattgcatttggcgtgctgaattatttccgggacgcctggaatgtgttcgatttcgtcacagtgctaggcagcattaccgatattttggttacagaaatcgcagagacaaataacttcatcaatcttagcttcctgaggctattcagggctgcccgcctgattaagctattgagacaaggctacacgattagaatcctgctttggacgtttgtccaatcgtttaaagccctgccatacgtgtgcttgctcattgcgatgttatttttcatttacgccattatcggaatgcaggtcttcggtaacatcgctcttgacgacgataccagtataaaccgccataataatttcaggacctttctacaggcactgatgttgctcttcagaagcgcaaccggtgaagcatggcatgaaatcatgctcagctgccttagtaatcaggcctgcgatgaacaagcgaacgcgaccgaatgtggaagtgatttcgcttacttctattttgtgagctttatttttctctgcagctttctgatgctcaatctctttgtcgccgtcatcatggataattttgaatacctgacaagagactcttctattctggggcctcaccacttggatgagttcattcgagtgtgggctgagtatgaccccgctgcctgcggccgcatttcatacaacgatatgttcgagatgctgaagcatatgtcaccacccctcggactcggaaaaaagtgcccagcccgtgtagcatataaacgcctagtgaggatgaacatgcccatctcaaatgaagacatgacggtccactttacctcaaccttgatggcgctgatccgtacagcactcgagattaaattagccccggccggtaccaagcagcaccaatgtgacgctgagctgcgcaaggagatatcggtggtgtgggctaacctgccccagaagacgcttgacctgttggttccaccacacaaacccgatgaaatgaccgtcgggaaggtgtacgccgcccttatgatcttcgacttctataaacagaacaaaaccacacgcgaccagatgcagcaggccccaggcggcctgtcccagatgggacctgtgagcctgttccatccgttgaaggcaacgttggagcagacacagcccgccgttttgagaggagctagggtcttcctgcgccagaagagcagcaccagcttatctaacggcggtgcaatccaaaaccaggagtcagggattaaagagagtgtcagctgggggacccagcgtactcaggacgcgcctcatgaggcgcgcccacctctggagagaggacactccactgaaattccagttggacgttcaggtgccctcgctgttgatgtgcagatgcagtcaatcacacgcagaggtcccgatggtgagccacaacctggccttgagtctcagggcagagcggcttcaatgccacgcctggctgccgaaactcagcctgtgacagatgcttccccaatgaagcgcagcattagcacgttggctcagaggccaaggggtacacacctgtgctccacgactcccgacagaccgcccccgagccaagcctcttcacaccaccatcaccacagatgtcataggcgccgcgaccgcaagcagaggtcccttgaaaagggccccagcctgtctgcagatatggatggtgccccctcctctgcagttgggcctgggcttcctcccggcgaggggccaaccggctgcagaagagagagggagagaagacaggaacgcggaaggtcccaggaacgacggcaaccctctagctcctctagcgagaagcagcggttttactcttgcgatcgcttcggaggtagagaacctcctaagccaaagcccagcctcagtagccatcccacttctccaacagctgggcaggaacctgggccccaccctcagggtagcggatcagttaacggtagcccattgttgagcacatccggcgcctccacacccggccgaggcggacgccgccagctgccacagacaccgctgacgccccgcccgtccattacgtataaaaccgcaaattcgagtcctatacacttcgctggggctcagacctcattgcccgctttcagcccaggcaggctgtcgagagggctgtctgaacataacgcactactccagagggatcccctctcccagccactcgcccctgggtccaggatcggaagtgatccctacctgggccagagactggactctgaagcctccgtgcatgccttgccagaggacacccttaccttcgaggaagcggttgccactaatagcggcagatcaagccgcacgagctatgtctcctccctaacttcgcaatcccaccccttaagaagagtacctaatggataccattgcaccctcggactgagtagcggcgggagagccagacactcttaccaccaccctgaccaggaccactggtgttag

SEQ ID NO: 14756 - DNA, 7019 bp, Artificial Sequence
  derived and/or modified sequence
atggtccgctttggcgatgaacttggtggcagatacggcggacctggtgggggtgaacgagccagaggcggaggcgctggtggtgctggcggaccgggaccaggcggactgcagccaggtcagagggtgctgtataaacagagcattgcccaacgcgctcgaactatggccctatacaatccaatccctgttaagcagaattgcttcaccgtcaatcgctcgctgttcgttttctcagaagacaatgtagtcaggaaatatgctaaaaggatcactgaatggcctcccttcgagtacatgatcttagctactatcattgctaactgcatagtacttgccctggagcaacatctgccggatggagataaaactccgatgtctgaacgcttggatgatacggagccatacttcattggtatattctgcttcgaagctggcataaagataatagcactcgggttcgtatttcacaagggatcctatctgcgcaacggttggaatgtgatggatttcgtggtcgtcttaacaggcatactggccaccgcaggcaccgacttcgacctgagaaccctgagggccgtccgagtactgcgccctctgaagcttgttagcggtatacccagcctccaggtcgtcttgaagtcaataatgaaggccatggttccactcctccagattgggctgttattatttttcgcaatactgatgtttgccataatcgggctcgaattttatatgggcaagttccacaaggcctgctttccaaatagcaccgacgctgagcccgtgggcgattttccgtgtggcaaggaggccccagccagactgtgtgaaggcgacacagaatgcagggagtactggcccggtcccaatttcggaatcacgaactttgataacatcctatttgccatcctgaccgtctttcaatgcatcacaatggagggctggaccgacatcctttacaacacaaatgatgccgcaggcaatacctggaattggctgtattttataccccttatcatcatcgggagtttttttatgctaaacctggttcttggagtgcttagcggcgaatttgctaaggagagggaaagggttgagaatcggagggctttcctgaagcttaggcggcaacagcagatcgagcgcgaactcaacggctacttagagtggattttcaaagctgaggaagtgatgctcgctgaagaggatcgaaacgcagaggagaagtccccactggatgtactgaagagagccgcaaccaagaagtcaaggaacgacctcattcacgcagaagaaggggaagaccgcttcgccgatttgtgcgccgtcggaagccccttcgctagagcctcgctgaagagcggcaaaactgaatccagttcttactttcgcagaaaggagaagatgtttcgttttttcatccgtagaatggtgaaagcccagtccttttactgggtggttttatgtgttgtggctctgaacactctttgtgtggccatggtccactacaaccagcccagacgcttgaccacaacgctctatttcgctgagtttgtgttcctgggattatttctgacggaaatgagcctgaagatgtacggcttaggaccccgttcctatttcaggtcgtcttttaattgtttcgacttcggcgtcatcgtgggatctgtattcgaggtcgtttgggctgctatcaagcccggatccagcttcggaatttccgtgctgagggccctgcgactactacgcatttttaaagtgaccaaatactggagcagcctgcgaaacctcgttgtgtcccttttgaactctatgaaatccataatcagcctgttgtttctgctgtttctgttcattgtcgtgtttgccttactcggcatgcagctcttcggaggacagttcaatttccaggacgagacaccaacaaccaatttcgatacatttccagcggcaatactgaccgtgtttcagattctgaccggggaagattggaatgcagtcatgtaccacggaatcgagtcccaggggggtgtctcgaagggcatgttctccagcttttacttcatcgttctaactctgtttggcaattacacactgctgaacgtttttctcgccatagccgtggacaatctggccaacgctcaggagctgaccaaagacgaggaggagatggaagaagctgctaaccagaagctcgccctccaaaaagctaaggaagtagccgaggtatcccccatgagtgctgctaacattagtatcgctgcaaggcagcaaaattctgccaaggcccgttctgtgtgggagcagcgagcttctcagctgcgcttgcagaatctgagggcatcatgcgaagccctctactccgaaatggaccctgaagagcgcctgagattcgctaccaccagacacctacggccagatatgaagactcacctagatagacctctggtggtagaactaggaagagatggggctagaggcccagtgggcggaaaagctaggcccgaagccgcagaggctccggaaggcgtcgatccacctcgacggcaccatcgccaccgcgacaaggacaagacccccgcagctggcgaccaggatcgggcagaggccccaaaggccgagagtggcgaaccaggggcacgagaggagcgccctcgaccacataggtcccatagcaaggaggcagctggtcctcctgaggcgagaagcgagcgtgggagaggacccggacccgagggagggaggcgccaccatcgcaggggctcccctgaggaggccgcagaaagagaaccgagacggcacagagctcatcgacaccaggatcctagtaaggaatgcgcaggcgcaaagggcgagaggcgggcacgccatcgcggagggccacgggcagggcctcgtgaggctgagtctggtgaggagccagcaagaagacaccgagctcgccacaaggctcagccagctcacgaagccgtcgagaaagaaaccacggaaaaggaggctaccgagaaggaggctgaaatcgtggaggctgataaggagaaggagctccgtaatcaccagcccagggagccacattgcgatcttgaaacctctggtaccgtcacggtagggcctatgcacactcttcctagcacatgtctgcagaaagttgaagagcagccagaggacgccgataaccagagaaatgtgacccggatggggtctcagccaccagatccaaacaccattgtgcacattcccgtgatgttgacaggaccccttggagaggccacagtggtaccctcaggcaatgttgacttggagtcacaagcagagggtaagaaagaggtggaagcggacgacgtgatgaggagcggcccacgtcctatcgtcccctacagtagtatgttttgtctgtcaccaacaaatctgctaaggcggttttgccattatattgtcacaatgagatactttgaagtcgtgattctggtagtaatcgccttgtcaagtatcgcactagccgcagaggatcccgtccggaccgactctccccgtaacaatgctctgaagtatctcgattacatttttaccggggtattcacatttgagatggtgatcaagatgatcgacctcggtttgctcctgcatcccggagcttactttagagacttgtggaatatactggacttcattgttgtctcaggcgctctggtagctttcgcattttcaggaagcaagggaaaggatattaatacaatcaaaagcctaagggtgctccgggtgttgagaccacttaaaacaatcaaacggctgcccaaactgaaagccgtgtttgactgcgtggtcaactccttgaaaaatgtgctgaacattttgattgtctacatgctgttcatgtttattttcgccgtcatcgctgttcagctgtttaagggcaaatttttttactgcactgatgagtccaaagaattggaaagagactgtagagggcagtatctggattatgaaaaagaggaggtagaagctcagcctcgtcagtggaaaaaatacgactttcattacgataacgtgctgtgggccctgctaacactattcacagtctctacaggggagggttggcctatggtgcttaaacattcagtggacgccacttacgaggagcagggacccagtccaggatatcgtatggagctgagcatcttttatgtcgtttacttcgtggtgtttccatttttttttgtgaacatctttgtcgcgctcattatcatcaccttccaggagcagggggacaaggtaatgtccgaatgttcactggagaagaacgaaagggcttgcatcgactttgccataagcgcgaagccactcacaagatacatgccacaaaatcgacagtccttccagtataaaacatggacctttgttgtgtccccccctttcgaatacttcatcatggctatgattgctcttaacaccgtcgtgctaatgatgaaattctatgacgctccctatgagtacgaactgatgctgaaatgtttgaacatcgtgtttactagtatgttctctatggagtgcgtgttaaagatcatcgctttcggcgtgcttaattattttcgggacgcatggaatgtgtttgattttgttactgtgctgggctccataaccgacatactggtgactgaaatcgccgagactaataactttattaatctgagcttcctacgcctgttcagggctgcccgtctcattaagttactgcggcagggctataccattaggatactactttggactttcgtccagtctttcaaggccctgccctacgtttgtttgcttatcgctatgctctttttcatttacgctatcatcggaatgcaggtctttggcaacatcgccctggatgacgatacgagcatcaatcggcacaacaacttcaggaccttcttgcaggccctgatgttgctgtttcggtcagcaacaggagaggcatggcacgaaataatgctctcttgcctgagcaaccaggcctgtgatgagcaggcgaacgctaccgagtgtgggagtgatttcgcatatttctattttgtctcatttattttcctgtgctcattccttatgctgaacctatttgtggccgtgattatggacaattttgaatacctgaccagggattcgtccatccttggtcctcatcacctggatgaattcatccgggtctgggcagaatatgacccagcggcttgcggtcgaatttcctacaatgatatgttcgagatgctgaaacacatgtccccacccctcggtctgggaaaaaaatgccccgcacgagtcgcgtacaagcgtttggtaagaatgaacatgccaatcagcaacgaagatatgactgtgcatttcacctcaacattgatggctctgattcgcaccgccctcgagatcaagttagctccagccggtacgaagcaacaccagtgtgacgccgagctgcgcaaagaaatcagcgtcgtttgggcaaatttgccccagaagacactggatttactggtgccaccacacaaaccagacgaaatgaccgtgggcaaggtctatgctgcgttaatgatctttgatttctacaagcagaataaaactacacgggaccagatgcagcaagccccaggtggtctctcccagatgggcccagtcagtctgtttcatcccctgaaggctactctcgaacagactcagcccgcagttcttcgaggcgctcgggtcttcctaaggcagaagtcatccaccagtctctctaatggcggagctatacagaatcaagagagtggtattaaggaaagtgtgagttggggcacccagaggacacaggacgctccccacgaggccaggccgcctcttgaacgtgggcactcaacagaaattccagtgggcaggtctggcgcactcgccgtggacgtgcagatgcagagcataacacggagaggccctgacggcgagcctcaaccaggtcttgagagccagggtcgagctgcctcaatgcctcgactggctgcagagacccagcccgtgaccgatgcctccccaatgaaacgaagcatcagtacgcttgcccaaaggccacgaggtacccatctttgcagcacgactcctgaccgaccccctccaagccaggcatcaagccaccaccatcaccaccggtgtcatcgaagacgcgatcgcaagcagagatccctcgaaaagggccctagcttatcagcagatatggacggagccccatcaagcgctgtgggcccagggctcccccctggagagggaccaacaggctgcagaagggaaagagagcggcgtcaggagagaggcagatcccaggagcgccgtcagcctagtagctcatcctcagagaaacagagattctactcatgtgataggtttggtggcagggagcccccaaagccaaagccgtctctgagcagtcacccaaccagtccaaccgctggtcaagaaccagggcctcatcctcaggggagcggaagtgtgaatgggtctcctctgctttcaacatctggagccagtacaccagggagggggggtcgccgacagctcccccagacgccacttaccccaagaccaagtatcacatataaaacggctaactcatcccccatccatttcgcaggcgctcaaacctctctgccagccttctccccaggtcgcttgagtcgtggattgtcagaacacaatgcgctcttgcagagggatccactttctcagccccttgccccaggtagtcgcattggctctgatccctatcttggacagcggcttgatagcgaggcaagtgtgcacgccttaccagaagatacattgaccttcgaggaagctgtagccacgaacagcggtagatcttcacggacttcttacgtatcctctctgacgagccagtcacaccccctgcgtagagtgccgaatgggtaccactgtaccttgggtcttagttcaggcggacgagcccgacatagttaccaccacccagaccaggaccattggtgcta

SEQ ID NO: 14757 - DNA, 9790 bp, Artificial Sequence
  derived and/or modified sequence
gcggcggcggctgcggcggtggggccgggcgaggtccgctgcggtcccggcggctccgtggctgctccgctctgagcgcctggcgcgccccgcgccctccctgccggggccgctgggccggggatgcacgcggggcccgggagccatggtccgcttcggggacgagctgggcggccgctatgggggccccggcggcggagagcgggcccggggcggcggggccggcggggcggggggcccgggtcccggggggctgcagcccggccagcgggtcctctacaagcaatcgatcgcgcagcgcgcgcggaccatggcgctgtacaaccccatcccggtcaagcagaactgcttcaccgtcaaccgctcgctcttcgtcttcagcgaggacaacgtcgtccgcaaatacgcgaagcgcatcaccgagtggcctccattcgagtatatgatcctggccaccatcatcgccaactgcatcgtgctggccctggagcagcacctccctgatggggacaaaacgcccatgtccgagcggctggacgacacggagccctatttcatcgggatcttttgcttcgaggcagggatcaaaatcatcgctctgggctttgtcttccacaagggctcttacctgcggaacggctggaacgtcatggacttcgtggtcgtcctcacagggatccttgccacggctggaactgacttcgacctgcgaacactgagggctgtgcgtgtgctgaggcccctgaagctggtgtctgggattccaagtttgcaggtggtgctcaagtccatcatgaaggccatggttccactcctgcagattgggctgcttctcttctttgccatcctcatgtttgccatcattggcctggagttctacatgggcaagttccacaaggcctgtttccccaacagcacagatgcggagcccgtgggtgacttcccctgtggcaaggaggccccagcccggctgtgcgagggcgacactgagtgccgggagtactggccaggacccaactttggcatcaccaactttgacaatatcctgtttgccatcttgacggtgttccagtgcatcaccatggagggctggactgacatcctctataatacaaacgatgcggccggcaacacctggaactggctctacttcatccctctcatcatcatcggctccttcttcatgctcaacctggtgctgggcgtgctctcgggggagtttgccaaggagcgagagagggtggagaaccgccgcgccttcctgaagctgcgccggcagcagcagatcgagcgagagctcaacgggtacctggagtggatcttcaaggcggaggaagtcatgctggccgaggaggacaggaatgcagaggagaagtcccctttggacgtgctgaagagagcggccaccaagaagagcagaaatgacctgatccacgcagaggagggagaggaccggtttgcagatctctgtgctgttggatcccccttcgcccgcgccagcctcaagagcgggaagacagagagctcgtcatacttccggaggaaggagaagatgttccggttttttatccggcgcatggtgaaggctcagagcttctactgggtggtgctgtgcgtggtggccctgaacacactgtgtgtggccatggtgcattacaaccagccgcggcggcttaccacgaccctgtattttgcagagtttgttttcctgggtctcttcctcacagagatgtccctgaagatgtatggcctggggcccagaagctacttccggtcctccttcaactgcttcgactttggggtcatcgtggggagcgtctttgaagtggtctgggcggccatcaagccgggaagctcctttgggatcagtgtgctgcgggccctccgcctgctgaggatcttcaaagtcacgaagtactggagctccctgcggaacctggtggtgtccctgctgaactccatgaagtccatcatcagcctgctcttcttgctcttcctgttcattgtggtcttcgccctgctggggatgcagctgtttgggggacagttcaacttccaggatgagactcccacaaccaacttcgacaccttccctgccgccatcctcactgtcttccagatcctgacgggagaggactggaatgcagtgatgtatcacgggatcgaatcgcaaggcggcgtcagcaaaggcatgttctcgtccttttacttcattgtcctgacactgttcggaaactacactctgctgaatgtctttctggccatcgctgtggacaacctggccaacgcccaagagctgaccaaggatgaagaggagatggaagaagcagccaatcagaagcttgctctgcaaaaggccaaagaagtggctgaagtcagccccatgtctgccgcgaacatctccatcgccgccaggcagcagaactcggccaaggcgcgctcggtgtgggagcagcgggccagccagctacggctgcagaacctgcgggccagctgcgaggcgctgtacagcgagatggaccccgaggagcggctgcgcttcgccactacgcgccacctgcggcccgacatgaagacgcacctggaccggccgctggtggtggagctgggccgcgacggcgcgcgggggcccgtgggaggcaaagcccgacctgaggctgcggaggcccccgagggcgtcgaccctccgcgcaggcaccaccggcaccgcgacaaggacaagacccccgcggcgggggaccaggaccgagcagaggccccgaaggcggagagcggggagcccggtgcccgggaggagcggccgcggccgcaccgcagccacagcaaggaggccgcggggcccccggaggcgcggagcgagcgcggccgaggcccaggccccgagggcggccggcggcaccaccggcgcggctccccggaggaggcggccgagcgggagccccgacgccaccgcgcgcaccggcaccaggatccgagcaaggagtgcgccggcgccaagggcgagcggcgcgcgcggcaccgcggcggcccccgagcggggccccgggaggcggagagcggggaggagccggcgcggcggcaccgggcccggcacaaggcgcagcctgctcacgaggctgtggagaaggagaccacggagaaggaggccacggagaaggaggctgagatagtggaagccgacaaggaaaaggagctccggaaccaccagccccgggagccacactgtgacctggagaccagtgggactgtgactgtgggtcccatgcacacactgcccagcacctgtctccagaaggtggaggaacagccagaggatgcagacaatcagcggaacgtcactcgcatgggcagtcagcccccagacccgaacactattgtacatatcccagtgatgctgacgggccctcttggggaagccacggtcgttcccagtggtaacgtggacctggaaagccaagcagaggggaagaaggaggtggaagcggatgacgtgatgaggagcggcccccggcctatcgtcccatacagctccatgttctgtttaagccccaccaacctgctccgccgcttctgccactacatcgtgaccatgaggtacttcgaggtggtcattctcgtggtcatcgccttgagcagcatcgccctggctgctgaggacccagtgcgcacagactcgcccaggaacaacgctctgaaatacctggattacattttcactggtgtctttacctttgagatggtgataaagatgatcgacttgggactgctgcttcaccctggagcctatttccgggacttgtggaacattctggacttcattgtggtcagtggcgccctggtggcgtttgctttctcaggatccaaagggaaagacatcaataccatcaagtctctgagagtccttcgtgtcctgcggcccctcaagaccatcaaacggctgcccaagctcaaggctgtgtttgactgtgtggtgaactccctgaagaatgtcctcaacatcttgattgtctacatgctcttcatgttcatatttgccgtcattgcggtgcagctcttcaaagggaagtttttctactgcacagatgaatccaaggagctggagagggactgcaggggtcagtatttggattatgagaaggaggaagtggaagctcagcccaggcagtggaagaaatacgactttcactacgacaatgtgctctgggctctgctgacgctgttcacagtgtccacgggagaaggctggcccatggtgctgaaacactccgtggatgccacctatgaggagcagggtccaagccctgggtaccgcatggagctgtccatcttctacgtggtctactttgtggtctttcccttcttcttcgtcaacatctttgtggctttgatcatcatcaccttccaggagcagggggacaaggtgatgtctgaatgcagcctggagaagaacgagagggcttgcattgacttcgccatcagcgccaaacccctgacacggtacatgccccaaaaccggcagtcgttccagtataagacgtggacatttgtggtctccccgccctttgaatacttcatcatggccatgatagccctcaacactgtggtgctgatgatgaagttctatgatgcaccctatgagtacgagctgatgctgaaatgcctgaacatcgtgttcacatccatgttctccatggaatgcgtgctgaagatcatcgcctttggggtgctgaactatttcagagatgcctggaatgtctttgactttgtcactgtgttgggaagtattactgatattttagtaacagagattgcggaaacgaacaatttcatcaacctcagcttcctccgcctctttcgagctgcgcggctgatcaagctgctccgccagggctacaccatccgcatcctgctgtggacctttgtccagtccttcaaggccctgccctacgtgtgtctgctcattgccatgctgttcttcatctacgccatcatcggcatgcaggtgtttgggaatattgccctggatgatgacaccagcatcaaccgccacaacaacttccggacgtttttgcaagccctgatgctgctgttcaggagcgccacgggggaggcctggcacgagatcatgctgtcctgcctgagcaaccaggcctgtgatgagcaggccaatgccaccgagtgtggaagtgactttgcctacttctacttcgtctccttcatcttcctgtgctcctttctgatgttgaacctctttgtggctgtgatcatggacaattttgagtacctcacgcgggactcttccatcctaggtcctcaccacttggatgagttcatccgggtctgggctgaatacgacccggctgcgtgtgggcgcatcagttacaatgacatgtttgagatgctgaaacacatgtccccgcctctggggctggggaagaaatgccctgctcgagttgcttacaagcgcctggttcgcatgaacatgcccatctccaacgaggacatgactgttcacttcacgtccacgctgatggccctcatccggacggcactggagatcaagctggccccagctgggacaaagcagcatcagtgtgacgcggagttgaggaaggagatttccgttgtgtgggccaatctgccccagaagactttggacttgctggtaccaccccataagcctgatgagatgacagtggggaaggtttatgcagctctgatgatattcgacttctacaagcagaacaaaaccaccagagaccagatgcagcaggctcctggaggcctctcccagatgggtcctgtgtccctgttccaccctctgaaggccaccctggagcagacacagccggctgtgctccgaggagcccgggttttccttcgacagaagagttccacctccctcagcaatggcggggccatacaaaaccaagagagtggcatcaaagagtctgtctcctggggcactcaaaggacccaggatgcaccccatgaggccaggccacccctggagcgtggccactccacagagatccctgtggggcggtcaggagcactggctgtggacgttcagatgcagagcataacccggaggggccctgatggggagccccagcctgggctggagagccagggtcgagcggcctccatgccccgccttgcggccgagactcagcccgtcacagatgccagccccatgaagcgctccatctccacgctggcccagcggccccgtgggactcatctttgcagcaccaccccggaccgcccaccccctagccaggcgtcgtcgcaccaccaccaccaccgctgccaccgccgcagggacaggaagcagaggtccctggagaaggggcccagcctgtctgccgatatggatggcgcaccaagcagtgctgtggggccggggctgcccccgggagaggggcctacaggctgccggcgggaacgagagcgccggcaggagcggggccggtcccaggagcggaggcagccctcatcctcctcctcggagaagcagcgcttctactcctgcgaccgctttgggggccgtgagcccccgaagcccaagccctccctcagcagccacccaacgtcgccaacagctggccaggagccgggaccccacccacagggcagtggttccgtgaatgggagccccttgctgtcaacatctggtgctagcacccccggccgcggtgggcggaggcagctcccccagacgcccctgactccccgccccagcatcacctacaagacggccaactcctcacccatccacttcgccggggctcagaccagcctccctgccttctccccaggccggctcagccgtgggctttccgaacacaacgccctgctgcagagagaccccctcagccagcccctggcccctggctctcgaattggctctgacccttacctggggcagcgtctggacagtgaggcctctgtccacgccctgcctgaggacactctcactttcgaggaggctgtggccaccaactcgggccgctcctccaggacttcctacgtgtcctccctgacctcccagtctcaccctctccgccgcgtgcccaacggttaccactgcaccctgggactcagctcgggtggccgagcacggcacagctaccaccaccctgaccaagaccactggtgctagctgcaccgtgaccgctcagacgcctgcatgcagcaggcgtgtgttccagtggatgagttttatcatccacacggggcagccggccctcgggggaggccttgcccaccttggtgaggctcctgtggcccctccctccccctcctcccctcttttactctagacgacgaataaagccctgttagaggatgcggctctctctgtccccttcctgtcctgccttcctgggtctcgtaccacacaccagaccctaaaccgcaggctgctgtgtgtggctgagaaggacccaggagtccaaatcccgtgtcctgggactcagcatccagcatgggtgcttggagccgttgtgaggagctctgcgtcctgtggggagcacccttcacgtggccgtgcggcacagagaagcagggcccacctgaaagtgcgccgagacctcgggacggaggggatggggagggggacacagtcgtggcttgtgcagcccgccagtgtcagcgaatgctcactcaggcaagctctgtcctccctggacaccgtcagccccacaggaaccgagctgggaagtgttcttgctgtggttgtgatttttaattgcaacacctctcattcttgtcacttctatatacgtgatgtagaaaaaatggaaaaccagaaaaatggggaaggaaatgttcacataactttaaaaaatcaaacctgtgaaagaaagatgtcagctttttgccacgtgtctttgtggcttatgcgaggagactccctgtgcagccctgtccggtccaggtggacgtagacggcccctggctctgctgctcttgaccaagtgcctgaccgccaggccctcacacccaggctcctgggcactgtggtgtgaggcgaggcctcgggatccatcaccgcaggatgctgtgaaaagtactcgcgatggcagccaggtagcaagcccttgccagtggagagcactggatgtcatggtggcaaacaaggcagccatttgctgtcctcctcccacgagtggaaggggtttccaaggaagccacagggcagctgaccacgtgcttgtgtgaggcattttcagtctgttctgcatatgattctcagggcacactctgtggtatgtgaaataggtttccttccacatacagcagaagagaggcaaaggctggtaggaaggaggaagacattggctgggggcttggatgtggggccgtcagggcaggagggaggaagccccagctggaatgaaactcagagcaagtgaccgagggaggacacggctcctgccactgaggccgggcacctgatgcccagcactgtcctggcgccagacacagggagcaggcagtcaagtgaggtctgacccccatggccacgctcaggagagaaagaccatgctcaggacactgtccaaggtgcacaagatgctgggaggtcccttgtttggtgaagaaagggagcatttagagcagttgatggtggtgtgtcctccgtgttctgaaattccagatgatctgtgttggattcttggcttctaccccatgattctcctcaaagaaattgtgtgtgatgtgtgtgtgtgtgtgtgtgtgtgtgtgtctgtgtcacaggagatgcagtgcctgtacaggtgtgttcagtgtgtggatgtcattaacccatagggctatgcaacaaaagacacatttaatagaagtaaaacacacaagaccgctgcctggtctcggggttcagcatgattgtgaccaaacctttttatagaatttccttacctgaaggcacaacactctgaaactttaaagataacagagtattttattccaatagaataaaccaggaatctcggactgtgcatgtgatcactgtgctcctgttgcaaagtagaaggatgtgtattttgacactgacgttttgtctcttgttccccagcccccagcccatgttatcttgggtgtcgaatgtgtccattccatgcagaaccacagccatttccccaggcagtgttgggtcgagaatccacttttctaaacccacacagcctagctggcttgtctagactcttctaggcattggaattgatgaaaactacagggagcggggaaaggagacattatgtcttgttttcctgactttgggttttgtttctcactgtgtcttctccggctatcatatatgtcccctgaatctcatagtgagctgccaaatttgaagtgcatcacccagttgtctgcatctggaaccagtcaagcagtggctgtagtttgaacaagttatgtgtgcatgtaacatatatacatatatacatatatacaagtatgtgcatgataatgtatatcttcgtactttttgatacaatgtattcatttgttaatttttaattatatttgatataaatcaaaggtttgttgcaaaactttatatttaagaagtgttaaaaaaaaaaaaaagtcccaaccatgcaacacaactgggacctacttaaaaagaaattctgtgattgactagtttgctgcctgagtcatatttatcagccaaactttggattctgctgttgtttctacaatgacattttgtatgaagcaaagtccttgaattaaaataaaaacttagcaaaaaatcaaaaacaaaacccca

SEQ ID NO: 14758 - DNA, 7020 bp, Artificial Sequence
  derived and/or modified sequence
atggtgagattcggcgacgagctgggcggcagatacggcggccccggcggcggcgagagagccagaggcggcggcgccggcggcgccggcggccccggccccggcggcctgcagcccggccagagagtgctgtacaagcagagcatcgcccagagagccagaaccatggccctgtacaaccccatccccgtgaagcagaactgcttcaccgtgaacagaagcctgttcgtgttcagcgaggacaacgtggtgagaaagtacgccaagagaatcaccgagtggccccccttcgagtacatgatcctggccaccatcatcgccaactgcatcgtgctggccctggagcagcacctgcccgacggcgacaagacccccatgagcgagagactggacgacaccgagccctacttcatcggcatcttctgcttcgaggccggcatcaagatcatcgccctgggcttcgtgttccacaagggcagctacctgagaaacggctggaacgtgatggacttcgtggtggtgctgaccggcatcctggccaccgccggcaccgacttcgacctgagaaccctgagagccgtgagagtgctgagacccctgaagctggtgagcggcatccccagcctgcaggtggtgctgaagagcatcatgaaggccatggtgcccctgctgcagatcggcctgctgctgttcttcgccatcctgatgttcgccatcatcggcctggagttctacatgggcaagttccacaaggcctgcttccccaacagcaccgacgccgagcccgtgggcgacttcccctgcggcaaggaggcccccgccagactgtgcgagggcgacaccgagtgcagagagtactggcccggccccaacttcggcatcaccaacttcgacaacatcctgttcgccatcctgaccgtgttccagtgcatcaccatggagggctggaccgacatcctgtacaacaccaacgacgccgccggcaacacctggaactggctgtacttcatccccctgatcatcatcggcagcttcttcatgctgaacctggtgctgggcgtgctgagcggcgagttcgccaaggagagagagagagtggagaacagaagagccttcctgaagctgagaagacagcagcagatcgagagagagctgaacggctacctggagtggatcttcaaggccgaggaggtgatgctggccgaggaggacagaaacgccgaggagaagagccccctggacgtgctgaagagagccgccaccaagaagagcagaaacgacctgatccacgccgaggagggcgaggacagattcgccgacctgtgcgccgtgggcagccccttcgccagagccagcctgaagagcggcaagaccgagagcagcagctacttcagaagaaaggagaagatgttcagattcttcatcagaagaatggtgaaggcccagagcttctactgggtggtgctgtgcgtggtggccctgaacaccctgtgcgtggccatggtgcactacaaccagcccagaagactgaccaccaccctgtacttcgccgagttcgtgttcctgggcctgttcctgaccgagatgagcctgaagatgtacggcctgggccccagaagctacttcagaagcagcttcaactgcttcgacttcggcgtgatcgtgggcagcgtgttcgaggtggtgtgggccgccatcaagcccggcagcagcttcggcatcagcgtgctgagagccctgagactgctgagaatcttcaaggtgaccaagtactggagcagcctgagaaacctggtggtgagcctgctgaacagcatgaagagcatcatcagcctgctgttcctgctgttcctgttcatcgtggtgttcgccctgctgggcatgcagctgttcggcggccagttcaacttccaggacgagacccccaccaccaacttcgacaccttccccgccgccatcctgaccgtgttccagatcctgaccggcgaggactggaacgccgtgatgtaccacggcatcgagagccagggcggcgtgagcaagggcatgttcagcagcttctacttcatcgtgctgaccctgttcggcaactacaccctgctgaacgtgttcctggccatcgccgtggacaacctggccaacgcccaggagctgaccaaggacgaggaggagatggaggaggccgccaaccagaagctggccctgcagaaggccaaggaggtggccgaggtgagccccatgagcgccgccaacatcagcatcgccgccagacagcagaacagcgccaaggccagaagcgtgtgggagcagagagccagccagctgagactgcagaacctgagagccagctgcgaggccctgtacagcgagatggaccccgaggagagactgagattcgccaccaccagacacctgagacccgacatgaagacccacctggacagacccctggtggtggagctgggcagagacggcgccagaggccccgtgggcggcaaggccagacccgaggccgccgaggcccccgagggcgtggacccccccagaagacaccacagacacagagacaaggacaagacccccgccgccggcgaccaggacagagccgaggcccccaaggccgagagcggcgagcccggcgccagagaggagagacccagaccccacagaagccacagcaaggaggccgccggcccccccgaggccagaagcgagagaggcagaggccccggccccgagggcggcagaagacaccacagaagaggcagccccgaggaggccgccgagagagagcccagaagacacagagcccacagacaccaggaccccagcaaggagtgcgccggcgccaagggcgagagaagagccagacacagaggcggccccagagccggccccagagaggccgagagcggcgaggagcccgccagaagacacagagccagacacaaggcccagcccgcccacgaggccgtggagaaggagaccaccgagaaggaggccaccgagaaggaggccgagatcgtggaggccgacaaggagaaggagctgagaaaccaccagcccagagagccccactgcgacctggagaccagcggcaccgtgaccgtgggccccatgcacaccctgcccagcacctgcctgcagaaggtggaggagcagcccgaggacgccgacaaccagagaaacgtgaccagaatgggcagccagccccccgaccccaacaccatcgtgcacatccccgtgatgctgaccggccccctgggcgaggccaccgtggtgcccagcggcaacgtggacctggagagccaggccgagggcaagaaggaggtggaggccgacgacgtgatgagaagcggccccagacccatcgtgccctacagcagcatgttctgcctgagccccaccaacctgctgagaagattctgccactacatcgtgaccatgagatacttcgaggtggtgatcctggtggtgatcgccctgagcagcatcgccctggccgccgaggaccccgtgagaaccgacagccccagaaacaacgccctgaagtacctggactacatcttcaccggcgtgttcaccttcgagatggtgatcaagatgatcgacctgggcctgctgctgcaccccggcgcctacttcagagacctgtggaacatcctggacttcatcgtggtgagcggcgccctggtggccttcgccttcagcggcagcaagggcaaggacatcaacaccatcaagagcctgagagtgctgagagtgctgagacccctgaagaccatcaagagactgcccaagctgaaggccgtgttcgactgcgtggtgaacagcctgaagaacgtgctgaacatcctgatcgtgtacatgctgttcatgttcatcttcgccgtgatcgccgtgcagctgttcaagggcaagttcttctactgcaccgacgagagcaaggagctggagagagactgcagaggccagtacctggactacgagaaggaggaggtggaggcccagcccagacagtggaagaagtacgacttccactacgacaacgtgctgtgggccctgctgaccctgttcaccgtgagcaccggcgagggctggcccatggtgctgaagcacagcgtggacgccacctacgaggagcagggccccagccccggctacagaatggagctgagcatcttctacgtggtgtacttcgtggtgttccccttcttcttcgtgaacatcttcgtggccctgatcatcatcaccttccaggagcagggcgacaaggtgatgagcgagtgcagcctggagaagaacgagagagcctgcatcgacttcgccatcagcgccaagcccctgaccagatacatgccccagaacagacagagcttccagtacaagacctggaccttcgtggtgagcccccccttcgagtacttcatcatggccatgatcgccctgaacaccgtggtgctgatgatgaagttctacgacgccccctacgagtacgagctgatgctgaagtgcctgaacatcgtgttcaccagcatgttcagcatggagtgcgtgctgaagatcatcgccttcggcgtgctgaactacttcagagacgcctggaacgtgttcgacttcgtgaccgtgctgggcagcatcaccgacatcctggtgaccgagatcgccgagaccaacaacttcatcaacctgagcttcctgagactgttcagagccgccagactgatcaagctgctgagacagggctacaccatcagaatcctgctgtggaccttcgtgcagagcttcaaggccctgccctacgtgtgcctgctgatcgccatgctgttcttcatctacgccatcatcggcatgcaggtgttcggcaacatcgccctggacgacgacaccagcatcaacagacacaacaacttcagaaccttcctgcaggccctgatgctgctgttcagaagcgccaccggcgaggcctggcacgagatcatgctgagctgcctgagcaaccaggcctgcgacgagcaggccaacgccaccgagtgcggcagcgacttcgcctacttctacttcgtgagcttcatcttcctgtgcagcttcctgatgctgaacctgttcgtggccgtgatcatggacaacttcgagtacctgaccagagacagcagcatcctgggcccccaccacctggacgagttcatcagagtgtgggccgagtacgaccccgccgcctgcggcagaatcagctacaacgacatgttcgagatgctgaagcacatgagcccccccctgggcctgggcaagaagtgccccgccagagtggcctacaagagactggtgagaatgaacatgcccatcagcaacgaggacatgaccgtgcacttcaccagcaccctgatggccctgatcagaaccgccctggagatcaagctggcccccgccggcaccaagcagcaccagtgcgacgccgagctgagaaaggagatcagcgtggtgtgggccaacctgccccagaagaccctggacctgctggtgcccccccacaagcccgacgagatgaccgtgggcaaggtgtacgccgccctgatgatcttcgacttctacaagcagaacaagaccaccagagaccagatgcagcaggcccccggcggcctgagccagatgggccccgtgagcctgttccaccccctgaaggccaccctggagcagacccagcccgccgtgctgagaggcgccagagtgttcctgagacagaagagcagcaccagcctgagcaacggcggcgccatccagaaccaggagagcggcatcaaggagagcgtgagctggggcacccagagaacccaggacgccccccacgaggccagaccccccctggagagaggccacagcaccgagatccccgtgggcagaagcggcgccctggccgtggacgtgcagatgcagagcatcaccagaagaggccccgacggcgagccccagcccggcctggagagccagggcagagccgccagcatgcccagactggccgccgagacccagcccgtgaccgacgccagccccatgaagagaagcatcagcaccctggcccagagacccagaggcacccacctgtgcagcaccacccccgacagacccccccccagccaggccagcagccaccaccaccaccacagatgccacagaagaagagacagaaagcagagaagcctggagaagggccccagcctgagcgccgacatggacggcgcccccagcagcgccgtgggccccggcctgccccccggcgagggccccaccggctgcagaagagagagagagagaagacaggagagaggcagaagccaggagagaagacagcccagcagcagcagcagcgagaagcagagattctacagctgcgacagattcggcggcagagagccccccaagcccaagcccagcctgagcagccaccccaccagccccaccgccggccaggagcccggcccccacccccagggcagcggcagcgtgaacggcagccccctgctgagcaccagcggcgccagcacccccggcagaggcggcagaagacagctgccccagacccccctgacccccagacccagcatcacctacaagaccgccaacagcagccccatccacttcgccggcgcccagaccagcctgcccgccttcagccccggcagactgagcagaggcctgagcgagcacaacgccctgctgcagagagaccccctgagccagcccctggcccccggcagcagaatcggcagcgacccctacctgggccagagactggacagcgaggccagcgtgcacgccctgcccgaggacaccctgaccttcgaggaggccgtggccaccaacagcggcagaagcagcagaaccagctacgtgagcagcctgaccagccagagccaccccctgagaagagtgcccaacggctaccactgcaccctgggcctgagcagcggcggcagagccagacacagctaccaccaccccgaccaggaccactggtgctag

SEQ ID NO: 14759 - protein, 2138 aa, Artificial Sequence
  derived and/or modified sequence
MVNENTRMYIPEENHQGSNYGSPRPAHANMNANAAAGLAPEHIPTPGAALSWQAAIDAARQAKLMGSAGNATISTVSSTQRKRQQYGKPKKQGSTTATRPPRALLCLTLKNPIRRACISIVEWKPFEIIILLTIFANCVALAIYIPFPEDDSNATNSNLERVEYLFLIIFTVEAFLKVIAYGLLFHPNAYLRNGWNLLDFIIVVVGLFSAILEQATKADGANALGGKGAGFDVKALRAFRVLRPLRLVSGVPSLQVVLNSIIKAMVPLLHIALLVLFVIIIYAIIGLELFMGKMHKTCYNQEGIADVPAEDDPSPCALETGHGRQCQNGTVCKPGWDGPKHGITNFDNFAFAMLTVFQCITMEGWTDVLYWVNDAVGRDWPWIYFVTLIIIGSFFVLNLVLGVLSGEFSKEREKAKARGDFQKLREKQQLEEDLKGYLDWITQAEDIDPENEDEGMDEEKPRNMSMPTSETESVNTENVAGGDIEGENCGARLAHRISKSKFSRYWRRWNRFCRRKCRAAVKSNVFYWLVIFLVFLNTLTIASEHYNQPNWLTEVQDTANKALLALFTAEMLLKMYSLGLQAYFVSLFNRFDCFVVCGGILETILVETKIMSPLGISVLRCVRLLRIFKITRYWNSLSNLVASLLNSVRSIASLLLLLFLFIIIFSLLGMQLFGGKFNFDEMQTRRSTFDNFPQSLLTVFQILTGEDWNSVMYDGIMAYGGPSFPGMLVCIYFIILFICGNYILLNVFLAIAVDNLADAESLTSAQKEEEEEKERKKLARTASPEKKQELVEKPAVGESKEEKIELKSITADGESPPATKINMDDLQPNENEDKSPYPNPETTGEEDEEEPEMPVGPRPRPLSELHLKEKAVPMPEASAFFIFSSNNRFRLQCHRIVNDTIFTNLILFFILLSSISLAAEDPVQHTSFRNHILFYFDIVFTTIFTIEIALKMTAYGAFLHKGSFCRNYFNILDLLVVSVSLISFGIQSSAINVVKILRVLRVLRPLRAINRAKGLKHVVQCVFVAIRTIGNIVIVTTLLQFMFACIGVQLFKGKLYTCSDSSKQTEAECKGNYITYKDGEVDHPIIQPRSWENSKFDFDNVLAAMMALFTVSTFEGWPELLYRSIDSHTEDKGPIYNYRVEISIFFIIYIIIIAFFMMNIFVGFVIVTFQEQGEQEYKNCELDKNQRQCVEYALKARPLRRYIPKNQHQYKVWYVVNSTYFEYLMFVLILLNTICLAMQHYGQSCLFKIAMNILNMLFTGLFTVEMILKLIAFKPKHYFCDAWNTFDALIVVGSIVDIAITEVNPAEHTQCSPSMNAEENSRISITFFRLFRVMRLVKLLSRGEGIRTLLWTFIKSFQALPYVALLIVMLFFIYAVIGMQVFGKIALNDTTEINRNNNFQTFPQAVLLLFRCATGEAWQDIMLACMPGKKCAPESEPSNSTEGETPCGSSFAVFYFISFYMLCAFLIINLFVAVIMDNFDYLTRDWSILGPHHLDEFKRIWAEYDPEAKGRIKHLDVVTLLRRIQPPLGFGKLCPHRVACKRLVSMNMPLNSDGTVMFNATLFALVRTALRIKTEGNLEQANEELRAIIKKIWKRTSMKLLDQVVPPAGDDEVTVGKFYATFLIQEYFRKFKKRKEQGLVGKPSQRNALSLQAGLRTLHDIGPEIRRAISGDLTAEEELDKAMKEAVSAASEDDIFRRAGGLFGNHVSYYQSDGRSAFPQTFTTQRPLHINKAGSSQGDTESPSHEKLVDSTFTPSSYSSTGSNANINNANNTALGRLPRPAGYPSTVSTVEGHGPPLSPAIRVQEVAWKLSSNRCHSRESQAAMAGQEETSQDETYEVKMNHDTEACSEPSLLSTEMLSYQDDENRQLTLPEEDKRDIRQSPKRGFLRSASLGRRASFHLECLKRQKDRGGDISQKTVLPLHLVHHQALAVAGLSPLLQRSHSPASFPRPFATPPATPGSRGWPPQPVPTLRLEGVESSEKLNSSFPSIHCGSWAETTPGGGGSSAARRVRPVSLMVPSQAGAPGRQFHGSASSLVEAVLISEGLGQFAQDPKFIEVTTQELADACDMTIEEMESAADNILSGGAPQSPNGALLPFVNCRDAGQDRAGGEEDAGCVRARGRPSEEELQDSRVYVSSL

SEQ ID NO: 14760 - DNA, 13480 bp, Artificial Sequence
  derived and/or modified sequence
ttattttttcaaatggtgtagccgccggaggtgcggtgctcagttcttggaaggggcccggatgtactgaggatgcgttacagtttcactcgaggaggcagtagtggaaaggagcagtttttggggtttgatgccataatgggaatcaggtaatcgtcggcggggaagaagaaacgctgcagaccacggcttcctcgaatcttgcgcgaaagccgccggcctcggaggagggattaatccagacccgccggggggtgttttcacatttcttcctcttcgtggctgctcctcctattaaaaccatttttggtccatggtcaatgagaatacgaggatgtacattccagaggaaaaccaccaaggttccaactatgggagcccacgccccgcccatgccaacatgaatgccaatgcggcagcggggctggcccctgagcacatccccaccccgggggctgccctgtcgtggcaggcggccatcgacgcagcccggcaggctaagctgatgggcagcgctggcaatgcgaccatctccacagtcagctccacgcagcggaagcggcagcaatatgggaaacccaagaagcagggcagcaccacggccacacgcccgccccgagccctgctctgcctgaccctgaagaaccccatccggagggcctgcatcagcattgtcgaatggaaaccatttgaaataattattttactgactatttttgccaattgtgtggccttagcgatctatattccctttccagaagatgattccaacgccaccaattccaacctggaacgagtggaatatctctttctcataatttttacggtggaagcgtttttaaaagtaatcgcctatggactcctctttcaccccaatgcctacctccgcaacggctggaacctactagattttataattgtggttgtggggctttttagtgcaattttagaacaagcaaccaaagcagatggggcaaacgctctcggagggaaaggggccggatttgatgtgaaggcgctgagggccttccgcgtgctgcgccccctgcggctggtgtccggagtcccaagtctccaggtggtcctgaattccatcatcaaggccatggtccccctgctgcacatcgccctgcttgtgctgtttgtcatcatcatctacgccatcatcggcttggagctcttcatggggaagatgcacaagacctgctacaaccaggagggcatagcagatgttccagcagaagatgacccttccccttgtgcgctggaaacgggccacgggcggcagtgccagaacggcacggtgtgcaagcccggctgggatggtcccaagcacggcatcaccaactttgacaactttgccttcgccatgctcacggtgttccagtgcatcaccatggagggctggacggacgtgctgtactgggtcaatgatgccgtaggaagggactggccctggatctattttgttacactaatcatcatagggtcattttttgtacttaacttggttctcggtgtgcttagcggagagttttccaaagagagggagaaggccaaggcccggggagatttccagaagctgcgggagaagcagcagctagaagaggatctcaaaggctacctggattggatcactcaggccgaagacatcgatcctgagaatgaggacgaaggcatggatgaggagaagccccgaaacatgagcatgcccaccagtgagaccgagtccgtcaacaccgaaaacgtggctggaggtgacatcgagggagaaaactgcggggccaggctggcccaccggatctccaagtcaaagttcagccgctactggcgccggtggaatcggttctgcagaaggaagtgccgcgccgcagtcaagtctaatgtcttctactggctggtgattttcctggtgttcctcaacacgctcaccattgcctctgagcactacaaccagcccaactggctcacagaagtccaagacacggcaaacaaggccctgctggccctgttcacggcagagatgctcctgaagatgtacagcctgggcctgcaggcctacttcgtgtccctcttcaaccgctttgactgcttcgtcgtgtgtggcggcatcctggagaccatcctggtggagaccaagatcatgtccccactgggcatctccgtgctcagatgcgtccggctgctgaggattttcaagatcacgaggtactggaactccttgagcaacctggtggcatccttgctgaactctgtgcgctccatcgcctccctgctccttctcctcttcctcttcatcatcatcttctccctcctggggatgcagctctttggaggaaagttcaactttgatgagatgcagacccggaggagcacattcgataacttcccccagtccctcctcactgtgtttcagatcctgaccggggaggactggaattcggtgatgtatgatgggatcatggcttatggcggcccctcttttccagggatgttagtctgtatttacttcatcatcctcttcatctgtggaaactatatcctactgaatgtgttcttggccattgctgtggacaacctggctgatgctgagagcctcacatctgcccaaaaggaggaggaagaggagaaggagagaaagaagctggccaggactgccagcccagagaagaaacaagagttggtggagaagccggcagtgggggaatccaaggaggagaagattgagctgaaatccatcacggctgacggagagtctccacccgccaccaagatcaacatggatgacctccagcccaatgaaaatgaggataagagcccctaccccaacccagaaactacaggagaagaggatgaggaggagccagagatgcctgtcggccctcgcccacgaccactctctgagcttcaccttaaggaaaaggcagtgcccatgccagaagccagcgcgtttttcatcttcagctctaacaacaggtttcgcctccagtgccaccgcattgtcaatgacacgatcttcaccaacctgatcctcttcttcattctgctcagcagcatttccctggctgctgaggacccggtccagcacacctccttcaggaaccatattctgttttattttgatattgtttttaccaccattttcaccattgaaattgctctgaagatgactgcttatggggctttcttgcacaagggttctttctgccggaactacttcaacatcctggacctgctggtggtcagcgtgtccctcatctcctttggcatccagtccagtgcaatcaatgtcgtgaagatcttgcgagtcctgcgagtactcaggcccctgagggccatcaacagggccaaggggctaaagcatgtggttcagtgtgtgtttgtcgccatccggaccatcgggaacatcgtgattgtcaccaccctgctgcagttcatgtttgcctgcatcggggtccagctcttcaagggaaagctgtacacctgttcagacagttccaagcagacagaggcggaatgcaagggcaactacatcacgtacaaagacggggaggttgaccaccccatcatccaaccccgcagctgggagaacagcaagtttgactttgacaatgttctggcagccatgatggccctcttcaccgtctccaccttcgaagggtggccagagctgctgtaccgctccatcgactcccacacggaagacaagggccccatctacaactaccgtgtggagatctccatcttcttcatcatctacatcatcatcatcgccttcttcatgatgaacatcttcgtgggcttcgtcatcgtcacctttcaggagcagggggagcaggagtacaagaactgtgagctggacaagaaccagcgacagtgcgtggaatacgccctcaaggcccggcccctgcggaggtacatccccaagaaccagcaccagtacaaagtgtggtacgtggtcaactccacctacttcgagtacctgatgttcgtcctcatcctgctcaacaccatctgcctggccatgcagcactacggccagagctgcctgttcaaaatcgccatgaacatcctcaacatgctcttcactggcctcttcaccgtggagatgatcctgaagctcattgccttcaaacccaagcactatttctgtgatgcatggaatacatttgacgccttgattgttgtgggtagcattgttgatatagcaatcaccgaggtaaacccagctgaacatacccaatgctctccctctatgaacgcagaggaaaactcccgcatctccatcaccttcttccgcctgttccgggtcatgcgtctggtgaagctgctgagccgtggggagggcatccggacgctgctgtggaccttcatcaagtccttccaggccctgccctatgtggccctcctgatcgtgatgctgttcttcatctacgcggtgatcgggatgcaggtgtttgggaaaattgccctgaatgataccacagagatcaaccggaacaacaactttcagaccttcccccaggccgtgctgctcctcttcaggtgtgccaccggggaggcctggcaggacatcatgctggcctgcatgccaggcaagaagtgtgccccagagtccgagcccagcaacagcacggagggtgaaacaccctgtggtagcagctttgctgtcttctacttcatcagcttctacatgctctgtgccttcctgatcatcaacctctttgtagctgtcatcatggacaactttgactacctgacaagggactggtccatccttggtccccaccacctggatgagtttaaaagaatctgggcagagtatgaccctgaagccaagggtcgtatcaaacacctggatgtggtgaccctcctccggcggattcagccgccactaggttttgggaagctgtgccctcaccgcgtggcttgcaaacgcctggtctccatgaacatgcctctgaacagcgacgggacagtcatgttcaatgccaccctgtttgccctggtcaggacggccctgaggatcaaaacagaagggaacctagaacaagccaatgaggagctgcgggcgatcatcaagaagatctggaagcggaccagcatgaagctgctggaccaggtggtgccccctgcaggtgatgatgaggtcaccgttggcaagttctacgccacgttcctgatccaggagtacttccggaagttcaagaagcgcaaagagcagggccttgtgggcaagccctcccagaggaacgcgctgtctctgcaggctggcttgcgcacactgcatgacatcgggcctgagatccgacgggccatctctggagatctcaccgctgaggaggagctggacaaggccatgaaggaggctgtgtccgctgcttctgaagatgacatcttcaggagggccggtggcctgttcggcaaccacgtcagctactaccaaagcgacggccggagcgccttcccccagaccttcaccactcagcgcccgctgcacatcaacaaggcgggcagcagccagggcgacactgagtcgccatcccacgagaagctggtggactccaccttcaccccgagcagctactcgtccaccggctccaacgccaacatcaacaacgccaacaacaccgccctgggtcgcctccctcgccccgccggctaccccagcacggtcagcactgtggagggccacgggccccccttgtcccctgccatccgggtgcaggaggtggcgtggaagctcagctccaacaggtgccactcccgggagagccaggcagccatggcgggtcaggaggagacgtctcaggatgagacctatgaagtgaagatgaaccatgacacggaggcctgcagtgagcccagcctgctctccacagagatgctctcctaccaggatgacgaaaatcggcaactgacgctcccagaggaggacaagagggacatccggcaatctccgaagaggggtttcctccgctctgcctcactaggtcgaagggcctccttccacctggaatgtctgaagcgacagaaggaccgagggggagacatctctcagaagacagtcctgcccttgcatctggttcatcatcaggcattggcagtggcaggcctgagccccctcctccagagaagccattcccctgcctcattccctaggccttttgccaccccaccagccacacctggcagccgaggctggcccccacagcccgtccccaccctgcggcttgagggggtcgagtccagtgagaaactcaacagcagcttcccatccatccactgcggctcctgggctgagaccacccccggtggcgggggcagcagcgccgcccggagagtccggcccgtctccctcatggtgcccagccaggctggggccccagggaggcagttccacggcagtgccagcagcctggtggaagcggtcttgatttcagaaggactggggcagtttgctcaagatcccaagttcatcgaggtcaccacccaggagctggccgacgcctgcgacatgaccatagaggagatggagagcgcggccgacaacatcctcagcgggggcgccccacagagccccaatggcgccctcttaccctttgtgaactgcagggacgcggggcaggaccgagccgggggcgaagaggacgcgggctgtgtgcgcgcgcggggtcgaccgagtgaggaggagctccaggacagcagggtctacgtcagcagcctgtagtgggcgctgccagatgcgggcttttttttatttgtttcaatgttcctaatgggttcgtttcagaagtgcctcactgttctcgtgacctggagttaaccggaacagcgtcttcattcatttctgttgggaccagacgcggagcctgggtgcgcgagccgccctccgggaggaaggcgcccggctgcgtctgcagaggcggggagaggaggcggcgagggtcccggggcgcgaggaaggcgcctgccctctcccagctcgcaggccccgggcccggccgcgcctccgcggggagagcaccccggcttcccgcgcgccctcaccaaaaggaccctacagcaaacgggtgtctttcgactctgcttgtagaaaccatttgcacatattctgtacgagcctcgctgtctccctagagccagggccctgcggatttggagaagggagcggggcaggacttccaggaggaccccaacccggcccggagagggaggaggaggcctccaggggcgcggagctctggggatgggcgtcgggccggcagtggtgcggctcactccgtccctgcccacctgcgacgggatcccccgaccggcacgggccacgccgagctcccggccagccgccggcccgcaggcagcgcgagggaggagctgcgccgccggctccgcccaaccaggtggtgctgagcttccgctgagcgctcttttgttttgtggtttgacacttttcttgacagcatgttgcagtttcttttcggttttggttttttttaaatgttttattttgctttcccagcgggaggggaggaagaagagtgtttacaaagtcctgtagccccctcacctttctgttttcacttttgccaatgtacatcgggtttggttttcttgtattatttaaacggttgtggtttcctttttccacggaggttcaatagaagccgctgcaggagagttttaccaaccattgtgtatgcccaataatttgttatcatttccttaggtagtaacctatttttgttctggtttggttcggttatctaatggaaaggtaactggcaatgcacttgatgtggtcttgcacatgtgggtgatagagttgggttcctttttatgctgggtgtacaggtgggtttgggagagaggagcatgcgcgagagagtctccgagtgtgtgcgacgcgtgtgtgtgtggtgggttgtctgtgtgcatatgtcctgcccgtgtatatgcacccacaccatgtgcccgtgcacaccagtgactacgcagtcccccctttctggtttagctgtgggaagatctgaatctggggccgtttgaaagcaaaaacaaaccactgtctctgcttctgaaacgggaatcagtaactctttgcattttctgtcccacaagatatgcaaaaacaatgcaataatattcatttaaaaatacaattgtgagttgtgttggcattaaaactgtattttaaaaaaagacagaaatttaagggaaaaacacaagaaggcattttgcttcaatatattccgtgtaatgttttattgcattgataatgtttctgttgaagaaaccgttatacttgaattcaggtcagtttcagtatttttcaaatatttttttaaaactgaattgcaattgtgccaagcgaatataatgaattgaattaagttggttttcggattcacttcttgtatattttgctgcatgtaaagtaaatcattttgtatttggagtgtgacaagctttacctttgaactcaagtgcttttctatatgtggttgggggaaagggaacaagttttctttagtttgcacaatgagcaaaggtatcaccagtgtagtcattattctgctctccacaaacaggtttggacattactgttttgcatatcttgtgtttgcttacatttccctcaatttttccaaaatcgtttgctgggtatgtttgtaccgcctcttgctgtgagagaccaggacctattttattccagtcttcactctgtccactctgctctggtcatctgatttggtacttctccaagaacagcccttcactgtgaggtgcagggaggcgttctgatgagccctcagtcactgggccgtcatccgcatcccccatggaagaggtagctggctttcccttcccttccaccacacggaattttctctttggcttccttaggaaagtgtacactaaccgggaggataaaattaaagtcaggctgcttggagggaggggcatcctcacttccggattcttgttgctctacccaacaaggacagcaggggctcgagaaaggaactggtgaaaccctgatccatctgaaagtcaactctgcgtgctcctttctccatcccttcctcactctggagcagcctttccttcaggcttgccctaatgtttgggctgccggggagggggccaggacaagggaagaggcatccggagctcacagtgggggtgggaacagatttttgtgggggcatctctaatgctcacttatatctccctagaacatcactcttttggtgctgtgtccttcaaatgtatgtcaacagtggtggctgaaaagggactgctttggggaaaacaggacccaaccattcacccagaattgacccattaaatctcttccagtcctagtgttccctgagcccctcttggcacatatataagtaagctagaaattacaataagggacagtccattcctctatgacagcttgctggactgattcatgacaaagtggagaaatgtactcaatactccccggttaacacagtctagaaacagagtttctttatggatatccacacccaagtcatccaaactttcttgattccttttcactgccatcaaggtcctctagaaattgagtttaggtatcatcctttgaaaagttcccaagatttctaccaggaggtacacacaggcgttccctgtctagggcaggaggactatcctagcttgaccttctgatccactagaataagactggcgtatgatgcctgtcatcagaacagactggcacaagtagtgacatcaatgaaccacagcacaatcttccaagtgatgtctactctccacctaaaatggaattttccccatgaccttgtaaaacataattgtcacatcttccatacccctcctgacagcccccaagtgtcaggagaaaacagtcaggggctaagggcccaagggacttgaagaaacaacagtttaaggtctgcagtttggtcaacttaattcttgtcctccgaccagccctgcctctttcatttccagaccttggagaatttttcccagctttgattcagaaggtactagttataacccctttccttcttcttaatccaataggcctcactctcactgggaaatccactcaaaggaacaaggcaatgtctctcattctatttcccagttccaaattccaggtgcttgtctggagtgaagctacccgttactttctcccagcttttctccacccagcatgtctcctgcccatgcagctgaagacagtggggcaacctcaggagaagcagacctttccatgcccaagttcatctcctgagcaacagtgacacctagaaaatgaggactttggaagtcacccaaaagatggtggctactttatggagtcctgaagatacacagccaccactcctaaaggcaaagaaagaaaacacgaatgtaggtcagggatagagtggaaccctggtcatcggggtttttagcctcatcgtgggaaaggtggtaaaggaggatgatggcatctccatccctagaggccaagaattgaaatatcattgtcaaggattagaaacaattcagcaaagaggccacaaaaagggcctgctgactcccagaagacctctttaaaccccaggggaggcaaatacttgctgatggagtctgggccgtttccatattttaaagaagacctgcctctggggcaaatgtcagcacagagaggactgggaggagaatggaggcaagaaaagggcatattttgactccctctgtgcctcttcccagttcatggaaggatgtgttcagcttacccacccacagtgaccagtgtggtggagccgctgacatctcaaggatctatttgggaaggtgagaagagtactcattccatctgggggtgttgttccagccacatcagcctacctggtgggatgtgggggtgtctgccaccctgtcccccctctgctgatgtccctcccctcaggctgtccaggtgccacctgacacaggctgctgtgcaaagacaggcggggaagcccaaacctcactcccagggaggccctcagccgccagagtccaggttctccagaggctacgatttgaggaggttgagggggaagacaggagggaaagaaaagtcctacaactgtcaggaatggggcacctttccctgtccctaagcaaagctccctcttcccactgccctccccagccccagctccctgtcctccccaacacctagtgagaaagacggtgcgtggaagggagtcccatgggcagatgcttacacgacctctttgtgaagcctcttctgggtttaacttcattcatcaatttattcttatgtcaaagcaatgaaacttttctttctggagccagataccaatacaacaggtgaacgggtttctgccacatctctacattgacgggggatgcttgaacaacccccctcactacacagacacacaccgttaaggcacaagggctggggttgagctctagatgagggactttcctgctcctgcaagggtgagcactgtatacacagacaaggagggtgcagtagagtgactcccttggatggaagtagtaccatcagaacctactattattatgacataaattctatttacatacattgagagaatactacaatcaacactttttcctgggatgactttaagaggtttgagccacagcacctgaagtggcaaagatccatggtctttgtagggtattagagaactcttccagtcacctctgaaagcactctagatcttgcagctgagtggatgaagtgtaacaaatctgttgcacgctgagaggagtcagaattagcatttttcatgaaagttccccacgtctctactaagaatgaggaagaaaagactaagactaggtaattacacagaggcttgaaatgttacatcaccagagccaagtcctctcccttcagatcagttactggctgctacacagggacacccccaccttttcagggcatcccatgcactccacttctcaggatctaaggaatttgactttgtagggatcccagaaagggcactgtgccacttcccctggtgtgaatcagacatacattgtacattcatttctaaaattcactcatgcacctcaaaccaaggtcattatccaaaaaaaaaaaaaaaaagctctgggtggaagagtttgtaagttttaagagagggtcatttctatgtgaggaaatgcagaaatggacagaatgattcttattcactgtttgggtctggagaattcccattgtggaaatcttagagatctcaagtttattaccaagggaataaggaaaaaaaggtgagcaggcaccaggccaagcagtggctcccttgccaaggaacctgaggctgcaggtttcagggacccccttgaagaaacctctcctggccattggccaggagaaaagagaagtctctcctgtagagtcacaagagaagcaaaagagggtgggtcactgggtcctggacatagcccccaaccccaagacttcccaatatggagaaactacaccaatgtttaaaaggggaaaaggaaagaacttgtacatcaagggaagatgatttgtaaacacacagtcctgtgcagaaagatccccttcaggaggtgtctccagcatcccaaagctgtgcgcaccttctcttttcctgcctcaggccacctatgcatccagctgcagcccatacccacacctgaaatccatctcttgaatcccagccaggttatataccaccccattgccatgtcctgtcctggccagaatgcatgctgttcccccaagcctcgtgggagtgaggccatgggaaacagagatgagcatgtctggacaagtctgtgatggtagtggatgagaataacccatggcaaaacacgcacattcattaagaaatagggcgacagattccccgttggtgaagcactgaaaggtctattactctcataatattgctgttttattttaatccaccagagctaccatgcaaaactttcctcctgtgaaacgctccagataaagctcctctaatctccccttccctcatgtcctccagctcaaacccaccttcatcccccaaaccaatctgtatcatgcctgttatcagagaggcacagaaagatgggcagtgcctccgttgtcaccattccccacacccctacacacccccacaccctcccctccaggctccacgacttcacagtcttactgttgtaaatatcattgtacagtttgtaatcctcaaataatcccattgtcagaggcctcgcctgatgggccttctcaccctcgagaaaggccagggaatctagaaggggcaacccttcaaggagagcttcagggtcatctctgtgtgagacactattgtatattcctgtaagattgcatttttatctaaggaatgatgttatttaaaaaacaaacaaaaaacacaaaaaataagaattgcaaataaatttcttaacaatgtct

SEQ ID NO: 14761 - DNA, 6417 bp, Artificial Sequence
  derived and/or modified sequence
atggtcaacgagaacactcgtatgtacatccctgaggaaaatcaccaggggagtaactatggctctccccggcccgctcacgcaaacatgaacgcgaatgccgcagccgggttagctcctgaacacattcctacacccggagccgccttgtcctggcaggctgccattgacgccgccagacaggcaaagttaatgggctccgccgggaacgccaccatcagtacagtgtcctcgactcagcgcaaacgccagcagtatgggaaaccaaaaaaacaggggagcacaacagcaacccggccacctcgggcactgctttgtttaactctgaagaaccctattagaagagcctgtatttcaatcgttgagtggaaaccattcgaaattattatactgcttaccatatttgctaactgtgtggctctcgccatttatattcccttccccgaggatgatagtaatgcgacaaactccaacctcgagagagtggaatacctgtttctcattatatttacagtggaagcttttctcaaagttattgcctatggactcttgtttcaccctaacgcataccttcggaatggctggaatctgcttgatttcattatcgtagtcgtggggctgttttcagcaatcctcgaacaagcaacaaaagcggatggagctaatgcgttaggcgggaagggcgctgggttcgacgtaaaggcattgagggcattcagagtcttacgcccactccgtctggttagcggagtcccttcactccaggtcgtgctgaattcaatcattaaagctatggttccactgctccacattgcccttctggtcttatttgtgattataatttacgcaattatcggactggagctgtttatgggtaagatgcacaagacttgttacaaccaggagggcatagccgacgtgccagccgaagatgacccgtccccttgtgctttagagactggacacggacgtcagtgccagaacggtacagtatgtaaacccggttgggacggccccaaacacgggatcacaaacttcgacaacttcgcatttgctatgctgactgtattccaatgtataacgatggagggctggacggatgtgctttactgggtgaacgacgcagttggtagggactggccatggatctacttcgttaccttgattattatcgggtccttctttgtactaaatctggtcctgggcgtgctgagcggtgagttttcaaaggagcgcgagaaagccaaggcccgcggcgattttcagaaactgcgcgagaaacagcagctggaggaagatctcaaaggctatctcgattggatcacacaggctgaagatattgaccccgagaacgaagacgaaggaatggatgaggagaaaccgagaaacatgtctatgccaacgagcgaaacagagtccgtcaacacagaaaacgtggctggcggtgacatagagggggagaattgcggagccaggctggcacaccgcattagcaaaagcaaattttctagatattggcggcgatggaaccgcttttgtagacggaaatgtagagctgccgttaaatccaacgtgttctactggctggttattttcctggtctttctgaatacactcaccatagcaagtgaacactacaaccaaccaaactggctgactgaggtgcaggacacagccaacaaggctctcttggctctgttcactgcggagatgctcctcaagatgtactctctgggtctccaagcctacttcgtctccctgttcaatcgatttgactgttttgtggtgtgtggaggcattctcgaaactatactcgtggaaacaaaaataatgtcccctctggggatctctgtgcttcgctgtgtgagacttctgcgcatattcaagattactcggtactggaattccctcagcaatcttgtggcgtccctgctcaatagcgtgcggagtatcgccagcctactgctgctactattcctctttatcattattttttcactgctcggaatgcagttgttcggcgggaaattcaattttgatgaaatgcagacccgtcggtctacctttgataactttcctcaaagcctgttaactgtgttccagatcctaactggagaggattggaactccgtcatgtatgatggaatcatggcatacggtggtccatccttccccggaatgttggtgtgcatctacttcatcatcctctttatctgtggcaactatattctgcttaacgtgtttcttgcaattgccgtagataacctggcagatgctgagtcgctgacttccgctcagaaggaagaggaagaggagaaggagagaaaaaagctcgctcgcacggcatctcccgagaaaaagcaggaacttgtcgagaagccagccgtcggcgaatctaaggaagaaaaaattgaactaaaatctatcactgcagatggtgagtcacctccagctaccaagatcaatatggatgacctccagcctaacgaaaacgaagataaaagcccttatcccaatcccgagacgactggagaagaagatgaggaggagcccgagatgcctgtgggcccccgtccgagacctctgtctgaattacatcttaaggagaaggcagtacctatgccagaggcaagtgcttttttcattttctctagcaataatcgcttccgcttgcaatgccataggattgtaaacgacaccatttttactaacctgatacttttttttatactcctttcctctattagcctggccgcagaagaccctgtccagcacacctcttttaggaaccatatacttttttatttcgacatagtcttcacaacaatatttacaatcgagatcgccctgaagatgaccgcttacggggcgtttctccacaaaggctccttctgcagaaattactttaacatcctggatcttctggtggtctctgtgagcctgatctcttttggtattcagtcctcggcaatcaacgtggtcaagatcctgcgtgtactgcgggttctaagaccgctgagagccattaaccgagctaaaggtctgaagcacgtggtccaatgcgtgtttgtggccatacgcaccatcggcaatattgtgatagtgaccacattgttacaattcatgtttgcctgtatcggggttcagcttttcaagggtaagttgtatacttgcagtgatagcagtaagcagaccgaggctgagtgcaagggcaactacattacctataaggacggggaggtagaccacccaattattcagccgagaagctgggagaatagcaagttcgactttgataacgtcctggccgccatgatggccctgttcaccgtatctaccttcgaggggtggcccgagttactatacagatcaattgatagtcacaccgaggataagggaccaatctataattaccgcgtagagatctccatctttttcattatctacattataataattgcattctttatgatgaatatttttgtcgggtttgtgatcgtgactttccaggagcagggtgaacaggagtacaagaattgcgaactagataagaaccaaaggcaatgcgtagagtacgcgttgaaagcccggcctctgcggaggtacatacccaagaaccaacatcagtataaggtgtggtatgtcgtcaattcaacatatttcgagtaccttatgtttgtgttaatcttgctgaacacgatatgcctcgccatgcagcattacggccaatcttgtttgtttaagattgctatgaacatcctgaacatgttatttaccggactgttcactgttgagatgattctgaaacttatagctttcaaacccaaacattacttttgcgatgcatggaacacattcgatgccctgattgtcgttgggtctattgttgatatcgcaattacagaagtgaatccagcggagcatacgcaatgctctccctctatgaacgcggaggagaattcgagaattagcatcacctttttccgattattccgcgtcatgaggctggtcaagctgctgtcgcggggagagggcatccggacactgctctggacttttatcaagtcattccaggccctgccatatgttgccttactgattgttatgttgttcttcatttatgccgttattggaatgcaagtattcggtaaaatagctcttaatgatacaacagaaattaacagaaacaacaacttccagactttccctcaggccgtcttgctcctatttcggtgcgcaacaggagaggcttggcaggacatcatgctggcttgtatgccaggtaaaaagtgcgcacctgagtccgaaccaagcaactctaccgagggggaaactccctgcggctcgagctttgccgtgttctacttcatctctttttatatgctgtgcgcatttcttatcattaatctcttcgtcgctgtcataatggacaactttgattatcttaccagagactggtccatactgggtcctcatcatttggacgagtttaaaagaatctgggccgagtacgaccctgaagccaaaggtagaataaagcacctggatgtcgtcacgctcctcaggcggatacagcccccactggggttcggaaagctttgccctcacagagtcgcatgcaagaggctggtgagcatgaatatgccactgaacagcgacgggacagtcatgttcaacgctaccctattcgccttagtaagaacagccctgcggataaagacagaaggtaatctcgaacaagccaatgaggagttgagggcaataatcaagaaaatctggaagcggactagcatgaagctgctcgaccaggttgtgccaccggcaggcgacgatgaggtcacggtggggaagttctatgcaacatttctgatccaggagtacttccgcaaatttaagaagaggaaagagcaagggctcgtggggaaaccatcacagaggaacgccctgagcctccaggctggattaagaacgcttcatgatatcggccccgaaataaggagggctatatcaggcgacctcacggctgaggaagagttggacaaagcaatgaaggaggccgtgagcgccgctagtgaagacgacatcttccggcgggctggcggtctcttcggaaaccacgtgagctattaccagtcggatggtcgatcagcctttccccagaccttcacaacacagcgaccgctgcacataaacaaggcaggatccagccagggagatacagagagtccctcccacgaaaaactggttgattctacctttacaccatcatcatacagcagcactgggagcaatgcaaacatcaacaacgccaacaatactgccctaggcagactcccgagacccgccggctatccctccacagtttccaccgtggaggggcacgggccccccctctcgccagcgattagagtccaggaagtcgcttggaagctgagtagtaacagatgccatagcagagagtcccaggcagccatggccggtcaggaggagactagccaagacgaaacgtacgaagtaaaaatgaaccacgatacagaagcctgctcggaaccgtctctgctgtctaccgaaatgctgagttatcaagatgacgagaatagacagctcacactgccagaggaggataagagggacatccggcagtctcccaaacgcggctttctgagatccgcctccttagggcgcagggctagtttccacctcgagtgcctcaagcggcagaaagatcgcgggggagatatcagtcaaaagaccgtacttcctctacatctggtacaccatcaggctctcgccgtggctggactgtcacctctgcttcaacgcagccattcccctgccagcttccctcgaccctttgccactcccccagcaaccccaggtagccgcggctggcctccccagcccgtccctaccctccgactggaaggcgtcgagtcctctgagaaattgaattccagttttcccagtattcattgtgggtcctgggcggagaccacccctggcggcggcggatcgagcgctgctagacgagtcagaccagttagcctgatggtcccttcccaagcaggtgctcctggacgacaatttcacggcagtgcaagttctctggtagaagctgtactgattagcgagggcctggggcaattcgcgcaagaccccaaattcattgaggttactactcaggagttggctgacgcttgcgatatgactattgaggagatggaatcggctgctgacaacatcttgtcgggtggagctccacagagcccaaacggggctctgctgccctttgtgaattgccgagatgctggtcaggaccgggcaggaggcgaggaggatgccggctgtgtgcgcgcgagggggcggccttccgaagaggagcttcaggatagtagagtgtatgtgagcagtctctag

SEQ ID NO: 14762 - DNA, 6417 bp, Artificial Sequence
  derived and/or modified sequence
atggtgaatgaaaacaccaggatgtacatccctgaggagaaccaccagggcagcaactacggcagccccaggcctgcccacgccaacatgaatgccaatgctgctgctggcctggcccctgagcacatccccacccctggggccgccctgtcctggcaggccgccattgatgctgcccggcaggccaagctgatgggcagcgctggaaatgccaccatcagcacagtgagcagcacccagaggaagaggcagcagtatggcaagcccaagaagcagggcagcaccacagccacccggcccccccgggccctgctgtgcctgaccctgaagaaccccatccggcgggcctgcatcagcatcgtggagtggaagccctttgagatcatcatcctgctgaccatctttgccaactgtgtggccctggccatctacatccccttcccagaagatgacagcaatgccaccaacagcaacctggagcgggtggagtacctgttcctgatcatcttcaccgtggaggccttcctgaaggtgattgcctacggcctgctcttccaccccaatgcctacctgagaaatggctggaacctgctggacttcatcatcgtggtggtgggcctcttcagcgccatcctggagcaggccaccaaggcagatggagccaatgccctgggcggcaaaggagctggctttgatgtgaaggccctgcgggccttccgggtgctgcggcccctgcggctggtgtctggagtgcccagcctgcaggtggtgctgaacagcatcatcaaggccatggtgcccctgctgcacatcgccctgctggtgctgtttgtgatcatcatctatgccatcatcggcctggagctgttcatgggcaagatgcacaagacctgctacaaccaggagggcattgctgatgtgcctgcagaagatgaccccagcccctgtgccctggagaccggccacggccggcagtgccagaatggcaccgtgtgcaagccaggctgggatggccccaagcacggcatcaccaactttgacaactttgcctttgccatgctgactgtgttccagtgcatcaccatggagggctggacagatgtgctgtactgggtgaatgatgctgtgggccgggactggccctggatctactttgtgaccctcatcatcatcggcagcttctttgtgctgaacctggtgctgggcgtgctgtctggagagttcagcaaggagcgggagaaggccaaggcccggggggacttccagaagctgcgggagaagcagcagctggaggaggacctgaagggctacctggactggatcacccaggctgaagatattgatcctgaaaatgaagatgagggcatggatgaggagaagcccaggaacatgtccatgcccaccagcgagacagaatctgtgaacacagaaaatgtggccggcggggacatcgagggggagaactgtggggcccggctggcccaccgcatcagcaagagcaagttcagccgctactggaggcgctggaaccgcttctgcaggaggaagtgcagagctgctgtgaagagcaatgtgttctactggctggtgatcttcctggtgttcctgaacaccctgaccatcgccagcgagcactacaaccagcccaactggctgacagaggtgcaggacacagccaacaaggccctgctggccctcttcaccgctgagatgctgctgaagatgtacagcctgggcctgcaggcctactttgtgtccctcttcaacagatttgactgctttgtggtgtgtggcggcatcctggagaccatcctggtggagaccaagatcatgagccccctgggcatctctgtgctgcgctgtgtgcggctgctgcgcatcttcaagatcacccgctactggaacagcctgagcaacctggtggccagcctgctgaacagcgtgcgcagcatcgccagcctgctgctgctgctcttcctgttcatcatcatcttcagcctgctgggcatgcagctgtttggaggcaagttcaactttgatgagatgcagaccaggaggagcacctttgacaacttcccccagagcctgctgaccgtcttccagatcctgaccggggaggactggaacagcgtgatgtatgatggcatcatggcctatggaggccccagcttccctggcatgctggtgtgcatctacttcatcatcctcttcatctgtggcaactacatcctgctgaatgtgttcctggccatcgctgtggacaacctggctgatgctgagagcctgaccagcgcccagaaggaggaggaggaggagaaggagaggaagaagctggccaggacagccagccctgagaagaagcaggagctggtggagaagccagctgtgggggagagcaaggaggagaagattgagctgaagagcatcacagcagatggagagagccccccagccaccaagatcaacatggatgacctgcagcccaatgaaaatgaagacaagagcccctaccccaaccctgagaccactggagaggaggatgaggaggagcctgagatgcctgtgggcccccggccccggcccctgtctgagctgcacctgaaggagaaggctgtgcccatgcctgaggccagcgccttcttcatcttcagcagcaacaaccgcttccggctgcagtgccaccgcatcgtgaatgacaccatcttcaccaacctgatcctcttcttcatcctgctgagcagcatcagcctggccgctgaggaccctgtgcagcacaccagcttcaggaaccacatcctcttctactttgacatcgtgttcaccaccatcttcaccatcgagatcgccctgaagatgacagcctatggagccttcctgcacaagggcagcttctgcaggaactacttcaacatcctggacctgctggtggtgtctgtgtccctcatcagctttggcatccagagcagcgccatcaacgtggtgaagatcctgcgggtgctgcgggtgctgcggcccctgcgggccatcaacagagccaagggcctgaagcacgtggtgcagtgtgtgtttgtggccatccgcaccatcggcaacatcgtcatcgtgaccaccctgctgcagttcatgtttgcctgcatcggcgtgcagctgttcaagggcaagctgtacacctgcagcgacagcagcaagcagacagaagctgagtgcaagggcaactacatcacctacaaggatggagaggtggaccaccccatcatccagcccaggtcctgggagaacagcaagtttgattttgacaacgtgctggccgccatgatggccctcttcaccgtgtccacctttgagggctggccagagctgctgtaccgcagcattgacagccacacagaggacaagggccccatctacaactacagagtggagatcagcatcttcttcatcatctacatcatcatcatcgccttcttcatgatgaacatctttgtgggcttcgtcatcgtgaccttccaggagcagggcgagcaggagtacaagaactgtgagctggacaagaaccagaggcagtgtgtggagtatgccctgaaggcccggcccctgcggcgctacatccccaagaaccagcaccagtacaaggtgtggtacgtggtgaacagcacctactttgagtacctgatgtttgtgctgatcctgctgaacaccatctgcctggccatgcagcactacggccagagctgcctcttcaagatcgccatgaacatcctgaacatgctgttcaccggcctcttcaccgtggagatgatcctgaagctgattgccttcaagcccaagcactacttctgtgatgcctggaacacctttgatgccctgattgtggtgggcagcatcgtggacatcgccatcacagaggtgaacccagctgagcacacccagtgcagccccagcatgaatgctgaggagaacagccgcatcagcatcaccttcttccgcctcttccgggtgatgaggctggtgaagctgctgagcagaggagagggcatccgcaccctgctgtggaccttcatcaagagcttccaggccctgccctacgtggccctgctgattgtgatgctgttcttcatctatgctgtgattggcatgcaggtgtttgggaagatcgccctgaatgacaccacagagatcaacagaaacaacaacttccagaccttcccccaggccgtgctgctgctcttccgctgtgccaccggggaggcctggcaggacatcatgctggcctgcatgcctgggaagaagtgtgcccctgagagcgagcccagcaacagcacagaaggagagaccccctgtggcagcagctttgctgtgttctacttcatctccttctacatgctgtgtgccttcctgatcatcaacctgtttgtggccgtcatcatggacaactttgactacctgacccgggactggagcatcctgggcccccaccacctggatgagttcaagaggatctgggccgagtatgaccctgaggccaagggccgcatcaagcacctggatgtggtgaccctgctgcggcgcatccagccccccctgggctttgggaagctgtgcccccaccgggtggcctgcaagaggctggtgtccatgaacatgcccctgaacagtgatggcaccgtgatgtttaatgccaccctgtttgccctggtgaggacagccctgcgcatcaagacagagggcaacctggagcaggccaatgaggagctgcgggccatcatcaagaagatctggaagaggacctccatgaagctgctggaccaggtggtgcccccagctggagatgatgaggtgacagtgggcaagttctacgccaccttcctgatccaggagtacttcaggaagttcaagaagaggaaggagcagggcctggtgggcaagcccagccagagaaatgccctgagcctgcaggccggcctgcggaccctgcatgacatcggccctgagatccggcgggccatcagcggggacctgacagctgaggaggagctggacaaggccatgaaggaggccgtgtctgctgcctctgaagatgacatcttcagaagagctgggggcctgtttggaaaccacgtgtcctactaccagagtgatggccgcagcgccttcccccagaccttcaccacccagaggcccctgcacatcaacaaggccggcagcagccagggcgacacagagagccccagccatgagaagctggtggacagcaccttcacccccagcagctacagcagcacaggcagcaatgccaacatcaacaatgccaacaacacagccctgggccgcctgcccaggcctgctggctaccccagcacagtgtccacagtggagggccacggcccccccctgagccctgccatccgggtgcaggaggtggcctggaagctgagcagcaaccgctgccacagccgggagagccaggccgccatggccggccaggaggagaccagccaggatgagacctatgaggtgaagatgaaccacgacacagaggcctgcagcgagcccagcctgctgagcacagagatgctgagctaccaggatgatgaaaatcggcagctgaccctgcctgaggaggacaagagggacatccggcagagccccaagaggggcttcctgcggagcgccagcctgggcagaagagccagcttccacctggagtgcctgaagaggcagaaggacagaggaggagacatcagccagaagacagtgctgcccctgcacctggtgcaccaccaggccctggccgtggccggcctgagccccctgctgcagaggagccacagccctgccagcttcccccggccctttgccaccccaccagccaccccaggcagccggggctggccaccccagcctgtgcccaccctgcggctggagggcgtggagagcagcgagaagctgaacagcagcttccccagcatccactgcggctcctgggccgagaccacccctgggggcggcggcagcagcgctgccaggagagtgcggcctgtgtccctgatggtgcccagccaggccggggcccctggccggcagttccacggcagcgccagcagcctggtggaggccgtgctgatcagcgagggcctgggccagtttgcccaggaccccaagttcatcgaggtgaccacccaggagctggctgatgcctgtgacatgaccatcgaggagatggagagcgctgctgacaacatcctgtctggaggagccccccagagccccaatggagccctgctgccctttgtgaactgcagagatgctggccaggaccgggccggcggggaggaggatgctggctgtgtgcgggcccggggccggcccagcgaggaggagctgcaggacagccgggtgtatgtgagcagcctgtag

SEQ ID NO: 14763 - DNA, 6417 bp, Artificial Sequence
  derived and/or modified sequence
atggtgaacgagaacacccggatgtacatccccgaggagaaccaccagggttcaaattacggctccccgcggccagcacatgcaaatatgaacgctaatgctgccgccgggctggcccctgaacatattcctactccgggggccgccctgtcctggcaagccgcgattgatgcggctcgacaggccaagctcatggggtcagcgggcaacgccacaatctccacagtgagctccacacagagaaagcggcagcaatacggcaagcccaaaaagcaaggctcgacaaccgcaactcggccgccgcgggccctattgtgcctgaccctgaagaatcctatccgccgggcgtgtatcagcatcgtggaatggaagccattcgagattattatcctcctcacaatctttgccaactgcgtcgcgctggccatctatatccctttccccgaagacgactcgaatgctaccaatagcaatctggagcgcgtcgagtacctgttcctgatcatcttcaccgtggaagccttcctcaaggtgattgcctacgggctcttattccaccccaacgcttatcttaggaacgggtggaatctgctcgattttattatcgttgtggtgggtctgttctccgccattcttgaacaggctactaaggccgatggagctaacgcgctgggcggcaaaggagccggctttgatgtgaaagcattgcgggctttccgcgtacttagacctctccgcctcgtaagtggggtgccctcacttcaagtcgttctgaacagcataattaaggcaatggtgccactgttgcacattgctttgctcgtgctgtttgtcatcatcatatacgccataattggtctcgaattgttcatgggtaagatgcataaaacatgctataaccaggaaggtatcgcagacgtacctgccgaggacgatcctagcccgtgcgctttagagaccggacacggaaggcagtgtcagaatggcaccgtctgcaagccaggctgggatggccctaaacatggaatcaccaatttcgacaattttgccttcgccatgctgacggtcttccagtgtattactatggagggatggactgatgtgctgtactgggtaaacgatgccgtcggccgtgattggccctggatttattttgtcactttgatcatcatagggtccttctttgtactaaatctggtgctgggagtgctctctggagaattctccaaggaacgggagaaagccaaagcacgcggagattttcagaaactgagagagaagcagcagctggaagaggacctgaaaggctacttggattggatcacccaagcagaggatattgatcccgagaacgaggacgagggcatggatgaagagaagcccaggaatatgagtatgcccacgtccgagactgaatcagtgaacacagagaacgtggcaggaggggatattgagggagaaaattgcggcgcgcggctggcgcatagaatttcaaaatccaagttctcacggtactggaggagatggaacaggttctgtcggagaaagtgtcgagccgcagtgaagagtaatgtgttctactggctggttattttcctggtttttttgaacactctgacgatcgcttctgaacactataatcagcccaactggctcacggaagtacaggataccgccaataaggcacttctggcactgtttaccgccgaaatgctgcttaaaatgtactccctcggactccaggcatattttgtctccctttttaataggttcgactgcttcgtagtgtgtgggggcattctcgaaactatattggtcgagaccaagatcatgtcacccctggggattagcgtactgaggtgcgtgaggctcctgagaatcttcaagattacaagatactggaattccctttccaacctcgtcgcttcgctgctcaatagcgtgcgctctatagcatccctgctgcttctgctcttcttatttattatcattttctccctgttagggatgcagctcttcggtggaaagttcaatttcgacgagatgcagacaaggagatccacattcgacaattttccccagagcttactgacggtgtttcaaatcttaaccggagaagattggaactcagtcatgtacgacggcataatggcatatggcggcccttcctttcctggaatgctggtgtgcatttattttatcatcctgtttatttgcgggaactacatcttgctgaacgtgtttctggctatagcagtggataacttagccgacgccgagtccctgacatccgcacagaaagaggaagaagaagagaaagaaaggaagaagttagctcgcactgctagcccagagaagaaacaggagctggtagaaaagccagcggtcggcgaatccaaagaggaaaagattgagcttaagtcaattacggcagacggggagtctccccctgcaaccaagattaacatggatgacttgcagccaaatgaaaatgaagacaagagtccctacccgaatcccgaaacgactggcgaggaggacgaggaagagcctgagatgccggtgggcccccgccctcgtcctctatctgaattacatttaaaggaaaaagcggttcccatgcccgaagcctccgccttttttatcttttcatcgaataacagattcaggttgcagtgccaccgcatcgtgaatgatacaatttttactaatctgatactcttttttattctactttcttccatctcactcgcagccgaggaccctgtccagcacacctcatttaggaatcatatcttgttttacttcgacatcgtctttaccacaatcttcacgatcgagatcgcactaaaaatgactgcttatggcgccttcctccataaaggatcattctgtcgcaactattttaatatccttgatttgctcgtggtgagtgtttcactgatcagctttggcattcagtcatcagctataaatgtcgtgaagatcctgcgcgtgcttagagtgcttcgcccactaagggctataaacagggccaaaggattaaaacacgtagtccaatgcgtcttcgttgccattagaactatcgggaacatcgtgatcgtaacgaccttgttgcagttcatgtttgcttgtatcggggttcagctattcaaagggaaattatacacctgtagcgacagcagcaagcagacagaggccgagtgtaaagggaactatatcacctacaaggacggggaagtcgaccaccccattatccaacctaggagttgggaaaatagcaagttcgatttcgacaacgtgcttgccgccatgatggcattattcaccgtgtctactttcgaggggtggcctgagttactctatagatctatagatagccacactgaggacaagggtcccatctataactatcgagtggagatatctatcttctttatcatatatatcattataatcgctttctttatgatgaacatcttcgtgggctttgtgatcgtgacatttcaggaacaaggagaacaggagtacaaaaattgtgagctcgataaaaatcagaggcaatgcgtggagtacgccctgaaggcccgacctctcaggagatacattccaaaaaatcagcaccaatataaagtgtggtatgtggtgaattccacctacttcgagtacctcatgttcgtcctgattctcctaaatacgatctgtcttgcaatgcagcactatggtcagtcatgcttgttcaaaattgcaatgaatatactgaatatgctgtttacaggcctgtttaccgtcgaaatgatactaaagctgatcgcttttaagcctaagcactacttctgtgacgcttggaataccttcgacgcgctaattgtggtagggagcatcgtcgacattgcaattacggaagtgaaccccgctgagcatactcagtgcagtccaagtatgaacgcggaggagaattccagaatctctattacttttttccgattattcagagtgatgcgactggttaagcttctctcccgcggagagggaatcaggacgctgctctggacattcatcaaatccttccaagcactgccatacgtggcactactgattgtgatgttgttctttatttacgccgtaatcggaatgcaagtgttcggcaaaatcgcactcaacgatactaccgaaataaaccgtaacaataattttcagacttttcctcaagcggtgctgttattgtttaggtgcgctaccggcgaagcatggcaggacatcatgctggcctgcatgccaggtaaaaaatgtgcgcctgaatccgaacctagtaattcaaccgaaggtgagacaccctgtggctcttccttcgccgtgttttacttcataagtttctacatgctgtgcgcatttctgatcattaacctatttgtggccgtgatcatggacaatttcgactatctaaccagagactggagcattttgggcccacaccatcttgacgagttcaaacgaatttgggctgagtacgatcccgaagcaaaaggacgaatcaaacacctcgacgtggtgacgcttctgcgacgcatccagcctcctctgggtttcgggaagctgtgcccccaccgggtggcctgcaaacgactggtctccatgaacatgccattaaactcagatgggaccgtgatgttcaacgccactctgtttgcacttgtaagaacagcactgcgcataaaaaccgaagggaacctggaacaggcaaacgaagagttgcgggccatcatcaaaaagatctggaagcggacttccatgaaactgctcgatcaggtggtacccccagccggcgatgatgaggtgacggtcgggaagttctatgcaacatttttgatccaggaatactttaggaaatttaagaagcggaaagagcagggattagtgggaaagccaagtcagcggaatgccctcagtcttcaggctggcttgcgcactctgcacgacatcggtccagagatccggcgtgccatctccggtgatcttaccgcggaggaggaactggataaagcaatgaaggaagcagtgtcagccgcaagcgaagacgatattttccgccgggcaggtggcctgttcggtaatcatgtgagttactatcaaagcgatggccgatcagcttttccgcagacatttacaacacagagacccctgcatattaataaagcaggaagctcacaaggcgatactgagagcccttcgcatgagaaactggtcgactcaacattcaccccaagttcctactcctctacagggagtaatgccaacattaacaatgcaaataataccgctctaggccgcctgccaaggcccgcaggatatccctcaactgtgagcaccgttgaggggcacggtccgcccctcagtcctgccatccgcgtccaggaggttgcatggaagctatcaagtaacaggtgtcactcccgggagtcccaagcagctatggctggacaggaagagacctcacaagatgagacatacgaagtgaagatgaatcacgacaccgaggcctgctctgagccctccctattgtctacggaaatgctatcttatcaagatgatgaaaaccgtcagctaactttacctgaagaggacaagcgagatatccgccagtcccccaagagaggtttccttcgctccgcttctctaggcaggcgggccagcttccacctggagtgcctaaaacggcaaaaggatagaggaggggatatatctcagaagaccgtgctgcccctgcacttggtgcatcaccaagccttggcggtcgcaggtctgagccccttgctccaaagatctcattctccggccagcttccctaggcccttcgcaactccccccgccacccctggcagccgaggctggccacctcagcccgtgccaacactgcggctcgaaggtgtcgagagttcagagaagctcaactcaagttttccgagtattcactgtgggtcttgggcggagactacccctggcggcgggggcagttcagccgctcgccgcgtgcggcctgttagcctgatggtgccctctcaagccggtgcaccaggacgccagttccacgggtctgcctctagccttgttgaggcggttctgatctccgaaggattaggacagttcgcacaggatcccaagtttattgaggtgaccacacaggagttagccgatgcatgtgatatgacaattgaagagatggaatctgcagccgataatatcctttcaggaggagcaccccagtccccaaacggcgcactgctaccattcgttaactgccgggacgcaggccaggatcgtgctggtggcgaggaagatgcagggtgtgtacgggctagaggacggccttccgaagaagagctgcaggatagccgggtgtatgtgtcttctctgtag

SEQ ID NO: 14764 - DNA, 6416 bp, Artificial Sequence
  derived and/or modified sequence
atggtcaacgaaaacacgcggatgtacatacctgaggagaatcaccagggaagcaattacggtagccccagacctgcgcatgccaacatgaatgctaacgctgcggcaggactggcaccggagcatatccccacacccggtgccgcactgtcttggcaagctgccatcgatgcagcacggcaggctaagttaatgggatccgcagggaatgctaccatcagtaccgtcagtagcactcagagaaaacgtcagcagtacggtaagccaaagaagcagggctcaacaacagcaacacgaccgccacgcgcacttttatgcctcaccctcaaaaacccaatcaggcgggcttgtatcagcattgttgagtggaaacctttcgagattatcatcctcttgaccatcttcgctaactgtgttgctctggctatctatatcccatttcctgaagatgatagcaatgccaccaattccaacctggagagggttgagtatctatttctgatcatcttcacggtcgaggctttcctgaaagtaattgcttatggcctcctgtttcatcccaacgcctatctgaggaatggttggaatctgttggattttatcatcgtggtggtaggcctgtttagtgcaatcctggagcaagctactaaagctgacggggctaatgccctgggcggtaagggcgctggctttgacgtgaaggccttacgcgctttcagagtgctccggcctctgcgactggtgagcggtgtgccctctctccaggtagttctgaattcaatcattaaggccatggtgcccttgttgcatatagcactcctagtgctgttcgtgatcatcatttacgccatcatcggattggaactttttatggggaagatgcataagacgtgctataaccaagagggcatcgctgatgtgccggcagaagatgacccatccccttgcgctctggagacaggccacgggagacagtgtcagaatggcacagtctgcaaacccggttgggacggcccaaagcatggtatcacgaattttgacaatttcgcgttcgcaatgctcaccgtcttccagtgtataacaatggagggttggacagatgtcctttactgggtgaatgacgctgtgggtcgagactggccgtggatctatttcgtcacactgataatcattgggagctttttcgtactgaacctggtgctcggggtgctctctggggagttttcaaaagaaagggagaaggcaaaagcacgtggtgactttcagaaattaagggaaaaacagcagctcgaggaagacctcaagggatacttggattggatcactcaagcagaagatatagatccggagaacgaggatgaaggtatggatgaagaaaaacctcgcaacatgagtatgcctacaagtgaaactgagtcagtgaataccgaaaatgtcgccggaggagatattgagggcgaaaattgcggggcacgcctggctcatagaatttctaagtcaaagttttcccggtactggcgtagatggaataggttttgtcgcagaaagtgtagagcagcagtcaaatcaaacgtgttctattggctggttatcttcctggtcttcctgaatactctgaccattgcgtcagaacactacaaccaacctaattggctgactgaagtccaggacacggccaacaaggcactgctcgctctcttcactgcggaaatgttgctgaaaatgtatagcttggggctccaggcctattttgtgtccctcttcaaccgttttgattgctttgttgtgtgcgggggaattctcgagactatcctggtggagaccaaaattatgagccctctgggcatctcagtgttgagatgcgtacgtttgctgagaattttcaagatcacgagatattggaactccctctccaatctcgtagcctcactgcttaacagcgtgcgcagcatcgccagcttattgttgctcttattcctcttcataattatcttttccctgttgggcatgcaacttttcgggggaaaatttaacttcgacgaaatgcagaccagacggtccaccttcgacaactttccacagagtctgctgaccgtcttccagattctaactggggaagactggaatagcgtcatgtacgacggcattatggcctatggcggaccatcattcccaggtatgctggtgtgtatttactttatcattctttttatctgcggaaattacatcctcctgaatgttttccttgccatcgccgtggataatctggcggatgccgagtctttaaccagtgcccagaaagaagaagaggaggagaaggagcgcaaaaaactggcaagaaccgcctcaccagagaagaaacaggagctcgtggagaagcccgcagtaggggaatctaaggaggagaagatcgagctgaaaagtatcacagccgatggtgagagtcccccagcgaccaagatcaatatggatgatcttcaacccaacgaaaacgaggataagagcccttaccctaatccggagaccacgggcgaggaagacgaggaagagcccgaaatgcccgtgggcccaagaccacgtcctctctctgagcttcatctgaaggaaaaggccgtgccaatgcccgaagcttctgccttttttatattttcttcaaacaacagattccgcctacagtgtcaccgaattgtgaatgacaccatattcaccaatctgatcctcttttttatattgctgtcttccattagcctggccgcagaggaccccgtccagcacacctctttcagaaaccatattttgttttattttgacatagtattcacaaccatctttaccatcgagattgctttaaaaatgacagcctatggcgctttcctacataaagggtccttttgtcggaactacttcaacattctcgaccttttagtggtctccgtgagccttatcagcttcggtattcagagctccgccattaacgttgtaaagatactgcgcgtgttgcgtgtcctgagaccactgagggctattaacagagcaaagggccttaagcatgtggtacagtgcgtcttcgtggctatcagaaccattggcaatattgtcatcgtgaccacccttctgcagttcatgtttgcttgtattggcgtgcagctgtttaagggcaaactgtatacatgcagcgactctagcaaacaaaccgaggccgagtgcaaaggcaactatattacttataaagacggggaagttgaccacccgattatccagcctcgatcatgggaaaatagcaagtttgatttcgacaatgtcctggctgctatgatggctttgtttaccgtttcaactttcgaggggtggcccgagctgctctaccggtcaattgactctcataccgaagacaagggacctatttataactaccgtgtggaaatctctatcttttttattatctacatcatcatcatcgcttttttcatgatgaacattttcgtcggatttgtgatagttacctttcaggaacagggcgaacaagagtataaaaattgtgagctcgataaaaaccaacgccagtgtgtggagtatgctctgaaagcacgcccacttcgccgatatatcccaaagaatcaacatcaatataaggtttggtacgttgtcaattctacatacttcgagtacctgatgtttgttcttatcctgctgaacaccatctgtctcgccatgcagcattacggccaatcgtgcctcttcaagatcgccatgaacatcttgaatatgctcttcacagggctgttcacagtggagatgatcctgaaattgattgcgttcaagcccaagcactacttttgcgatgcatggaatacctttgacgccctgattgtggtaggcagcatcgtggacatcgctatcacggaggtgaatcctgcagagcacactcagtgctctccttcaatgaatgccgaggaaaactctaggatttctatcacattcttccgactgtttagggtgatgcgcctcgtcaagttgctctcacggggagaagggattagaaccctcctttggacgtttatcaaatcattccaggccctgccatacgtggccctgctaatagtcatgctattttttatctatgccgttattggaatgcaagtatttggaaaaattgcgctcaacgatacaactgaaattaaccggaataacaattttcagactttcccacaggccgtgctgttgcttttcagatgtgccaccggagaggcctggcaagacatcatgctggcctgcatgccaggcaagaagtgcgcccctgagtcggagcccagtaatagtacggagggcgagaccccctgtggctccagttttgccgttttttactttatcagcttctatatgctttgcgcgttcctgatcattaatctatttgtggcagtcataatggacaacttcgactacttaacccgcgactggtccatcctgggccctcaccacttggacgaatttaagaggatctgggcggagtatgaccccgaagcgaaaggaagaatcaagcaccttgacgttgtgaccctattgagacgcattcagccccctctcggcttcggaaaactatgcccgcatcgcgtggcatgtaagcgtttggtgtccatgaacatgccactaaattctgatggtacagtgatgttcaacgcaaccctgtttgctctggtccgaacagcccttcgaatcaagacagagggcaacctcgaacaggcgaatgaggagcttagggccattatcaaaaagatttggaagaggactagtatgaagctgctcgaccaggtggtgcctcccgctggggatgacgaagtgaccgttgggaagttctacgcaacattcctgattcaggaatacttcagaaagttcaagaagcgcaaggagcagggcctggtgggaaagccatcacagagaaatgcactgtccttgcaggcaggtctgagaacactacacgatatagggccagagatccggcgtgcaatcagtggggacctgactgccgaggaggagcttgacaaagctatgaaggaggccgtttcggctgcatccgaagatgatatctttcgacgggcaggcggattgttcgggaatcacgtcagctactaccaatctgatgggaggtcagccttcccacaaaccttcacaacacagagaccactccacattaacaaagccggaagctcacagggcgacacggagagtccatctcacgagaagctggtcgactccacctttaccccctcctcatatagtagcaccggatctaatgcgaacataaataacgccaataatactgctctgggacgactccctaggcccgctggttacccctctaccgtgtctactgtggagggccatggcccacctttgtctcccgctattcgagtacaggaggtggcatggaagcttagctcaaacagatgccacagtagagagtcacaggctgctatggccggacaggaggaaactagccaggacgagacgtacgaagtgaagatgaatcatgacacagaggcttgctccgaaccatcccttctctcgaccgaaatgctgtcctatcaggacgacgagaatcggcagctcacattgcccgaagaagataaacgtgacattcgtcaaagccccaagcggggtttcctccgttcggccagcttgggacggagagccagctttcatctcgaatgtctaaagagacaaaaagataggggtggagacatttctcagaaaacggttctgcctcttcatcttgtgcaccaccaggccctcgctgttgcaggcctgagtcctctcctccaaagaagccactctccggcttcattccccagacctttcgcaactccacctgcaacccctggttcgcggggttggcctccacaaccagtgccaaccttgagactggagggagtggagagcagcgagaagctgaattcatcctttccaagcatacactgcgggtcgtgggctgaaaccacacctggtggcggtggatcatcggcggctaggagggtccggccagtgtctctgatggtaccatctcaggccggagctccaggcagacagtttcacgggtcagcttccagcctcgtggaggccgtcctgatatccgagggattaggtcaatttgcccaggacccaaaattcattgaagtaactacccaggagctggccgacgcctgcgacatgacgattgaggagatggagtcggcagctgataacattctgagcggaggagcgcctcagtctcccaacggtgccctgctgccctttgtaaactgtcgagacgccggacaggacagagctggtggggaggaagacgccggatgcgttcgagccaggggcagaccttctgaagaagagttgcaagattcgagagtgtatgtaagcagtttata

SEQ ID NO: 14765 - DNA, 8425 bp, Artificial Sequence
  derived and/or modified sequence
ggaaggggcccggatgtactgaggatgcgttacagtttcactcgaggaggcagtagtggaaaggagcagtttttggggtttgatgccataatgggaatcaggtaatcgtcggcggggaagaagaaacgctgcagaccacggcttcctcgaatcttgcgcgaaagccgccggcctcggaggagggattaatccagacccgccggggggtgttttcacatttcttcctcttcgtggctgctcctcctattaaaaccatttttggtccatggtcaatgagaatacgaggatgtacattccagaggaaaaccaccaaggttccaactatgggagcccacgccccgcccatgccaacatgaatgccaatgcggcagcggggctggcccctgagcacatccccaccccgggggctgccctgtcgtggcaggcggccatcgacgcagcccggcaggctaagctgatgggcagcgctggcaatgcgaccatctccacagtcagctccacgcagcggaagcggcagcaatatgggaaacccaagaagcagggcagcaccacggccacacgcccgccccgagccctgctctgcctgaccctgaagaaccccatccggagggcctgcatcagcattgtcgaatggaaaccatttgaaataattattttactgactatttttgccaattgtgtggccttagcgatctatattccctttccagaagatgattccaacgccaccaattccaacctggaacgagtggaatatctctttctcataatttttacggtggaagcgtttttaaaagtaatcgcctatggactcctctttcaccccaatgcctacctccgcaacggctggaacctactagattttataattgtggttgtggggctttttagtgcaattttagaacaagcaaccaaagcagatggggcaaacgctctcggagggaaaggggccggatttgatgtgaaggcgctgagggccttccgcgtgctgcgccccctgcggctggtgtccggagtcccaagtctccaggtggtcctgaattccatcatcaaggccatggtccccctgctgcacatcgccctgcttgtgctgtttgtcatcatcatctacgccatcatcggcttggagctcttcatggggaagatgcacaagacctgctacaaccaggagggcatagcagatgttccagcagaagatgacccttccccttgtgcgctggaaacgggccacgggcggcagtgccagaacggcacggtgtgcaagcccggctgggatggtcccaagcacggcatcaccaactttgacaactttgccttcgccatgctcacggtgttccagtgcatcaccatggagggctggacggacgtgctgtactgggtcaatgatgccgtaggaagggactggccctggatctattttgttacactaatcatcatagggtcattttttgtacttaacttggttctcggtgtgcttagcggagagttttccaaagagagggagaaggccaaggcccggggagatttccagaagctgcgggagaagcagcagctagaagaggatctcaaaggctacctggattggatcactcaggccgaagacatcgatcctgagaatgaggacgaaggcatggatgaggagaagccccgaaacatgagcatgcccaccagtgagaccgagtccgtcaacaccgaaaacgtggctggaggtgacatcgagggagaaaactgcggggccaggctggcccaccggatctccaagtcaaagttcagccgctactggcgccggtggaatcggttctgcagaaggaagtgccgcgccgcagtcaagtctaatgtcttctactggctggtgattttcctggtgttcctcaacacgctcaccattgcctctgagcactacaaccagcccaactggctcacagaagtccaagacacggcaaacaaggccctgctggccctgttcacggcagagatgctcctgaagatgtacagcctgggcctgcaggcctacttcgtgtccctcttcaaccgctttgactgcttcgtcgtgtgtggcggcatcctggagaccatcctggtggagaccaagatcatgtccccactgggcatctccgtgctcagatgcgtccggctgctgaggattttcaagatcacgaggtactggaactccttgagcaacctggtggcatccttgctgaactctgtgcgctccatcgcctccctgctccttctcctcttcctcttcatcatcatcttctccctcctggggatgcagctctttggaggaaagttcaactttgatgagatgcagacccggaggagcacattcgataacttcccccagtccctcctcactgtgtttcagatcctgaccggggaggactggaattcggtgatgtatgatgggatcatggcttatggcggcccctcttttccagggatgttagtctgtatttacttcatcatcctcttcatctgtggaaactatatcctactgaatgtgttcttggccattgctgtggacaacctggctgatgctgagagcctcacatctgcccaaaaggaggaggaagaggagaaggagagaaagaagctggccaggactgccagcccagagaagaaacaagagttggtggagaagccggcagtgggggaatccaaggaggagaagattgagctgaaatccatcacggctgacggagagtctccacccgccaccaagatcaacatggatgacctccagcccaatgaaaatgaggataagagcccctaccccaacccagaaactacaggagaagaggatgaggaggagccagagatgcctgtcggccctcgcccacgaccactctctgagcttcaccttaaggaaaaggcagtgcccatgccagaagccagcgcgtttttcatcttcagctctaacaacaggtttcgcctccagtgccaccgcattgtcaatgacacgatcttcaccaacctgatcctcttcttcattctgctcagcagcatttccctggctgctgaggacccggtccagcacacctccttcaggaaccatattctgttttattttgatattgtttttaccaccattttcaccattgaaattgctctgaagatgactgcttatggggctttcttgcacaagggttctttctgccggaactacttcaacatcctggacctgctggtggtcagcgtgtccctcatctcctttggcatccagtccagtgcaatcaatgtcgtgaagatcttgcgagtcctgcgagtactcaggcccctgagggccatcaacagggccaaggggctaaagcatgtggttcagtgtgtgtttgtcgccatccggaccatcgggaacatcgtgattgtcaccaccctgctgcagttcatgtttgcctgcatcggggtccagctcttcaagggaaagctgtacacctgttcagacagttccaagcagacagaggcggaatgcaagggcaactacatcacgtacaaagacggggaggttgaccaccccatcatccaaccccgcagctgggagaacagcaagtttgactttgacaatgttctggcagccatgatggccctcttcaccgtctccaccttcgaagggtggccagagctgctgtaccgctccatcgactcccacacggaagacaagggccccatctacaactaccgtgtggagatctccatcttcttcatcatctacatcatcatcatcgccttcttcatgatgaacatcttcgtgggcttcgtcatcgtcacctttcaggagcagggggagcaggagtacaagaactgtgagctggacaagaaccagcgacagtgcgtggaatacgccctcaaggcccggcccctgcggaggtacatccccaagaaccagcaccagtacaaagtgtggtacgtggtcaactccacctacttcgagtacctgatgttcgtcctcatcctgctcaacaccatctgcctggccatgcagcactacggccagagctgcctgttcaaaatcgccatgaacatcctcaacatgctcttcactggcctcttcaccgtggagatgatcctgaagctcattgccttcaaacccaagcactatttctgtgatgcatggaatacatttgacgccttgattgttgtgggtagcattgttgatatagcaatcaccgaggtaaacccagctgaacatacccaatgctctccctctatgaacgcagaggaaaactcccgcatctccatcaccttcttccgcctgttccgggtcatgcgtctggtgaagctgctgagccgtggggagggcatccggacgctgctgtggaccttcatcaagtccttccaggccctgccctatgtggccctcctgatcgtgatgctgttcttcatctacgcggtgatcgggatgcaggtgtttgggaaaattgccctgaatgataccacagagatcaaccggaacaacaactttcagaccttcccccaggccgtgctgctcctcttcaggtgtgccaccggggaggcctggcaggacatcatgctggcctgcatgccaggcaagaagtgtgccccagagtccgagcccagcaacagcacggagggtgaaacaccctgtggtagcagctttgctgtcttctacttcatcagcttctacatgctctgtgccttcctgatcatcaacctctttgtagctgtcatcatggacaactttgactacctgacaagggactggtccatccttggtccccaccacctggatgagtttaaaagaatctgggcagagtatgaccctgaagccaagggtcgtatcaaacacctggatgtggtgaccctcctccggcggattcagccgccactaggttttgggaagctgtgccctcaccgcgtggcttgcaaacgcctggtctccatgaacatgcctctgaacagcgacgggacagtcatgttcaatgccaccctgtttgccctggtcaggacggccctgaggatcaaaacagaagggaacctagaacaagccaatgaggagctgcgggcgatcatcaagaagatctggaagcggaccagcatgaagctgctggaccaggtggtgccccctgcaggtgatgatgaggtcaccgttggcaagttctacgccacgttcctgatccaggagtacttccggaagttcaagaagcgcaaagagcagggccttgtgggcaagccctcccagaggaacgcgctgtctctgcaggctggcttgcgcacactgcatgacatcgggcctgagatccgacgggccatctctggagatctcaccgctgaggaggagctggacaaggccatgaaggaggctgtgtccgctgcttctgaagatgacatcttcaggagggccggtggcctgttcggcaaccacgtcagctactaccaaagcgacggccggagcgccttcccccagaccttcaccactcagcgcccgctgcacatcaacaaggcgggcagcagccagggcgacactgagtcgccatcccacgagaagctggtggactccaccttcaccccgagcagctactcgtccaccggctccaacgccaacatcaacaacgccaacaacaccgccctgggtcgcctccctcgccccgccggctaccccagcacggtcagcactgtggagggccacgggccccccttgtcccctgccatccgggtgcaggaggtggcgtggaagctcagctccaacaggtgccactcccgggagagccaggcagccatggcgggtcaggaggagacgtctcaggatgagacctatgaagtgaagatgaaccatgacacggaggcctgcagtgagcccagcctgctctccacagagatgctctcctaccaggatgacgaaaatcggcaactgacgctcccagaggaggacaagagggacatccggcaatctccgaagaggggtttcctccgctctgcctcactaggtcgaagggcctccttccacctggaatgtctgaagcgacagaaggaccgagggggagacatctctcagaagacagtcctgcccttgcatctggttcatcatcaggcattggcagtggcaggcctgagccccctcctccagagaagccattcccctgcctcattccctaggccttttgccaccccaccagccacacctggcagccgaggctggcccccacagcccgtccccaccctgcggcttgagggggtcgagtccagtgagaaactcaacagcagcttcccatccatccactgcggctcctgggctgagaccacccccggtggcgggggcagcagcgccgcccggagagtccggcccgtctccctcatggtgcccagccaggctggggccccagggaggcagttccacggcagtgccagcagcctggtggaagcggtcttgatttcagaaggactggggcagtttgctcaagatcccaagttcatcgaggtcaccacccaggagctggccgacgcctgcgacatgaccatagaggagatggagagcgcggccgacaacatcctcagcgggggcgccccacagagccccaatggcgccctcttaccctttgtgaactgcagggacgcggggcaggaccgagccgggggcgaagaggacgcgggctgtgtgcgcgcgcggggtcgaccgagtgaggaggagctccaggacagcagggtctacgtcagcagcctgtagtgggcgctgccagatgcgggcttttttttatttgtttcaatgttcctaatgggttcgtttcagaagtgcctcactgttctcgtgacctggagttaaccggaacagcgtcttcattcatttctgttgggaccagacgcggagcctgggtgcgcgagccgccctccgggaggaaggcgcccggctgcgtctgcagaggcggggagaggaggcggcgagggtcccggggcgcgaggaaggcgcctgccctctcccagctcgcaggccccgggcccggccgcgcctccgcggggagagcaccccggcttcccgcgcgccctcaccaaaaggaccctacagcaaacgggtgtctttcgactctgcttgtagaaaccatttgcacatattctgtacgagcctcgctgtctccctagagccagggccctgcggatttggagaagggagcggggcaggacttccaggaggaccccaacccggcccggagagggaggaggaggcctccaggggcgcggagctctggggatgggcgtcgggccggcagtggtgcggctcactccgtccctgcccacctgcgacgggatcccccgaccggcacgggccacgccgagctcccggccagccgccggcccgcaggcagcgcgagggaggagctgcgccgccggctccgcccaaccaggtggtgctgagcttccgctgagcgctcttttgttttgtggtttgacacttttcttgacagcatgttgcagtttcttttcggttttggttttttttaaatgttttattttgctttcccagcgggaggggaggaagaagagtgtttacaaagtcctgtagccccctcacctttctgttttcacttttgccaatgtacatcgggtttggttttcttgtattatttaaacggttgtggtttcctttttccacggaggttcaatagaagccgctgcaggagagttttaccaaccattgtgtatgcccaataatttgttatcatttccttaggtagtaacctatttttgttctggtttggttcggttatctaatggaaaggtaactggcaatgcacttgatgtggtcttgcacatgtgggtgatagagttgggttcctttttatgctgggtgtacaggtgggtttgggagagaggagcatgcgcgagagagtctccgagtgtgtgcgacgcgtgtgtgtgtggtgggttgtctgtgtgcatatgtcctgcccgtgtatatgcacccacaccatgtgcccgtgcacaccagtgactacgcagtcccccctttctggtttagctgtgggaagatctgaatctggggccgtttgaaagcaaaaacaaaccactgtctctgcttctgaaacgggaatcagtaactctttgcattttctgtcccacaagatatgcaaaaacaatgcaataatattcatttaaaaatacaattgtgagttgtgttggcattaaaactgtattttaaaaaaagacagaaatttaagggaaaaacacaagaaggcattttgcttcaatatattccgtgtaatgttttattgcattgataatgtttctgttgaagaaaccgttatacttgaattcaggtcagtttcagtatttttcaaatatttttttaaaactgaattgcaattgtgccaagcgaatataatgaattgaattaagttggttttcggattcacttcttgtatattttgctgcatgtaaagtaaatcattttgtatttggagtgtgacaagcttta

SEQ ID NO: 14766 - DNA, 6417 bp, Artificial Sequence
  derived and/or modified sequence
atggtgaacgagaacaccagaatgtacatccccgaggagaaccaccagggcagcaactacggcagccccagacccgcccacgccaacatgaacgccaacgccgccgccggcctggcccccgagcacatccccacccccggcgccgccctgagctggcaggccgccatcgacgccgccagacaggccaagctgatgggcagcgccggcaacgccaccatcagcaccgtgagcagcacccagagaaagagacagcagtacggcaagcccaagaagcagggcagcaccaccgccaccagaccccccagagccctgctgtgcctgaccctgaagaaccccatcagaagagcctgcatcagcatcgtggagtggaagcccttcgagatcatcatcctgctgaccatcttcgccaactgcgtggccctggccatctacatccccttccccgaggacgacagcaacgccaccaacagcaacctggagagagtggagtacctgttcctgatcatcttcaccgtggaggccttcctgaaggtgatcgcctacggcctgctgttccaccccaacgcctacctgagaaacggctggaacctgctggacttcatcatcgtggtggtgggcctgttcagcgccatcctggagcaggccaccaaggccgacggcgccaacgccctgggcggcaagggcgccggcttcgacgtgaaggccctgagagccttcagagtgctgagacccctgagactggtgagcggcgtgcccagcctgcaggtggtgctgaacagcatcatcaaggccatggtgcccctgctgcacatcgccctgctggtgctgttcgtgatcatcatctacgccatcatcggcctggagctgttcatgggcaagatgcacaagacctgctacaaccaggagggcatcgccgacgtgcccgccgaggacgaccccagcccctgcgccctggagaccggccacggcagacagtgccagaacggcaccgtgtgcaagcccggctgggacggccccaagcacggcatcaccaacttcgacaacttcgccttcgccatgctgaccgtgttccagtgcatcaccatggagggctggaccgacgtgctgtactgggtgaacgacgccgtgggcagagactggccctggatctacttcgtgaccctgatcatcatcggcagcttcttcgtgctgaacctggtgctgggcgtgctgagcggcgagttcagcaaggagagagagaaggccaaggccagaggcgacttccagaagctgagagagaagcagcagctggaggaggacctgaagggctacctggactggatcacccaggccgaggacatcgaccccgagaacgaggacgagggcatggacgaggagaagcccagaaacatgagcatgcccaccagcgagaccgagagcgtgaacaccgagaacgtggccggcggcgacatcgagggcgagaactgcggcgccagactggcccacagaatcagcaagagcaagttcagcagatactggagaagatggaacagattctgcagaagaaagtgcagagccgccgtgaagagcaacgtgttctactggctggtgatcttcctggtgttcctgaacaccctgaccatcgccagcgagcactacaaccagcccaactggctgaccgaggtgcaggacaccgccaacaaggccctgctggccctgttcaccgccgagatgctgctgaagatgtacagcctgggcctgcaggcctacttcgtgagcctgttcaacagattcgactgcttcgtggtgtgcggcggcatcctggagaccatcctggtggagaccaagatcatgagccccctgggcatcagcgtgctgagatgcgtgagactgctgagaatcttcaagatcaccagatactggaacagcctgagcaacctggtggccagcctgctgaacagcgtgagaagcatcgccagcctgctgctgctgctgttcctgttcatcatcatcttcagcctgctgggcatgcagctgttcggcggcaagttcaacttcgacgagatgcagaccagaagaagcaccttcgacaacttcccccagagcctgctgaccgtgttccagatcctgaccggcgaggactggaacagcgtgatgtacgacggcatcatggcctacggcggccccagcttccccggcatgctggtgtgcatctacttcatcatcctgttcatctgcggcaactacatcctgctgaacgtgttcctggccatcgccgtggacaacctggccgacgccgagagcctgaccagcgcccagaaggaggaggaggaggagaaggagagaaagaagctggccagaaccgccagccccgagaagaagcaggagctggtggagaagcccgccgtgggcgagagcaaggaggagaagatcgagctgaagagcatcaccgccgacggcgagagcccccccgccaccaagatcaacatggacgacctgcagcccaacgagaacgaggacaagagcccctaccccaaccccgagaccaccggcgaggaggacgaggaggagcccgagatgcccgtgggccccagacccagacccctgagcgagctgcacctgaaggagaaggccgtgcccatgcccgaggccagcgccttcttcatcttcagcagcaacaacagattcagactgcagtgccacagaatcgtgaacgacaccatcttcaccaacctgatcctgttcttcatcctgctgagcagcatcagcctggccgccgaggaccccgtgcagcacaccagcttcagaaaccacatcctgttctacttcgacatcgtgttcaccaccatcttcaccatcgagatcgccctgaagatgaccgcctacggcgccttcctgcacaagggcagcttctgcagaaactacttcaacatcctggacctgctggtggtgagcgtgagcctgatcagcttcggcatccagagcagcgccatcaacgtggtgaagatcctgagagtgctgagagtgctgagacccctgagagccatcaacagagccaagggcctgaagcacgtggtgcagtgcgtgttcgtggccatcagaaccatcggcaacatcgtgatcgtgaccaccctgctgcagttcatgttcgcctgcatcggcgtgcagctgttcaagggcaagctgtacacctgcagcgacagcagcaagcagaccgaggccgagtgcaagggcaactacatcacctacaaggacggcgaggtggaccaccccatcatccagcccagaagctgggagaacagcaagttcgacttcgacaacgtgctggccgccatgatggccctgttcaccgtgagcaccttcgagggctggcccgagctgctgtacagaagcatcgacagccacaccgaggacaagggccccatctacaactacagagtggagatcagcatcttcttcatcatctacatcatcatcatcgccttcttcatgatgaacatcttcgtgggcttcgtgatcgtgaccttccaggagcagggcgagcaggagtacaagaactgcgagctggacaagaaccagagacagtgcgtggagtacgccctgaaggccagacccctgagaagatacatccccaagaaccagcaccagtacaaggtgtggtacgtggtgaacagcacctacttcgagtacctgatgttcgtgctgatcctgctgaacaccatctgcctggccatgcagcactacggccagagctgcctgttcaagatcgccatgaacatcctgaacatgctgttcaccggcctgttcaccgtggagatgatcctgaagctgatcgccttcaagcccaagcactacttctgcgacgcctggaacaccttcgacgccctgatcgtggtgggcagcatcgtggacatcgccatcaccgaggtgaaccccgccgagcacacccagtgcagccccagcatgaacgccgaggagaacagcagaatcagcatcaccttcttcagactgttcagagtgatgagactggtgaagctgctgagcagaggcgagggcatcagaaccctgctgtggaccttcatcaagagcttccaggccctgccctacgtggccctgctgatcgtgatgctgttcttcatctacgccgtgatcggcatgcaggtgttcggcaagatcgccctgaacgacaccaccgagatcaacagaaacaacaacttccagaccttcccccaggccgtgctgctgctgttcagatgcgccaccggcgaggcctggcaggacatcatgctggcctgcatgcccggcaagaagtgcgcccccgagagcgagcccagcaacagcaccgagggcgagaccccctgcggcagcagcttcgccgtgttctacttcatcagcttctacatgctgtgcgccttcctgatcatcaacctgttcgtggccgtgatcatggacaacttcgactacctgaccagagactggagcatcctgggcccccaccacctggacgagttcaagagaatctgggccgagtacgaccccgaggccaagggcagaatcaagcacctggacgtggtgaccctgctgagaagaatccagccccccctgggcttcggcaagctgtgcccccacagagtggcctgcaagagactggtgagcatgaacatgcccctgaacagcgacggcaccgtgatgttcaacgccaccctgttcgccctggtgagaaccgccctgagaatcaagaccgagggcaacctggagcaggccaacgaggagctgagagccatcatcaagaagatctggaagagaaccagcatgaagctgctggaccaggtggtgccccccgccggcgacgacgaggtgaccgtgggcaagttctacgccaccttcctgatccaggagtacttcagaaagttcaagaagagaaaggagcagggcctggtgggcaagcccagccagagaaacgccctgagcctgcaggccggcctgagaaccctgcacgacatcggccccgagatcagaagagccatcagcggcgacctgaccgccgaggaggagctggacaaggccatgaaggaggccgtgagcgccgccagcgaggacgacatcttcagaagagccggcggcctgttcggcaaccacgtgagctactaccagagcgacggcagaagcgccttcccccagaccttcaccacccagagacccctgcacatcaacaaggccggcagcagccagggcgacaccgagagccccagccacgagaagctggtggacagcaccttcacccccagcagctacagcagcaccggcagcaacgccaacatcaacaacgccaacaacaccgccctgggcagactgcccagacccgccggctaccccagcaccgtgagcaccgtggagggccacggcccccccctgagccccgccatcagagtgcaggaggtggcctggaagctgagcagcaacagatgccacagcagagagagccaggccgccatggccggccaggaggagaccagccaggacgagacctacgaggtgaagatgaaccacgacaccgaggcctgcagcgagcccagcctgctgagcaccgagatgctgagctaccaggacgacgagaacagacagctgaccctgcccgaggaggacaagagagacatcagacagagccccaagagaggcttcctgagaagcgccagcctgggcagaagagccagcttccacctggagtgcctgaagagacagaaggacagaggcggcgacatcagccagaagaccgtgctgcccctgcacctggtgcaccaccaggccctggccgtggccggcctgagccccctgctgcagagaagccacagccccgccagcttccccagacccttcgccaccccccccgccacccccggcagcagaggctggcccccccagcccgtgcccaccctgagactggagggcgtggagagcagcgagaagctgaacagcagcttccccagcatccactgcggcagctgggccgagaccacccccggcggcggcggcagcagcgccgccagaagagtgagacccgtgagcctgatggtgcccagccaggccggcgcccccggcagacagttccacggcagcgccagcagcctggtggaggccgtgctgatcagcgagggcctgggccagttcgcccaggaccccaagttcatcgaggtgaccacccaggagctggccgacgcctgcgacatgaccatcgaggagatggagagcgccgccgacaacatcctgagcggcggcgccccccagagccccaacggcgccctgctgcccttcgtgaactgcagagacgccggccaggacagagccggcggcgaggaggacgccggctgcgtgagagccagaggcagacccagcgaggaggagctgcaggacagcagagtgtacgtgagcagcctgtag

SEQ ID NO: 14767 - protein, 2181 aa, Artificial Sequence
  derived and/or modified sequence
MMMMMMMKKMQHQRQQQADHANEANYARGTRLPLSGEGPTSQPNSSKQTVLSWQAAIDAARQAKAAQTMSTSAPPPVGSLSQRKRQQYAKSKKQGNSSNSRPARALFCLSLNNPIRRACISIVEWKPFDIFILLAIFANCVALAIYIPFPEDDSNSTNHNLEKVEYAFLIIFTVETFLKIIAYGLLLHPNAYVRNGWNLLDFVIVIVGLFSVILEQLTKETEGGNHSSGKSGGFDVKALRAFRVLRPLRLVSGVPSLQVVLNSIIKAMVPLLHIALLVLFVIIIYAIIGLELFIGKMHKTCFFADSDIVAEEDPAPCAFSGNGRQCTANGTECRSGWVGPNGGITNFDNFAFAMLTVFQCITMEGWTDVLYWVNDAIGWEWPWVYFVSLIILGSFFVLNLVLGVLSGEFSKEREKAKARGDFQKLREKQQLEEDLKGYLDWITQAEDIDPENEEEGGEEGKRNTSMPTSETESVNTENVSGEGENRGCCGSLWCWWRRRGAAKAGPSGCRRWGQAISKSKLSRRWRRWNRFNRRRCRAAVKSVTFYWLVIVLVFLNTLTISSEHYNQPDWLTQIQDIANKVLLALFTCEMLVKMYSLGLQAYFVSLFNRFDCFVVCGGITETILVELEIMSPLGISVFRCVRLLRIFKVTRHWTSLSNLVASLLNSMKSIASLLLLLFLFIIIFSLLGMQLFGGKFNFDETQTKRSTFDNFPQALLTVFQILTGEDWNAVMYDGIMAYGGPSSSGMIVCIYFIILFICGNYILLNVFLAIAVDNLADAESLNTAQKEEAEEKERKKIARKESLENKKNNKPEVNQIANSDNKVTIDDYREEDEDKDPYPPCDVPVGEEEEEEEEDEPEVPAGPRPRRISELNMKEKIAPIPEGSAFFILSKTNPIRVGCHKLINHHIFTNLILVFIMLSSAALAAEDPIRSHSFRNTILGYFDYAFTAIFTVEILLKMTTFGAFLHKGAFCRNYFNLLDMLVVGVSLVSFGIQSSAISVVKILRVLRVLRPLRAINRAKGLKHVVQCVFVAIRTIGNIMIVTTLLQFMFACIGVQLFKGKFYRCTDEAKSNPEECRGLFILYKDGDVDSPVVRERIWQNSDFNFDNVLSAMMALFTVSTFEGWPALLYKAIDSNGENIGPIYNHRVEISIFFIIYIIIVAFFMMNIFVGFVIVTFQEQGEKEYKNCELDKNQRQCVEYALKARPLRRYIPKNPYQYKFWYVVNSSPFEYMMFVLIMLNTLCLAMQHYEQSKMFNDAMDILNMVFTGVFTVEMVLKVIAFKPKGYFSDAWNTFDSLIVIGSIIDVALSEADPTESENVPVPTATPGNSEESNRISITFFRLFRVMRLVKLLSRGEGIRTLLWTFIKSFQALPYVALLIAMLFFIYAVIGMQMFGKVAMRDNNQINRNNNFQTFPQAVLLLFRCATGEAWQEIMLACLPGKLCDPESDYNPGEEYTCGSNFAIVYFISFYMLCAFLIINLFVAVIMDNFDYLTRDWSILGPHHLDEFKRIWSEYDPEAKGRIKHLDVVTLLRRIQPPLGFGKLCPHRVACKRLVAMNMPLNSDGTVMFNATLFALVRTALKIKTEGNLEQANEELRAVIKKIWKKTSMKLLDQVVPPAGDDEVTVGKFYATFLIQDYFRKFKKRKEQGLVGKYPAKNTTIALQAGLRTLHDIGPEIRRAISCDLQDDEPEETKREEEDDVFKRNGALLGNHVNHVNSDRRDSLQQTNTTHRPLHVQRPSIPPASDTEKPLFPPAGNSVCHNHHNHNSIGKQVPTSTNANLNNANMSKAAHGKRPSIGNLEHVSENGHHSSHKHDREPQRRSSVKRTRYYETYIRSDSGDEQLPTICREDPEIHGYFRDPHCLGEQEYFSSEECYEDDSSPTWSRQNYGYYSRYPGRNIDSERPRGYHHPQGFLEDDDSPVCYDSRRSPRRRLLPPTPASHRRSSFNFECLRRQSSQEEVPSSPIFPHRTALPLHLMQQQIMAVAGLDSSKAQKYSPSHSTRSWATPPATPPYRDWTPCYTPLIQVEQSEALDQVNGSLPSLHRSSWYTDEPDISYRTFTPASLTVPSSFRNKNSDKQRSADSLVEAVLISEGLGRYARDPKFVSATKHEIADACDLTIDEMESAASTLLNGNVRPRANGDVGPLSHRQDYELQDFGPGYSDEEPDPGRDEEDLADEMICITTL

SEQ ID NO: 14768 - DNA, 6546 bp, Artificial Sequence
  derived and/or modified sequence
atgatgatgatgatgatgatgaagaaaatgcaacaccaacgacagcagcaggcagaccacgccaacgaggccaattacgctaggggaactcggctccccttatcgggtgaaggtcctacctctcagccaaattccagcaagcagactgtgctctcctggcaagctgccattgacgcggctcgacaggctaaggcagctcagactatgtctacctctgctccaccacctgttggttccctctctcagaggaaaagacagcagtatgctaaaagcaaaaagcagggcaatagttcaaattccaggccagccagagctcttttttgtctttctctgaataatcccattcgcagagcctgcatatccatcgtggaatggaagccctttgacatattcattctgctagcaatctttgccaattgcgtcgctctcgctatctatatccctttcccagaggacgactccaactccaccaaccacaatctggaaaaggtcgaatatgcctttctcataatttttactgttgaaactttcttgaagattatagcctacggactattactgcaccctaacgcctacgtgaggaatggatggaacctgctcgattttgtgatagttatcgtgggattgttttccgtgatcctggagcaattgaccaaggagaccgaagggggtaatcacagcagtgggaagtcaggggggtttgatgtaaaggccctaagagcatttcgcgtcttgaggcccctgcggttagtgagcggggtgccctcactgcaagtcgtgcttaatagtataattaaagccatggtcccacttctgcacatagcccttcttgtgctcttcgtgataattatctatgcaatcatagggctggagttattcattggcaagatgcacaagacttgcttctttgctgactcagacattgtcgcagaggaagatccagccccctgcgcctttagtggcaatggcaggcagtgtacagccaatggtaccgaatgccgaagcgggtgggtggggccaaacggcgggattacaaacttcgacaattttgcctttgccatgctgactgtttttcagtgtatcaccatggagggatggactgatgtgctttactgggttaatgacgctatcgggtgggagtggccgtgggtgtactttgtcagccttattatcctcggaagcttttttgttcttaatttagtgctgggagtgctgtctggcgagttcagcaaggagcgcgaaaaagcgaaagccaggggggattttcagaagttgcgggaaaagcagcagctggaggaagacctcaaaggctatttagactggatcacacaagctgaggacattgatccagaaaacgaggaagagggtggcgaggaggggaaaaggaacaccagtatgcccacatctgagacggaaagtgtcaacacggagaatgtatccggtgagggtgagaaccgcgggtgttgtggatccctctggtgttggtggaggaggcgtggagccgcaaaggccggcccaagtggttgccgccgatggggccaagccatcagcaaatctaaacttagtcggcggtggcggaggtggaatcgctttaatagacgtagatgtcgggcagctgtcaagtctgttaccttctattggctcgtgatcgtgttggttttcctcaacactttgacaatttcctcagaacattataaccagcccgactggctgacacaaatccaggacatcgcaaataaagtactgctcgcgctgttcacatgtgagatgctggtcaaaatgtattcactggggctgcaagcatatttcgtgtccttgttcaaccggttcgattgcttcgtggtgtgcggcgggataacagagactatcttagtagagctcgaaattatgagcccactgggtatctccgtgtttcgatgcgtgaggctcctgagaatctttaaggtaacaagacattggacgtcactgtccaacctcgtggcctctctgctgaattccatgaaaagcatagcatctttactgttgctactgttcctgttcattatcatcttcagcttgctaggtatgcaactctttggcggcaaatttaattttgacgaaacacagacgaagcgatccaccttcgacaacttcccgcaagctctgctcaccgtattccaaattctaaccggcgaggattggaacgcagtgatgtacgatggaattatggcctatggaggcccctcgagctctggcatgattgtgtgtatctacttcatcattctgtttatttgtgggaactacatactgctgaatgtattcctggctattgccgtcgataacctggcggacgcggaatctctcaataccgctcagaaggaagaagccgaggagaaggagaggaagaaaattgccagaaaggaatcgctcgagaataagaagaacaataaacccgaggtaaaccagattgccaactctgacaataaagtgaccattgacgattacagagaagaggatgaagacaaggatccttatcccccttgcgacgtacccgtcggcgaagaggaagaggaagaagaggaagacgagcccgaagtgcccgccgggccccgtcctcggagaatttctgagctcaacatgaaggagaagattgctccaatacccgagggatctgccttcttcatcctgagcaaaacaaaccctattagagtcgggtgtcataaactcatcaaccatcatatttttacgaatctcatcctcgtgtttattatgcttagttctgctgctctggccgctgaggatccgatccgaagccacagtttcaggaacaccattttggggtactttgactacgcttttaccgccatctttacagtcgagattctgcttaaaatgactacctttggggccttcctgcacaagggagcattttgtcgtaactacttcaacctgttggatatgctggttgtgggtgttagtctagtatctttcggcattcagagtagcgccattagtgtggtgaagattcttagggtactgcgcgtcctacggcccctgagagctataaatagggccaagggcttgaaacatgtggtacaatgtgtttttgtcgcaattaggaccatcggtaacattatgatcgtgactacactcctacagttcatgttcgcttgcattggagtgcagttgtttaaaggcaaattctataggtgtacggatgaagccaagagcaacccagaggagtgccgcggcctgttcattctttataaagatggggacgtggactcccccgttgttcgggaaaggatctggcaaaactcagacttcaatttcgacaatgtgctcagcgccatgatggcactgttcaccgtgtctacatttgaaggttggccggcgctgctctataaggccattgactctaatggtgagaacatcgggcccatctacaaccaccgcgtggaaatctcaattttctttattatctatatcatcatcgtagctttcttcatgatgaatatctttgttggtttcgtgatcgtcacctttcaggagcagggtgagaaggagtataagaattgcgagctggacaagaatcagcggcagtgtgtggagtacgctctgaaagctcgccctctgaggcggtatattcccaaaaacccatatcagtacaagttttggtacgtggtgaattcatctccctttgagtatatgatgtttgtgctcatcatgctgaacacgttgtgcttagcaatgcagcactacgaacaatccaaaatgttcaacgatgcaatggatatcttaaatatggtctttaccggggtgttcacagttgagatggtgcttaaggtcattgcctttaaaccaaaaggatattttagtgacgcttggaacactttcgattcactgatcgttatcggatcaatcatcgatgtggcattaagtgaagcagatcccactgaatcggagaatgtgccggtgccaaccgcaacaccaggaaacagtgaggagtccaatagaatctcaattacattcttcagattgttccgtgtcatgagacttgtgaagctgctgagccggggagaaggcatccgaactctcctctggacatttattaagagctttcaggccctcccctatgtcgctctgctgatagcaatgctgttcttcatttatgctgtgatcggtatgcagatgttcggcaaggtggctatgcgcgacaacaatcagatcaaccggaacaataattttcagacatttcctcaggccgtcttgctgcttttcagatgcgcgaccggagaggcctggcaggagattatgctggcgtgccttccagggaaactgtgtgacccagaatccgactataaccccggcgaagagtatacctgcggtagcaacttcgcaattgtgtacttcataagcttctacatgctctgcgccttcctgataatcaacctttttgtcgcggtgattatggataacttcgactacctgacacgcgactggagtatcctgggtcctcatcatctggacgaatttaagagaatatggtccgagtacgaccccgaggccaagggacgaattaagcatctggatgtggtgactttgctgcgccgaattcagccccccttggggtttgggaaactgtgccctcaccgagtcgcctgtaaaaggctcgtggcgatgaatatgcctctaaattccgatgggacagtcatgtttaatgcaacactttttgcacttgtacgcactgctctcaagattaagacagagggcaatttagaacaggccaacgaagaactgagggctgtgattaagaaaatatggaaaaaaaccagcatgaaactcctcgaccaagtggttcctccagctggtgacgatgaagtgacagtgggtaagttttatgccaccttcctgatccaggactactttcggaagtttaagaagcggaaagagcagggattggtcggaaaatacccggccaagaataccacaattgccctgcaggctggcctgaggaccctgcatgacatcggcccggagatacgccgagctatcagttgtgatctccaggacgacgaacccgaagagacgaagcgtgaggaagaagatgatgtctttaagaggaacggggccttgctcggtaatcacgtaaaccacgtgaacagtgatagaagagatagtctgcagcagacgaacacaacccacagacccctgcatgtccagaggccaagtatccctcctgcatcagacactgaaaagccactttttccccctgccggcaacagcgtgtgccacaatcaccacaaccataacagtatcggtaaacaggtgcctaccagtacaaatgccaacctcaataacgctaacatgtctaaggccgctcatgggaagcggccaagtatcggaaatttggagcacgtatctgaaaacggacaccacagttcacacaaacacgacagggaaccccaacggagatcttctgtgaagagaactcgctactacgagacctatattcgtagtgactcaggagacgagcagctgccaacaatctgccgggaggacccagagattcacgggtattttcgagatccacactgcctcggggaacaggagtatttttcaagtgaagaatgttatgaagacgattcctcaccaacgtggtcaagacaaaactacgggtactactccagatacccaggcaggaacatcgactctgagcgacctcgcgggtaccaccatccgcaggggttcctggaagacgatgatagccccgtgtgctatgacagtagacggagcccccggcgcagactgctgcccccaactcctgctagccaccgtcggtcatccttcaatttcgagtgcctgcgcaggcaatctagccaggaggaagttccttcgagccctatcttccctcaccgaactgcattacctttacacttaatgcagcaacagatcatggcagttgccggcctggattcatcaaaggctcagaagtacagcccttcacacagtactcggagctgggctacacctccagccacacctccttaccgggattggacaccgtgctacactcctctcatccaggtggagcagtccgaggccctcgaccaggtcaacgggagcttaccaagcctgcatcgatcatcctggtatactgacgagccagacatctcctaccgcacctttacccccgccagtctgactgtacctagctccttccggaataaaaatagcgacaaacagaggtccgcagattccctggtggaagctgttctgatctctgaagggcttggacgctatgcccgcgatcctaaattcgtttccgctaccaaacacgagatcgctgatgcctgcgatctgactattgacgagatggagagcgctgcttctactctgctaaatggaaacgtgcggccccgtgcgaatggcgacgtgggccccctgagccatcgccaagattacgagcttcaggatttcggaccaggctactccgacgaggagccagatccagggcgtgacgaggaagacctggctgatgagatgatatgcatcacaacactgtag

SEQ ID NO: 14769 - DNA, 6546 bp, Artificial Sequence
  derived and/or modified sequence
atgatgatgatgatgatgatgaagaagatgcagcaccagaggcagcagcaggccgaccacgccaatgaggccaactatgcccggggcacccggctgcccctgtctggagagggccccaccagccagcccaacagcagcaagcagacagtgctgtcctggcaggccgccattgatgctgcccggcaggccaaggccgcccagaccatgagcaccagcgcccctcctcctgtgggcagcctgagccagaggaagaggcagcagtatgccaagagcaagaagcagggcaacagcagcaacagcaggcctgcccgggccctcttctgcctgagcctgaacaaccccatccggcgggcctgcatcagcatcgtggagtggaagccctttgacatcttcatcctgctggccatctttgccaactgtgtggccctggccatctacatccccttcccagaagatgacagcaacagcaccaaccacaacctggagaaggtggagtatgccttcctgatcatcttcaccgtggagaccttcctgaagatcatcgcctacggcctgctgctgcaccccaatgcctacgtgagaaatggctggaacctgctggactttgtgattgtcatcgtgggcctcttcagcgtcatcctggagcagctgaccaaggagacagaaggaggcaaccacagcagcggcaagagcggcggctttgatgtgaaggccctgcgggccttccgggtgctgcggcccctgcggctggtgtctggagtgcccagcctgcaggtggtgctgaacagcatcatcaaggccatggtgcccctgctgcacatcgccctgctggtgctcttcgtcatcatcatctatgccatcatcggcctggagctgttcatcggcaagatgcacaagacctgcttctttgctgacagcgacatcgtggccgaggaggaccctgccccctgtgccttctctggaaatggccggcagtgcacagccaatggaacagagtgccgcagcggctgggtgggccccaatggaggcatcaccaactttgacaactttgcctttgccatgctgaccgtcttccagtgcatcaccatggagggctggacagatgtgctgtactgggtgaatgatgccatcggctgggagtggccctgggtgtactttgtgtccctcatcatcctgggcagcttctttgtgctgaacctggtgctgggcgtgctgagcggggagttcagcaaggagcgggagaaggccaaggcccggggggacttccagaagctgcgggagaagcagcagctggaggaggacctgaagggctacctggactggatcacccaggccgaggacatcgaccctgaaaatgaggaggagggcggggaggagggcaagaggaacacctccatgcccaccagcgagacagaatctgtgaacacagaaaatgtgtctggagagggggagaacagaggctgctgcggcagcctgtggtgctggtggaggagaagaggagctgccaaggccggccccagcggctgccgccgctggggccaggccatcagcaagagcaagctgagccgccgctggaggcgctggaaccgcttcaacagaagacgctgcagagctgctgtgaagtctgtgaccttctactggctggtgattgtgctggtgttcctgaacaccctgaccatcagcagcgagcactacaaccagcctgactggctgacccagatccaggacatcgccaacaaggtgctgctggccctcttcacctgtgagatgctggtgaagatgtacagcctgggcctgcaggcctactttgtgtccctcttcaacagatttgactgctttgtggtgtgtggcggcatcacagagaccatcctggtggagctggagatcatgagccccctgggcatcagcgtcttccgctgtgtgcggctgctgcgcatcttcaaggtgaccaggcactggaccagcctgagcaacctggtggccagcctgctgaacagcatgaagagcatcgccagcctgctgctgctgctcttcctgttcatcatcatcttcagcctgctgggcatgcagctgtttggaggcaagttcaactttgatgagacccagaccaagaggagcacctttgacaacttcccccaggccctgctgactgtgttccagatcctgactggagaggactggaatgctgtgatgtatgatggcatcatggcctacggcggccccagcagcagcggcatgattgtgtgcatctacttcatcatcctcttcatctgtggcaactacatcctgctgaatgtgttcctggccatcgctgtggacaacctggctgatgctgagagcctgaacacagcccagaaggaggaggccgaggagaaggagaggaagaagatcgccaggaaggagagcctggagaacaagaagaacaacaagccagaggtgaaccagatcgccaacagcgacaacaaggtgaccattgatgactaccgggaggaggatgaggacaaggacccctacccaccctgtgatgtgcctgtgggggaggaggaggaggaggaggaggaggatgagcctgaggtgcctgctggcccccggccccggcgcatcagcgagctgaacatgaaggagaagatcgcccccatccctgagggcagcgccttcttcatcctgagcaagaccaaccccatccgggtgggctgccacaagctgatcaaccaccacatcttcaccaacctgatcctggtgttcatcatgctgagcagcgctgccctggccgctgaggaccccatccgcagccacagcttcaggaacaccatcctgggctactttgattatgccttcaccgccatcttcaccgtggagatcctgctgaagatgaccacctttggagccttcctgcacaagggggccttctgcaggaactacttcaacctgctggacatgctggtggtgggcgtgtccctggtgtcctttggcatccagagcagcgccatctctgtggtgaagatcctgcgggtgctgcgggtgctgcggcccctgcgggccatcaacagagccaagggcctgaagcacgtggtgcagtgtgtgtttgtggccatccgcaccatcggcaacatcatgattgtgaccaccctgctgcagttcatgtttgcctgcatcggcgtgcagctgttcaagggcaagttctaccgctgcacagatgaggccaagagcaaccctgaggagtgccggggcctcttcatcctgtacaaggatggagatgtggacagccctgtggtgcgggagcgcatctggcagaacagcgacttcaactttgacaacgtgctgagcgccatgatggccctcttcaccgtgtccacctttgagggctggccagccctgctgtacaaggccatcgacagcaatggagagaacatcggccccatctacaaccaccgggtggagatcagcatcttcttcatcatctacatcatcatcgtggccttcttcatgatgaacatctttgtgggcttcgtcatcgtgaccttccaggagcagggcgagaaggagtacaagaactgtgagctggacaagaaccagaggcagtgtgtggagtatgccctgaaggcccggcccctgcggcgctacatccccaagaacccctaccagtacaagttctggtacgtggtgaacagcagcccctttgagtacatgatgtttgtgctgatcatgctgaacaccctgtgcctggccatgcagcactatgagcagagcaagatgtttaatgatgccatggacatcctgaacatggtgttcaccggggtcttcaccgtggagatggtgctgaaggtgattgccttcaagcccaagggctacttcagtgatgcctggaacacctttgacagcctcatcgtcatcggcagcatcattgatgtggccctgtctgaggccgaccccacagaaagtgaaaatgtgcctgtgcccacagccaccccaggcaacagcgaggagagcaaccgcatcagcatcaccttcttccgcctcttccgggtgatgaggctggtgaagctgctgagcagaggagagggcatccgcaccctgctgtggaccttcatcaagagcttccaggccctgccctacgtggccctgctgattgccatgctgttcttcatctatgctgtgattggcatgcagatgtttgggaaggtggccatgagggacaacaaccagatcaacagaaacaacaacttccagaccttcccccaggccgtgctgctgctcttccgctgtgccaccggggaggcctggcaggagatcatgctggcctgcctgcccgggaagctgtgtgaccctgagagtgactacaaccctggagaggagtacacctgtggcagcaactttgccatcgtgtacttcatctccttctacatgctgtgtgccttcctgatcatcaacctgtttgtggccgtcatcatggacaactttgactacctgacccgggactggagcatcctgggcccccaccacctggatgagttcaagaggatctggagcgaatatgaccctgaggccaagggccgcatcaagcacctggatgtggtgaccctgctgcggcgcatccagccccccctgggctttgggaagctgtgcccccaccgggtggcctgcaagaggctggtggccatgaacatgcccctgaacagtgatggcaccgtgatgtttaatgccaccctgtttgccctggtgaggacagccctgaagatcaagacagagggcaacctggagcaggccaatgaggagctgcgggctgtgatcaagaagatctggaagaagacctccatgaagctgctggaccaggtggtgcccccagctggagatgatgaggtgacagtgggcaagttctacgccaccttcctgatccaggactacttcaggaagttcaagaagaggaaggagcagggcctggtgggcaagtacccagccaagaacaccaccatcgccctgcaggccggcctgcggaccctgcatgacatcggccctgagatcagaagagccatcagctgtgacctgcaggatgatgagcctgaggagaccaagcgggaggaggaggatgatgtgttcaagagaaatggagccctgctgggcaaccacgtgaaccacgtgaacagcgacagaagagacagcctgcagcagaccaacaccacccaccggcccctgcacgtgcagaggcccagcatccccccagccagtgacacagagaagcccctcttccccccagctggcaacagcgtgtgccacaaccaccacaaccacaacagcatcggcaagcaggtgcccaccagcaccaatgccaacctgaacaatgccaacatgagcaaggccgcccacggcaagaggcccagcatcggcaacctggagcacgtgtctgaaaatggccaccacagcagccacaagcatgaccgggagccccagaggaggagctctgtgaagaggacccgctactatgagacctacatccgcagtgacagcggagatgagcagctgcccaccatctgccgggaggaccctgagatccacggctacttccgggacccccactgcctgggggagcaggagtacttcagcagcgaggagtgctatgaagatgacagcagccccacctggagccggcagaactacggctactacagccgctacccaggcaggaacatcgacagcgagcggccccggggctaccaccacccccagggcttcctggaggatgatgacagccctgtgtgctatgacagcagaagaagcccccggcggcggctgctgccccccaccccagccagccacagaagaagcagcttcaactttgagtgcctgcggcggcagagcagccaggaggaggtgcccagcagccccatcttcccccacaggacagccctgcccctgcacctgatgcagcagcagatcatggctgtggccggcctggacagcagcaaggcccagaagtacagccccagccacagcaccaggtcctgggccaccccaccagccaccccaccctacagagactggaccccctgctacacccccctcatccaggtggagcagagcgaggccctggaccaggtgaatggcagcctgcccagcctgcacaggagctcctggtacacagatgagccagacatctcctaccgcaccttcaccccagccagcctgactgtgcccagcagcttcaggaacaagaacagcgacaagcagaggtctgctgacagcctggtggaggccgtgctgatcagcgagggcctgggccgctatgcccgggaccccaagtttgtgtctgccaccaagcatgaaattgctgatgcctgtgacctgaccattgatgagatggagagcgctgccagcaccctgctgaatggaaatgtgcggccccgggccaatggagatgtgggccccctgagccaccggcaggactatgagctgcaggactttggacctggctacagtgatgaggagccagaccccggcagagatgaggaggacctggctgatgagatgatctgcatcaccaccctgtag

SEQ ID NO: 14770 - DNA, 6546 bp, Artificial Sequence
  derived and/or modified sequence
atgatgatgatgatgatgatgaagaagatgcagcaccagcggcagcaacaggctgaccacgcgaatgaagcaaactacgctcgaggaaccagattgcctctgagcggcgagggccccacgagtcaacctaacagttcaaagcagacagtcctgtcatggcaagcagctattgatgccgcccggcaggctaaagcagctcagaccatgagtacatctgccccacctccggtcggatcgttaagtcaacgcaagagacagcagtacgccaagagcaagaagcagggtaattcctccaactcccgcccagccagagcgttattttgtttatcactcaacaatcctatacgtagagcttgcatttccatcgtggaatggaagccttttgacatctttatcctgctggccattttcgccaattgcgtggctctggccatctatatcccatttcccgaggatgactcaaatagtacaaatcataaccttgagaaggtcgaatacgctttcctgatcatctttacagtagaaaccttcctgaagatcatcgcttacgggcttttacttcacccgaacgcctatgtgcgtaatgggtggaacctgttggatttcgtcatcgtgatagtgggcttgttttctgtgattttggaacaactaactaaagaaacggagggcggtaatcattcatcgggaaagtccggcggattcgacgtaaaggccctgcgtgccttccgcgtgcttaggccattacggctggtttcaggagttccatcgctgcaggtagtcctcaactcaataataaaagccatggtgcctctgcttcatattgcactattggttctgtttgtgattataatttacgctatcatcggcctagagcttttcattggaaaaatgcataagacatgtttctttgctgacagcgatatcgtcgcagaagaagatcctgcgccctgtgctttcagcggcaacggccgtcagtgcacggccaacgggacagagtgccggtccggatgggtaggtcccaacggggggatcacaaactttgataactttgcgtttgcgatgctgacagtattccaatgtatcactatggaggggtggacagatgtcttgtattgggtaaacgatgcaattggctgggaatggccatgggtctactttgtttctctgatcatactgggctccttcttcgtcctgaaccttgtgctgggagtgttatcaggagaatttagcaaggagagagagaaggccaaagcacggggagattttcaaaagctcagagagaaacagcagctggaagaggacttaaaagggtacctggactggatcacccaggccgaggatatcgaccctgaaaacgaagaagaagggggcgaggagggaaagcgtaatacaagtatgcctacttccgagaccgaatcggttaacacggaaaacgtgtccggtgagggcgagaatcggggctgctgcggttccctctggtgttggtggcgtcgacggggagccgcaaaggcaggaccgagtgggtgccgccgatggggacaggccatcagcaaatccaagctgtcaaggagatggcggcgatggaaccgattcaataggcgtcggtgtagagctgcagtgaaatctgtgaccttctactggcttgtcatcgtgctcgtatttctgaacactctgacaatcagcagcgaacattacaatcagcccgactggctgacccagattcaggatattgctaacaaggtccttctggccctgtttacctgcgagatgctggtcaagatgtattcacttggtcttcaagcttacttcgtgtccctgtttaatcggttcgactgcttcgtggtctgcggtggaatcactgaaacaattttggtggagctagagattatgtccccacttgggatcagcgtgtttcgctgtgttagactgctgaggatctttaaggtcactcgccactggacctctttgtcaaacttggtggcttccctcctcaattctatgaagtctatagccagtcttctgttactgctctttcttttcattattattttttccctgctcggcatgcagctcttcggtgggaagttcaatttcgatgagactcagacaaaacgaagcacgttcgacaacttcccccaggctctgctgaccgtgttccaaatcctgacgggggaagattggaatgctgtgatgtacgacggaatcatggcttacggcggtcccagttcatctgggatgatcgtctgtatctacttcatcatcttatttatctgcggaaactacattctcctcaacgtattccttgctatcgctgtcgacaacttggcagacgcagaaagcctcaacaccgcacagaaggaagaggccgaagaaaaagaacgcaagaaaatcgctcgcaaggagtcgctggagaacaagaagaataacaagcctgaggtgaatcagattgcaaactccgacaacaaagtcaccattgatgattaccgggaggaagacgaggataaagacccctatccaccgtgcgatgtgccagtgggagaagaggaagaagaagaagaggaagatgagccagaggtgcccgccggccctaggccaagaagaatatccgaactcaatatgaaggaaaagatagcccctatccccgagggcagcgcctttttcatcctctcaaagacgaatccaatcagagtggggtgtcataaactaattaatcaccacatttttacaaatctgattcttgtatttattatgctaagctcggctgcacttgccgcggaagacccaatccggagtcattcttttcgcaatacaattttgggatactttgattacgcattcactgctatcttcacggtcgagatcctgttaaaaatgaccacctttggggcttttctgcacaagggcgccttctgccgcaactatttcaaccttctcgacatgcttgtcgtcggcgtgtctctcgttagttttgggattcaatctagcgctatttctgtggtgaaaattctgagagtacttagggtcctcagaccactacgagctatcaatagggctaaagggcttaaacacgtggtccagtgcgtttttgtggcgatccgcaccattgggaatattatgatcgttaccacactgcttcagtttatgttcgcatgcatcggcgtgcagttgttcaaaggcaagttctaccggtgcacagatgaagccaagtctaaccctgaggagtgtcgcggcctgtttatcctgtacaaggatggggatgtggactcaccagtggttagggagcgtatttggcaaaatagtgacttcaatttcgacaatgtgctgtctgctatgatggcactgtttacggtatctacctttgagggatggcccgcactcctgtataaggccattgattccaatggcgagaatatcgggccaatctataatcacagggttgagatttccattttttttattatctacattatcatcgtggcctttttcatgatgaacatttttgtgggtttcgtcatcgtcacattccaagagcagggagaaaaggaatacaagaactgtgagctcgataagaaccagcggcagtgtgtggagtacgcgttaaaagctaggcccttgaggcggtatatacctaaaaatccgtatcaatacaaattctggtacgtggttaattcgtctccttttgagtatatgatgttcgtgctgatcatgttgaataccctttgccttgccatgcagcattatgagcagagtaaaatgttcaatgatgctatggatattctgaacatggttttcacaggcgtctttaccgtagaaatggtgctgaaagtcatagctttcaagcctaagggttatttttccgacgcgtggaatacattcgattccctgattgttattgggtcgatcatcgatgtggcactgagtgaggctgacccgaccgagtctgaaaacgtgcccgttccaacagccactcccggcaatagcgaggaatcaaatcgtattagcattaccttttttcggctgttcagggtgatgaggctggtaaaactgttaagtagaggtgaaggcattagaacgctcctttggacattcatcaagtcctttcaggccctgccatatgtcgcacttctgatcgctatgctcttctttatttatgcagtgataggcatgcaaatgttcggtaaagtagcaatgcgagacaataaccagatcaacaggaataataactttcagacattcccccaagccgtgttgctgctctttcggtgtgccactggagaagcctggcaggaaatcatgctcgcctgcttgccaggcaaattgtgcgatcccgagagcgactacaatccaggagaggaatacacatgcggaagcaactttgccatcgtgtattttattagcttttatatgctatgcgcctttctgataattaacctattcgttgctgtgataatggacaacttcgactacctgacccgtgactggtctattttgggtccacaccacctggatgagtttaaaagaatctggagcgagtacgatccagaagcaaagggccgtatcaaacatctagacgtggtgaccttgttgcgccgcattcaacccccacttggattcggcaagctctgcccacatcgggtggcttgtaaaaggttggtagctatgaatatgcctctaaacagtgacggtacagtgatgttcaatgctacattgtttgctctggtgagaaccgcattaaagatcaagacagaaggcaacttagagcaggctaacgaggaactgcgagcagtcataaagaaaatctggaagaaaacaagtatgaaactcctggatcaagtcgttccccccgcgggcgacgacgaagtcactgttggaaagttttatgcaacgtttctcatccaagactatttccggaagtttaaaaaaaggaaggagcaaggtttggttggaaaatacccagccaaaaacaccactatcgcactgcaagccggtcttagaactttacatgacattggccccgagatacgtcgcgccattagttgtgatcttcaggacgacgaaccagaggagacaaaacgtgaagaagaggacgacgtgtttaagcggaatggagcccttctgggcaaccacgtgaatcacgttaattcggaccggagagattcactacagcagacaaatacaacccaccgtcccctgcacgtgcaaaggcccagcatccctcctgcaagcgatactgaaaagccactgttccctccagccggtaactctgtctgccacaaccatcacaaccataactcgattggaaaacaggtgccaaccagtacaaacgcaaacctaaataatgctaacatgtccaaagctgcccacgggaagcggccaagtatcggcaatctggaacatgtgagcgaaaacggccaccattcctctcataaacacgaccgtgaacctcagcgccgctcctccgtgaaaagaaccagatattatgagacctacattagatccgattccggcgacgagcagctcccaacaatctgtcgagaagatccagaaattcatggatattttcgcgatccgcattgcttaggggaacaagaatattttagtagtgaggaatgttatgaggacgacagcagtcccacatggagtcgtcaaaactatgggtattacagtagataccctggccgaaatatagatagtgaacgccctcgcggataccatcatcctcaggggtttcttgaggacgacgactctcctgtgtgttatgacagtagacgcagccctcgcagaagactgctcccaccaacaccggcctcccaccgtagaagtagcttcaattttgagtgtctccggaggcaaagcagccaggaggaagttccatcttcccccattttcccccacaggactgccctccccctgcacctgatgcagcagcagatcatggcggtagctgggctggacagtagcaaggctcagaaatattccccgagccatagcacacgctcctgggctacacctccagccacaccaccgtatcgtgattggacaccgtgttacaccccattgattcaggttgaacagtctgaagccctagaccaggtgaatggttctctgcctagcctgcaccgctcgagttggtacacagacgaacccgacataagttacaggactttcactcctgcttcactgactgtgccttcctctttccgaaataaaaattcagacaagcagcgttctgcagattccctcgttgaagcagtcctgataagtgaggggctgggtaggtatgcacgtgaccctaaattcgtgtctgccacgaaacacgagatagctgacgcttgcgacctgacaatagacgaaatggagtcagccgcctctactctgttgaacggtaacgtccggccaagggcaaatggagacgtgggcccgttgtcccaccgccaagactatgagctccaagatttcggccccggctactcagacgaagagcccgacccaggccgtgacgaggaggatctggcagacgagatgatctgcattacgacactgtag

SEQ ID NO: 14771 - DNA, 6546 bp, Artificial Sequence
  derived and/or modified sequence
atgatgatgatgatgatgatgaagaaaatgcagcatcagcgtcagcagcaagcagaccacgcgaacgaagccaactatgcgaggggtaccaggttgcccttgtcaggcgaaggacccacgtcacagcctaattcatcaaagcagactgtgctttcctggcaggccgcaatagacgcagccagacaggcaaaggcagcacaaaccatgtccacctccgcgccaccgcctgtcggcagcctgtcccagcggaaacgacagcagtatgctaaatcaaaaaagcaggggaatagcagcaatagcagacctgccagggccttgttttgtctgtccctcaataatcctatcagacgggcatgtatcagcatcgtggagtggaagcccttcgatattttcatcctattagccatttttgccaattgtgtggccctggcaatctacatccccttccccgaagacgactcaaattccacaaatcacaatctggaaaaagtggagtatgcatttctgatcatctttaccgtggagaccttcctgaagatcatcgcatatggcctcttgctgcatcctaatgcgtacgttagaaacggctggaatctgttagacttcgtgattgtgatagtcgggctcttcagcgtgatacttgaacagctgaccaaggagaccgaggggggaaatcacagttctggtaaatccggcggatttgatgtgaaggctcttcgagcctttcgcgtgctacgccctttgagacttgtcagcggtgtcccaagtttgcaggtcgtcttgaactctattatcaaggccatggtgccattgctccacatagccctgctggtgctttttgtcatcattatttacgccattataggcctagaattgttcatcggcaagatgcacaagacctgcttctttgctgactctgacattgtggccgaagaggaccccgctccttgtgctttttctgggaatggtcggcaatgtaccgctaacggaaccgagtgcaggagcggctgggtgggtcctaatgggggaattaccaactttgataattttgccttcgcaatgctgactgtcttccagtgtattaccatggaaggctggaccgatgtcttgtactgggtgaatgacgccattggttgggaatggccatgggtgtacttcgtgagcctgattatcctggggtccttcttcgtactgaatctcgtgctgggagttctgagcggagaattttcaaaagaacgggaaaaggcaaaggcaaggggagactttcaaaagctgagagaaaagcagcagttggaggaagacttgaaaggctacctagactggattacacaagctgaggacattgaccccgagaatgaagaagagggaggggaggaaggaaaaaggaatactagcatgcctacatctgagacagaaagcgtaaacacggaaaacgtaagcggggaaggagagaaccggggttgctgcggatccctgtggtgctggtggcgacgccgtggagccgcaaaggccggaccctccggttgccgcagatggggacaggctattagcaaatcaaaattgtccaggaggtggaggcgatggaacaggttcaaccgacgccgttgtagggcagctgtcaagtctgtcacgttctactggctggtcattgtgctggttttcctcaataccctcacaattagtagcgaacactacaatcagcccgattggcttacacagattcaggacatcgctaacaaggtgctgctggctctgttcacctgcgaaatgctggtcaagatgtacagcctgggcctgcaggcttatttcgtgagcttgttcaatcgattcgattgctttgtagtttgtggaggtattacagagaccatcttggtggagctggaaattatgagtccgttgggaatatctgtgttcagatgcgtaagactgttgcgcatcttcaaggtgactcgtcactggacgtcactctcgaacctggtcgcaagcttattgaactccatgaagtccattgcgtcattgctactgctgctcttcttgttcattatcatcttctcactcttaggcatgcaactgtttgggggaaagtttaattttgatgaaacccagacaaagaggtctacatttgacaactttcctcaagccttgttaactgtgttccaaattctgacaggcgaggattggaatgccgtgatgtacgatggtatcatggcatatgggggaccatcctcgagcggcatgatagtgtgcatatacttcattatcctcttcatttgtgggaactacattctcctgaatgtgtttctagcaatcgccgtcgataacctagcagacgcggaaagtttgaacacggctcaaaaggaggaggccgaagaaaaagaacggaaaaagatcgcccgaaaagagagcctggaaaataagaagaataataagcccgaggtcaaccaaattgccaactcagacaacaaggtcacaatcgatgactatagggaggaagacgaggacaaggacccttatccgccttgtgacgtgcctgtgggtgaggaggaagaggaagaagaggaagatgagcctgaagtgccagcagggcctaggccccgacggatctctgagctgaacatgaaggagaagatcgccccaatccctgaagggagcgccttttttattctcagtaaaacaaaccctatcagagtgggctgtcacaagcttatcaatcaccacattttcaccaacctgattttggtatttatcatgctgtccagcgctgcgctcgctgccgaagatcctatcaggtctcatagctttcggaacacgatccttggctatttcgactacgccttcaccgctattttcacagtggaaattctgttgaagatgaccacattcggggcattcctgcataagggggctttttgccggaactacttcaacctactcgacatgctggttgttggggtgtctctggtgtcgtttggcattcagtctagcgccattagcgtggtgaaaattctgagagtgcttcgggtcctgagacctctgcgggctattaatagggccaagggtctgaagcacgtggttcagtgcgttttcgtggccattcggacaatcggaaacataatgattgtaaccacgctgctccagttcatgttcgcctgcatcggagtgcaactgtttaaaggtaaattttataggtgcaccgacgaagcgaagtccaacccggaggaatgtaggggcctgtttattctgtataaagatggcgacgtcgattctcctgtcgtccgcgaacgtatatggcagaattcagattttaactttgacaatgttctgtcggccatgatggccctgttcaccgtgtcaacttttgaggggtggccggctctgttatataaggcaattgattccaatggtgaaaacattgggcctatatacaaccatcgggtcgaaatctcaatctttttcattatatacatcattatcgtcgctttttttatgatgaacatcttcgtgggtttcgtgatcgttaccttccaggagcaaggagagaaagagtacaagaactgtgaactcgacaaaaaccaacgccagtgtgttgagtatgccctgaaggcgagacctcttaggagatacattcctaagaatccgtatcagtacaaattctggtatgtggtcaatagcagtccatttgaatatatgatgtttgtgcttattatgctgaacacattatgtctagctatgcagcactacgaacagtctaagatgttcaatgacgctatggacatcctcaatatggttttcaccggcgtgtttacagtcgaaatggtcctgaaggttatcgcttttaagcctaaggggtacttcagtgacgcctggaacactttcgacagcctgatagtaatcggatcaattattgatgtcgctctgtcagaggcggatccaactgaatcagagaatgtgccagtccctacggcaactcccggtaactctgaagaatcgaaccggatttctatcacatttttccgcctgtttagggttatgaggctcgttaagctgttgagcagaggcgaggggatcaggactctgctctggaccttcatcaagtcatttcaggcgctgccgtacgtggcgctgctgatcgccatgctcttttttatctacgcggtgattggcatgcagatgttcggcaaggtcgctatgagggacaacaaccagataaatcggaataataatttccagacgttcccgcaggccgtgctgctgttgttccggtgcgccacaggtgaagcatggcaggagatcatgttggcatgtctccctggcaagctctgcgatccagaatccgattacaatcccggtgaagaatatacatgtggatctaacttcgccatagtgtacttcatatctttctacatgctctgtgcattcctcatcattaatttgtttgtagccgtgatcatggacaactttgactacctgaccagagactggtcaattctgggccctcatcacctcgacgagtttaaacgcatatggtccgaatatgacccagaagctaaaggcaggatcaagcacttagatgttgtcacccttctgagaagaatccagccaccattggggtttggaaaactttgcccacatagggtggcttgcaaaagactggtagcaatgaacatgcccctgaatagcgatggtacagttatgttcaacgcaacactatttgctctcgtgcggacagccctgaaaatcaaaacagagggcaatctcgagcaagccaatgaggagctccgagccgttattaaaaagatttggaagaagacctctatgaagctcctggatcaggtggtcccgcctgccggagacgatgaagtcacggtcggaaagttttatgctacttttcttatccaggactattttcggaaatttaaaaagaggaaagagcagggtctggtgggcaagtatccagcaaaaaacacaacaattgccctgcaggccggactgcgcactctgcatgacattggtccagagatccgcagagccatcagctgcgacctgcaggatgatgagcccgaagaaacgaagcgggaagaagaagatgacgtgttcaaaagaaatggcgcactcttggggaaccacgtaaaccacgtcaactcggaccggagagattcgctgcagcaaacaaacactacgcacaggccacttcacgtacagagacctagcatacctcctgccagcgacactgaaaaacctttgttcccacctgctggcaacagtgtgtgccacaatcaccataaccacaacagtataggcaagcaggtgccgaccagcaccaatgcgaacttgaacaatgcaaacatgtctaaggccgctcatggtaagcggccatccattggaaatctggaacacgtttctgagaacggccatcactccagccacaagcacgaccgagagccccaaaggcgttcaagtgtgaaaagaacacgctattacgaaacatatattagatccgattcgggcgatgaacaactaccaaccatatgccgcgaggaccccgaaatccatgggtacttccgcgacccacactgtctgggcgaacaggagtacttcagtagcgaggagtgctacgaggatgatagttccccaacttggtcccggcagaattatggctactacagcagatacccaggtcgcaacatcgacagcgagagacctcggggatatcatcatccacaaggatttctggaggacgatgattcccccgtttgttatgattctaggcgctcacctcggcgaagactcctgccccctacccctgcttcgcaccgccgatccagttttaactttgagtgcctacgtcgtcagtctagtcaggaagaagtgccatcttcccccatttttccacatagaactgccctgccacttcacttaatgcagcaacagatcatggccgtggcgggtcttgatagcagcaaggcccagaaatattccccctcacatagtaccaggagctgggccaccccccctgcaacacccccataccgcgactggaccccctgttacactccacttatccaggtggagcaaagcgaagcgctggatcaggtgaatggatccctccctagtctgcacagaagttcctggtacactgacgagcccgacatatcatatcgtactttcacacctgcttccctaacagtgccctcctctttcagaaataaaaatagcgataaacagcggtcagccgactccctggtggaggccgttttgatcagcgagggcctcggcagatacgcgagagatccaaagttcgtcagcgccacaaaacacgagatagctgacgcctgtgacctgaccatcgatgaaatggagagcgcagcctccactctcttaaatggtaacgtgagacctcgtgccaacggcgacgtgggccctctgagccatcgccaggattatgagctgcaggacttcggaccaggttattccgatgaggagcctgaccctggtagggacgaggaggacctggctgacgagatgatatgtattacaaccttgtac

SEQ ID NO: 14772 - DNA, 7721 bp, Artificial Sequence
  derived and/or modified sequence
agaataagggcagggaccgcggctcctacctcttggtgatccccttccccattccgcccccgcctcaacgcccagcacagtgccctgcacacagtagtcgctcaataaatgttcgtggatgatgatgatgatgatgatgaaaaaaatgcagcatcaacggcagcagcaagcggaccacgcgaacgaggcaaactatgcaagaggcaccagacttcctctttctggtgaaggaccaacttctcagccgaatagctccaagcaaactgtcctgtcttggcaagctgcaatcgatgctgctagacaggccaaggctgcccaaactatgagcacctctgcacccccacctgtaggatctctctcccaaagaaaacgtcagcaatacgccaagagcaaaaaacagggtaactcgtccaacagccgacctgcccgcgcccttttctgtttatcactcaataaccccatccgaagagcctgcattagtatagtggaatggaaaccatttgacatatttatattattggctatttttgccaattgtgtggccttagctatttacatcccattccctgaagatgattctaattcaacaaatcataacttggaaaaagtagaatatgccttcctgattatttttacagtcgagacatttttgaagattatagcgtatggattattgctacatcctaatgcttatgttaggaatggatggaatttactggattttgttatagtaatagtaggattgtttagtgtaattttggaacaattaaccaaagaaacagaaggcgggaaccactcaagcggcaaatctggaggctttgatgtcaaagccctccgtgcctttcgagtgttgcgaccacttcgactagtgtcaggagtgcccagtttacaagttgtcctgaactccattataaaagccatggttcccctccttcacatagcccttttggtattatttgtaatcataatctatgctattataggattggaactttttattggaaaaatgcacaaaacatgtttttttgctgactcagatatcgtagctgaagaggacccagctccatgtgcgttctcagggaatggacgccagtgtactgccaatggcacggaatgtaggagtggctgggttggcccgaacggaggcatcaccaactttgataactttgcctttgccatgcttactgtgtttcagtgcatcaccatggagggctggacagatgtgctctactgggtaaatgatgcgataggatgggaatggccatgggtgtattttgttagtctgatcatccttggctcatttttcgtccttaacctggttcttggtgtccttagtggagaattctcaaaggaaagagagaaggcaaaagcacggggagatttccagaagctccgggagaagcagcagctggaggaggatctaaagggctacttggattggatcacccaagctgaggacatcgatccggagaatgaggaagaaggaggagaggaaggcaaacgaaatactagcatgcccaccagcgagactgagtctgtgaacacagagaacgtcagcggtgaaggcgagaaccgaggctgctgtggaagtctctggtgctggtggagacggagaggcgcggccaaggcggggccctctgggtgtcggcggtggggtcaagccatctcaaaatccaaactcagccgacgctggcgtcgctggaaccgattcaatcgcagaagatgtagggccgccgtgaagtctgtcacgttttactggctggttatcgtcctggtgtttctgaacaccttaaccatttcctctgagcactacaatcagccagattggttgacacagattcaagatattgccaacaaagtcctcttggctctgttcacctgcgagatgctggtaaaaatgtacagcttgggcctccaagcatatttcgtctctcttttcaaccggtttgattgcttcgtggtgtgtggtggaatcactgagacgatcttggtggaactggaaatcatgtctcccctggggatctctgtgtttcggtgtgtgcgcctcttaagaatcttcaaagtgaccaggcactggacttccctgagcaacttagtggcatccttattaaactccatgaagtccatcgcttcgctgttgcttctgctttttctcttcattatcatcttttccttgcttgggatgcagctgtttggcggcaagtttaattttgatgaaacgcaaaccaagcggagcacctttgacaatttccctcaagcacttctcacagtgttccagatcctgacaggcgaagactggaatgctgtgatgtacgatggcatcatggcttacgggggcccatcctcttcaggaatgatcgtctgcatctacttcatcatcctcttcatttgtggtaactatattctactgaatgtcttcttggccatcgctgtagacaatttggctgatgctgaaagtctgaacactgctcagaaagaagaagcggaagaaaaggagaggaaaaagattgccagaaaagagagcctagaaaataaaaagaacaacaaaccagaagtcaaccagatagccaacagtgacaacaaggttacaattgatgactatagagaagaggatgaagacaaggacccctatccgccttgcgatgtgccagtaggggaagaggaagaggaagaggaggaggatgaacctgaggttcctgccggaccccgtcctcgaaggatctcggagttgaacatgaaggaaaaaattgcccccatccctgaagggagcgctttcttcattcttagcaagaccaacccgatccgcgtaggctgccacaagctcatcaaccaccacatcttcaccaacctcatccttgtcttcatcatgctgagcagcgctgccctggccgcagaggaccccatccgcagccactccttccggaacacgatactgggttactttgactatgccttcacagccatctttactgttgagatcctgttgaagatgacaacttttggagctttcctccacaaaggggccttctgcaggaactacttcaatttgctggatatgctggtggttggggtgtctctggtgtcatttgggattcaatccagtgccatctccgttgtgaagattctgagggtcttaagggtcctgcgtcccctcagggccatcaacagagcaaaaggacttaagcacgtggtccagtgcgtcttcgtggccatccggaccatcggcaacatcatgatcgtcaccaccctcctgcagttcatgtttgcctgtatcggggtccagttgttcaaggggaagttctatcgctgtacggatgaagccaaaagtaaccctgaagaatgcaggggacttttcatcctctacaaggatggggatgttgacagtcctgtggtccgtgaacggatctggcaaaacagtgatttcaacttcgacaacgtcctctctgctatgatggcgctcttcacagtctccacgtttgagggctggcctgcgttgctgtataaagccatcgactcgaatggagagaacatcggcccaatctacaaccaccgcgtggagatctccatcttcttcatcatctacatcatcattgtagctttcttcatgatgaacatctttgtgggctttgtcatcgttacatttcaggaacaaggagaaaaagagtataagaactgtgagctggacaaaaatcagcgtcagtgtgttgaatacgccttgaaagcacgtcccttgcggagatacatccccaaaaacccctaccagtacaagttctggtacgtggtgaactcttcgcctttcgaatacatgatgtttgtcctcatcatgctcaacacactctgcttggccatgcagcactacgagcagtccaagatgttcaatgatgccatggacattctgaacatggtcttcaccggggtgttcaccgtcgagatggttttgaaagtcatcgcatttaagcctaaggggtattttagtgacgcctggaacacgtttgactccctcatcgtaatcggcagcattatagacgtggccctcagcgaagcagacccaactgaaagtgaaaatgtccctgtcccaactgctacacctgggaactctgaagagagcaatagaatctccatcacctttttccgtcttttccgagtgatgcgattggtgaagcttctcagcaggggggaaggcatccggacattgctgtggacttttattaagtcctttcaggcgctcccgtatgtggccctcctcatagccatgctgttcttcatctatgcggtcattggcatgcagatgtttgggaaagttgccatgagagataacaaccagatcaataggaacaataacttccagacgtttccccaggcggtgctgctgctcttcaggtgtgcaacaggtgaggcctggcaggagatcatgctggcctgtctcccagggaagctctgtgaccctgagtcagattacaaccccggggaggagtatacatgtgggagcaactttgccattgtctatttcatcagtttttacatgctctgtgcatttctgatcatcaatctgtttgtggctgtcatcatggataatttcgactatctgacccgggactggtctattttggggcctcaccatttagatgaattcaaaagaatatggtcagaatatgaccctgaggcaaagggaaggataaaacaccttgatgtggtcactctgcttcgacgcatccagcctcccctggggtttgggaagttatgtccacacagggtagcgtgcaagagattagttgccatgaacatgcctctcaacagtgacgggacagtcatgtttaatgcaaccctgtttgctttggttcgaacggctcttaagatcaagaccgaagggaacctggagcaagctaatgaagaacttcgggctgtgataaagaaaatttggaagaaaaccagcatgaaattacttgaccaagttgtccctccagctggtgatgatgaggtaaccgtggggaagttctatgccactttcctgatacaggactactttaggaaattcaagaaacggaaagaacaaggactggtgggaaagtaccctgcgaagaacaccacaattgccctacaggcgggattaaggacactgcatgacattgggccagaaatccggcgtgctatatcgtgtgatttgcaagatgacgagcctgaggaaacaaaacgagaagaagaagatgatgtgttcaaaagaaatggtgccctgcttggaaaccatgtcaatcatgttaatagtgataggagagattcccttcagcagaccaataccacccaccgtcccctgcatgtccaaaggccttcaattccacctgcaagtgatactgagaaaccgctgtttcctccagcaggaaattcggtgtgtcataaccatcataaccataattccataggaaagcaagttcccacctcaacaaatgccaatctcaataatgccaatatgtccaaagctgcccatggaaagcggcccagcattgggaaccttgagcatgtgtctgaaaatgggcatcattcttcccacaagcatgaccgggagcctcagagaaggtccagtgtgaaaagaacccgctattatgaaacttacattaggtccgactcaggagatgaacagctcccaactatttgccgggaagacccagagatacatggctatttcagggacccccactgcttgggggagcaggagtatttcagtagtgaggaatgctacgaggatgacagctcgcccacctggagcaggcaaaactatggctactacagcagatacccaggcagaaacatcgactctgagaggccccgaggctaccatcatccccaaggattcttggaggacgatgactcgcccgtttgctatgattcacggagatctccaaggagacgcctactacctcccaccccagcatcccaccggagatcctccttcaactttgagtgcctgcgccggcagagcagccaggaagaggtcccgtcgtctcccatcttcccccatcgcacggccctgcctctgcatctaatgcagcaacagatcatggcagttgccggcctagattcaagtaaagcccagaagtactcaccgagtcactcgacccggtcgtgggccacccctccagcaacccctccctaccgggactggacaccgtgctacacccccctgatccaagtggagcagtcagaggccctggaccaggtgaacggcagcctgccgtccctgcaccgcagctcctggtacacagacgagcccgacatctcctaccggactttcacaccagccagcctgactgtccccagcagcttccggaacaaaaacagcgacaagcagaggagtgcggacagcttggtggaggcagtcctgatatccgaaggcttgggacgctatgcaagggacccaaaatttgtgtcagcaacaaaacacgaaatcgctgatgcctgtgacctcaccatcgacgagatggagagtgcagccagcaccctgcttaatgggaacgtgcgtccccgagccaacggggatgtgggccccctctcacaccggcaggactatgagctacaggactttggtcctggctacagcgacgaagagccagaccctgggagggatgaggaggacctggcggatgaaatgatatgcatcaccaccttgtagcccccagcgaggggcagactggctctggcctcaggtggggcgcaggagagccaggggaaaagtgcctcatagttaggaaagtttaggcactagttgggagtaatattcaattaattagacttttgtataagagatgtcatgcctcaagaaagccataaacctggtaggaacaggtcccaagcggttgagcctggcagagtaccatgcgctcggccccagctgcaggaaacagcaggccccgccctctcacagaggatgggtgaggaggccagacctgccctgccccattgtccagatgggcactgctgtggagtctgcttctcccatgtaccagggcaccaggcccacccaactgaaggcatggcggcggggtgcaggggaaagttaaaggtgatgacgatcatcacacctgtgtcgttacctcagccatcggtctagcatatcagtcactgggcccaacatatccatttttaaaccctttcccccaaatacactgcgtcctggttcctgtttagctgttctgaaatacggtgtgtaagtaagtcagaacccagctaccagtgattattgcgagggcaatgggacctcataaataaggttttctgtgatgtgacgccagtttacataagagaatatcactccgatggtcggtttctgactgtcacgctaagggcaactgtaaactggaataataatgcactcgcaaccaggtaaacttagatacactagtttgtttaaaattatagatttactgtacatgacttgtaatatactataatttgtatttgtaaagagatggtctatattttgtaattactgtattgtatttgaactgcagcaatatccatgggtcctaataattgtagttccccactaaaatctagaaattattagtatttttactcgggctatccagaagtagaagaaatagagccaattctcatttattcagcgaaaatcctctggggttaaaattttaagtttgaaagaacttgacactacagaaatttttctaaaatattttgagtcactataaacctatcatctttccacaaga

SEQ ID NO: 14773 - DNA, 6546 bp, Artificial Sequence
  derived and/or modified sequence
atgatgatgatgatgatgatgaagaagatgcagcaccagagacagcagcaggccgaccacgccaacgaggccaactacgccagaggcaccagactgcccctgagcggcgagggccccaccagccagcccaacagcagcaagcagaccgtgctgagctggcaggccgccatcgacgccgccagacaggccaaggccgcccagaccatgagcaccagcgcccccccccccgtgggcagcctgagccagagaaagagacagcagtacgccaagagcaagaagcagggcaacagcagcaacagcagacccgccagagccctgttctgcctgagcctgaacaaccccatcagaagagcctgcatcagcatcgtggagtggaagcccttcgacatcttcatcctgctggccatcttcgccaactgcgtggccctggccatctacatccccttccccgaggacgacagcaacagcaccaaccacaacctggagaaggtggagtacgccttcctgatcatcttcaccgtggagaccttcctgaagatcatcgcctacggcctgctgctgcaccccaacgcctacgtgagaaacggctggaacctgctggacttcgtgatcgtgatcgtgggcctgttcagcgtgatcctggagcagctgaccaaggagaccgagggcggcaaccacagcagcggcaagagcggcggcttcgacgtgaaggccctgagagccttcagagtgctgagacccctgagactggtgagcggcgtgcccagcctgcaggtggtgctgaacagcatcatcaaggccatggtgcccctgctgcacatcgccctgctggtgctgttcgtgatcatcatctacgccatcatcggcctggagctgttcatcggcaagatgcacaagacctgcttcttcgccgacagcgacatcgtggccgaggaggaccccgccccctgcgccttcagcggcaacggcagacagtgcaccgccaacggcaccgagtgcagaagcggctgggtgggccccaacggcggcatcaccaacttcgacaacttcgccttcgccatgctgaccgtgttccagtgcatcaccatggagggctggaccgacgtgctgtactgggtgaacgacgccatcggctgggagtggccctgggtgtacttcgtgagcctgatcatcctgggcagcttcttcgtgctgaacctggtgctgggcgtgctgagcggcgagttcagcaaggagagagagaaggccaaggccagaggcgacttccagaagctgagagagaagcagcagctggaggaggacctgaagggctacctggactggatcacccaggccgaggacatcgaccccgagaacgaggaggagggcggcgaggagggcaagagaaacaccagcatgcccaccagcgagaccgagagcgtgaacaccgagaacgtgagcggcgagggcgagaacagaggctgctgcggcagcctgtggtgctggtggagaagaagaggcgccgccaaggccggccccagcggctgcagaagatggggccaggccatcagcaagagcaagctgagcagaagatggagaagatggaacagattcaacagaagaagatgcagagccgccgtgaagagcgtgaccttctactggctggtgatcgtgctggtgttcctgaacaccctgaccatcagcagcgagcactacaaccagcccgactggctgacccagatccaggacatcgccaacaaggtgctgctggccctgttcacctgcgagatgctggtgaagatgtacagcctgggcctgcaggcctacttcgtgagcctgttcaacagattcgactgcttcgtggtgtgcggcggcatcaccgagaccatcctggtggagctggagatcatgagccccctgggcatcagcgtgttcagatgcgtgagactgctgagaatcttcaaggtgaccagacactggaccagcctgagcaacctggtggccagcctgctgaacagcatgaagagcatcgccagcctgctgctgctgctgttcctgttcatcatcatcttcagcctgctgggcatgcagctgttcggcggcaagttcaacttcgacgagacccagaccaagagaagcaccttcgacaacttcccccaggccctgctgaccgtgttccagatcctgaccggcgaggactggaacgccgtgatgtacgacggcatcatggcctacggcggccccagcagcagcggcatgatcgtgtgcatctacttcatcatcctgttcatctgcggcaactacatcctgctgaacgtgttcctggccatcgccgtggacaacctggccgacgccgagagcctgaacaccgcccagaaggaggaggccgaggagaaggagagaaagaagatcgccagaaaggagagcctggagaacaagaagaacaacaagcccgaggtgaaccagatcgccaacagcgacaacaaggtgaccatcgacgactacagagaggaggacgaggacaaggacccctaccccccctgcgacgtgcccgtgggcgaggaggaggaggaggaggaggaggacgagcccgaggtgcccgccggccccagacccagaagaatcagcgagctgaacatgaaggagaagatcgcccccatccccgagggcagcgccttcttcatcctgagcaagaccaaccccatcagagtgggctgccacaagctgatcaaccaccacatcttcaccaacctgatcctggtgttcatcatgctgagcagcgccgccctggccgccgaggaccccatcagaagccacagcttcagaaacaccatcctgggctacttcgactacgccttcaccgccatcttcaccgtggagatcctgctgaagatgaccaccttcggcgccttcctgcacaagggcgccttctgcagaaactacttcaacctgctggacatgctggtggtgggcgtgagcctggtgagcttcggcatccagagcagcgccatcagcgtggtgaagatcctgagagtgctgagagtgctgagacccctgagagccatcaacagagccaagggcctgaagcacgtggtgcagtgcgtgttcgtggccatcagaaccatcggcaacatcatgatcgtgaccaccctgctgcagttcatgttcgcctgcatcggcgtgcagctgttcaagggcaagttctacagatgcaccgacgaggccaagagcaaccccgaggagtgcagaggcctgttcatcctgtacaaggacggcgacgtggacagccccgtggtgagagagagaatctggcagaacagcgacttcaacttcgacaacgtgctgagcgccatgatggccctgttcaccgtgagcaccttcgagggctggcccgccctgctgtacaaggccatcgacagcaacggcgagaacatcggccccatctacaaccacagagtggagatcagcatcttcttcatcatctacatcatcatcgtggccttcttcatgatgaacatcttcgtgggcttcgtgatcgtgaccttccaggagcagggcgagaaggagtacaagaactgcgagctggacaagaaccagagacagtgcgtggagtacgccctgaaggccagacccctgagaagatacatccccaagaacccctaccagtacaagttctggtacgtggtgaacagcagccccttcgagtacatgatgttcgtgctgatcatgctgaacaccctgtgcctggccatgcagcactacgagcagagcaagatgttcaacgacgccatggacatcctgaacatggtgttcaccggcgtgttcaccgtggagatggtgctgaaggtgatcgccttcaagcccaagggctacttcagcgacgcctggaacaccttcgacagcctgatcgtgatcggcagcatcatcgacgtggccctgagcgaggccgaccccaccgagagcgagaacgtgcccgtgcccaccgccacccccggcaacagcgaggagagcaacagaatcagcatcaccttcttcagactgttcagagtgatgagactggtgaagctgctgagcagaggcgagggcatcagaaccctgctgtggaccttcatcaagagcttccaggccctgccctacgtggccctgctgatcgccatgctgttcttcatctacgccgtgatcggcatgcagatgttcggcaaggtggccatgagagacaacaaccagatcaacagaaacaacaacttccagaccttcccccaggccgtgctgctgctgttcagatgcgccaccggcgaggcctggcaggagatcatgctggcctgcctgcccggcaagctgtgcgaccccgagagcgactacaaccccggcgaggagtacacctgcggcagcaacttcgccatcgtgtacttcatcagcttctacatgctgtgcgccttcctgatcatcaacctgttcgtggccgtgatcatggacaacttcgactacctgaccagagactggagcatcctgggcccccaccacctggacgagttcaagagaatctggagcgagtacgaccccgaggccaagggcagaatcaagcacctggacgtggtgaccctgctgagaagaatccagccccccctgggcttcggcaagctgtgcccccacagagtggcctgcaagagactggtggccatgaacatgcccctgaacagcgacggcaccgtgatgttcaacgccaccctgttcgccctggtgagaaccgccctgaagatcaagaccgagggcaacctggagcaggccaacgaggagctgagagccgtgatcaagaagatctggaagaagaccagcatgaagctgctggaccaggtggtgccccccgccggcgacgacgaggtgaccgtgggcaagttctacgccaccttcctgatccaggactacttcagaaagttcaagaagagaaaggagcagggcctggtgggcaagtaccccgccaagaacaccaccatcgccctgcaggccggcctgagaaccctgcacgacatcggccccgagatcagaagagccatcagctgcgacctgcaggacgacgagcccgaggagaccaagagagaggaggaggacgacgtgttcaagagaaacggcgccctgctgggcaaccacgtgaaccacgtgaacagcgacagaagagacagcctgcagcagaccaacaccacccacagacccctgcacgtgcagagacccagcatcccccccgccagcgacaccgagaagcccctgttcccccccgccggcaacagcgtgtgccacaaccaccacaaccacaacagcatcggcaagcaggtgcccaccagcaccaacgccaacctgaacaacgccaacatgagcaaggccgcccacggcaagagacccagcatcggcaacctggagcacgtgagcgagaacggccaccacagcagccacaagcacgacagagagccccagagaagaagcagcgtgaagagaaccagatactacgagacctacatcagaagcgacagcggcgacgagcagctgcccaccatctgcagagaggaccccgagatccacggctacttcagagacccccactgcctgggcgagcaggagtacttcagcagcgaggagtgctacgaggacgacagcagccccacctggagcagacagaactacggctactacagcagataccccggcagaaacatcgacagcgagagacccagaggctaccaccacccccagggcttcctggaggacgacgacagccccgtgtgctacgacagcagaagaagccccagaagaagactgctgccccccacccccgccagccacagaagaagcagcttcaacttcgagtgcctgagaagacagagcagccaggaggaggtgcccagcagccccatcttcccccacagaaccgccctgcccctgcacctgatgcagcagcagatcatggccgtggccggcctggacagcagcaaggcccagaagtacagccccagccacagcaccagaagctgggccaccccccccgccacccccccctacagagactggaccccctgctacacccccctgatccaggtggagcagagcgaggccctggaccaggtgaacggcagcctgcccagcctgcacagaagcagctggtacaccgacgagcccgacatcagctacagaaccttcacccccgccagcctgaccgtgcccagcagcttcagaaacaagaacagcgacaagcagagaagcgccgacagcctggtggaggccgtgctgatcagcgagggcctgggcagatacgccagagaccccaagttcgtgagcgccaccaagcacgagatcgccgacgcctgcgacctgaccatcgacgagatggagagcgccgccagcaccctgctgaacggcaacgtgagacccagagccaacggcgacgtgggccccctgagccacagacaggactacgagctgcaggacttcggccccggctacagcgacgaggagcccgaccccggcagagacgaggaggacctggccgacgagatgatctgcatcaccaccctgtag

SEQ ID NO: 14774 - protein, 1877 aa, Artificial Sequence
  derived and/or modified sequence
MLAEENKNAGTSALEVLRRATIKRSRTEAMTRDSSDEHCVDISSVGTPLARASIKSAKVDGVSYFRHKERLLRISIRHMVKSQVFYWIVLSLVALNTACVAIVHHNQPQWLTHLLYYAEFLFLGLFLLEMSLKMYGMGPRLYFHSSFNCFDFGVTVGSIFEVVWAIFRPGTSFGISVLRALRLLRIFKITKYWASLRNLVVSLMSSMKSIISLLFLLFLFIVVFALLGMQLFGGRFNFNDGTPSANFDTFPAAIMTVFQILTGEDWNEVMYNGIRSQGGVSSGMWSAIYFIVLTLFGNYTLLNVFLAIAVDNLANAQELTKDEQEEEEAFNQKHALQKAKEVSPMSAPNMPSIERDRRRRHHMSMWEPRSSHLRERRRRHHMSVWEQRTSQLRKHMQMSSQEALNREEAPTMNPLNPLNPLSSLNPLNAHPSLYRRPRAIEGLALGLALEKFEEERISRGGSLKGDGGDRSSALDNQRTPLSLGQREPPWLARPCHGNCDPTQQEAGGGEAVVTFEDRARHRQSQRRSRHRRVRTEGKESSSASRSRSASQERSLDEAMPTEGEKDHELRGNHGAKEPTIQEERAQDLRRTNSLMVSRGSGLAGGLDEADTPLVLPHPELEVGKHVVLTEQEPEGSSEQALLGNVQLDMGRVISQSEPDLSCITANTDKATTESTSVTVAIPDVDPLVDSTVVHISNKTDGEASPLKEAEIREDEEEVEKKKQKKEKRETGKAMVPHSSMFIFSTTNPIRRACHYIVNLRYFEMCILLVIAASSIALAAEDPVLTNSERNKVLRYFDYVFTGVFTFEMVIKMIDQGLILQDGSYFRDLWNILDFVVVVGALVAFALAMSLETNKGRDIKTIKSLRVLRVLRPLKTIKRLPKLKAVFDCVVTSLKNVFNILIVYKLFMFIFAVIAVQLFKGKFFYCTDSSKDTEKECIGNYVDHEKNKMEVKGREWKRHEFHYDNIIWALLTLFTVSTGEGWPQVLQHSVDVTEEDRGPSRSNRMEMSIFYVVYFVVFPFFFVNIFVALIIITFQEQGDKMMEECSLEKNERACIDFAISAKPLTRYMPQNRHTFQYRVWHFVVSPSFEYTIMAMIALNTVVLMMKYYSAPCTYELALKYLNIAFTMVFSLECVLKVIAFGFLNYFRDTWNIFDFITVIGSITEIILTDSKLVNTSGFNMSFLKLFRAARLIKLLRQGYTIRILLWTFVQSFKALPYVCLLIAMLFFIYAIIGMQVFGNIKLDEESHINRHNNFRSFFGSLMLLFRSATGEAWQEIMLSCLGEKGCEPDTTAPSGQNENERCGTDLAYVYFVSFIFFCSFLMLNLFVAVIMDNFEYLTRDSSILGPHHLDEFVRVWAEYDRAACGRIHYTEMYEMLTLMSPPLGLGKRCPSKVAYKRLVLMNMPVAEDMTVHFTSTLMALIRTALDIKIAKGGADRQQLDSELQKETLAIWPHLSQKMLDLLVPMPKASDLTVGKIYAAMMIMDYYKQSKVKKQRQQLEEQKNAPMFQRMEPSSLPQEIIANAKALPYLQQDPVSGLSGRSGYPSMSPLSPQDIFQLACMDPADDGQFQERQSLVVTDPSSMRRSFSTIRDKRSNSSWLEEFSMERSSENTYKSRRRSYHSSLRLSAHRLNSDSGHKSDTHRSGGRERGRSKERKHLLSPDVSRCNSEERGTQADWESPERRQSRSPSEGRSQTPNRQGTGSLSESSIPSVSDTSTPRRSRRQLPPVPPKPRPLLSYSSLIRHAGSISPPADGSEEGSPLTSQALESNNACLTESSNSPHPQQSQHASPQRYISEPYLALHEDSHASDCGEEETLTFEAAVATSLGRSNTIGSAPPLRHSWQMPNGHYRRRRRGGPGPGMMCGAVNNLLSDTEEDDKC

SEQ ID NO: 14775 - protein, 2270 aa, Artificial Sequence
  derived and/or modified sequence
MARFGEAVVARPGSGDGDSDQSRNRQGTPVPASGQAAAYKQTKAQRARTMALYNPIPVRQNCFTVNRSLFIFGEDNIVRKYAKKLIDWPPFEYMILATIIANCIVLALEQHLPEDDKTPMSRRLEKTEPYFIGIFCFEAGIKIVALGFIFHKGSYLRNGWNVMDFIVVLSGILATAGTHFNTHVDLRTLRAVRVLRPLKLVSGIPSLQIVLKSIMKAMVPLLQIGLLLFFAILMFAIIGLEFYSGKLHRACFMNNSGILEGFDPPHPCGVQGCPAGYECKDWIGPNDGITQFDNILFAVLTVFQCITMEGWTTVLYNTNDALGATWNWLYFIPLIIIGSFFVLNLVLGVLSGEFAKERERVENRRAFMKLRRQQQIERELNGYRAWIDKAEEVMLAEENKNAGTSALEVLRRATIKRSRTEAMTRDSSDEHCVDISSVGTPLARASIKSAKVDGVSYFRHKERLLRISIRHMVKSQVFYWIVLSLVALNTACVAIVHHNQPQWLTHLLYYAEFLFLGLFLLEMSLKMYGMGPRLYFHSSFNCFDFGVTVGSIFEVVWAIFRPGTSFGISVLRALRLLRIFKITKYWASLRNLVVSLMSSMKSIISLLFLLFLFIVVFALLGMQLFGGRFNFNDGTPSANFDTFPAAIMTVFQILTGEDWNEVMYNGIRSQGGVSSGMWSAIYFIVLTLFGNYTLLNVFLAIAVDNLANAQELTKDEQEEEEAFNQKHALQKAKEVSPMSAPNMPSIERDRRRRHHMSMWEPRSSHLRERRRRHHMSVWEQRTSQLRKHMQMSSQEALNREEAPTMNPLNPLNPLSSLNPLNAHPSLYRRPRAIEGLALGLALEKFEEERISRGGSLKGDGGDRSSALDNQRTPLSLGQREPPWLARPCHGNCDPTQQEAGGGEAVVTFEDRARHRQSQRRSRHRRVRTEGKESSSASRSRSASQERSLDEAMPTEGEKDHELRGNHGAKEPTIQEERAQDLRRTNSLMVSRGSGLAGGLDEADTPLVLPHPELEVGKHVVLTEQEPEGSSEQALLGNVQLDMGRVISQSEPDLSCITANTDKATTESTSVTVAIPDVDPLVDSTVVHISNKTDGEASPLKEAEIREDEEEVEKKKQKKEKRETGKAMVPHSSMFIFSTTNPIRRACHYIVNLRYFEMCILLVIAASSIALAAEDPVLTNSERNKVLRYFDYVFTGVFTFEMVIKMIDQGLILQDGSYFRDLWNILDFVVVVGALVAFALANALGTNKGRDIKTIKSLRVLRVLRPLKTIKRLPKLKAVFDCVVTSLKNVFNILIVYKLFMFIFAVIAVQLFKGKFFYCTDSSKDTEKECIGNYVDHEKNKMEVKGREWKRHEFHYDNIIWALLTLFTVSTGEGWPQVLQHSVDVTEEDRGPSRSNRMEMSIFYVVYFVVFPFFFVNIFVALIIITFQEQGDKMMEECSLEKNERACIDFAISAKPLTRYMPQNRHTFQYRVWHFVVSPSFEYTIMAMIALNTVVLMMKYYSAPCTYELALKYLNIAFTMVFSLECVLKVIAFGFLNYFRDTWNIFDFITVIGSITEIILTDSKLVNTSGFNMSFLKLFRAARLIKLLRQGYTIRILLWTFVQSFKALPYVCLLIAMLFFIYAIIGMQVFGNIKLDEESHINRHNNFRSFFGSLMLLFRSATGEAWQEIMLSCLGEKGCEPDTTAPSGQNENERCGTDLAYVYFVSFIFFCSFLMLNLFVAVIMDNFEYLTRDSSILGPHHLDEFVRVWAEYDRAACGRIHYTEMYEMLTLMSPPLGLGKRCPSKVAYKRLVLMNMPVAEDMTVHFTSTLMALIRTALDIKIAKGGADRQQLDSELQKETLAIWPHLSQKMLDLLVPMPKASDLTVGKIYAAMMIMDYYKQSKVKKQRQQLEEQKNAPMFQRMEPSSLPQEIIANAKALPYLQQDPVSGLSGRSGYPSMSPLSPQDIFQLACMDPADDGQFQERQSLVVTDPSSMRRSFSTIRDKRSNSSWLEEFSMERSSENTYKSRRRSYHSSLRLSAHRLNSDSGHKSDTHRSGGRERGRSKERKHLLSPDVSRCNSEERGTQADWESPERRQSRSPSEGRSQTPNRQGTGSLSESSIPSVSDTSTPRRSRRQLPPVPPKPRPLLSYSSLIRHAGSISPPADGSEEGSPLTSQALESNNACLTESSNSPHPQQSQHASPQRYISEPYLALHEDSHASDCGEEETLTFEAAVATSLGRSNTIGSAPPLRHSWQMPNGHYRRRRRGGPGPGMMCGAVNNLLSDTEEDDKC

SEQ ID NO: 14776 - DNA, 5634 bp, Artificial Sequence
  derived and/or modified sequence
atgctcgctgaggagaataaaaacgcaggtactagcgcattagaggtcctgagacgcgctactataaagagatctcgcaccgaagctatgacccgagattcctctgatgaacactgtgtggacattagttcagtcgggacacccctggctcgggcgtctattaagagcgctaaggtagatggtgtgtcctacttcaggcataaggagcgtctactgcgcataagcatacgccatatggtcaagtcccaggtgttctattggatagtactgagcctggtggcgctcaataccgcctgtgtcgctatcgtccatcataaccagccacaatggcttacacatctcctgtactatgccgagttcctgttcctcggattgtttctactggagatgagcctaaaaatgtatgggatgggtcctcggctgtacttccattcaagctttaattgcttcgacttcggcgtcactgtaggatccatcttcgaggttgtgtgggctatattccggcccggtacatctttcgggattagtgtcttaagggctctgcggctgttgcggatctttaagattaccaagtactgggcctcactgcgaaatcttgtcgtcagtcttatgagttccatgaaaagcatcatctccttgttatttctgctgttcctgttcatcgtggttttcgcgctactgggaatgcagttgttcgggggtaggttcaacttcaatgatggcactccctctgccaatttcgacacctttccagctgccatcatgacggtctttcagattttaaccggagaagactggaacgaagtcatgtacaatggaattagaagccaggggggcgtgtctagcggtatgtggtccgctatctacttcatcgtactcacactgttcggtaactatacacttttgaacgtgttcctggctatcgcagtcgataatctggccaacgcacaggagcttacgaaggatgaacaggaagaagaggaggctttcaaccagaaacacgctttgcagaaggccaaagaggtctcaccaatgtccgctccaaacatgcccagcatcgagcgcgaccgacgtaggaggcatcacatgagtatgtgggagccccgatcctcccatttacgcgagcgaaggcggcgccatcatatgagcgtctgggagcagaggacttcccaactgagaaagcatatgcagatgtcctcccaggaagctctcaatcgcgaagaagctccgacaatgaaccctctcaaccccctcaaccctctctccagcttgaatcctctcaacgcacaccctagcctctataggagaccgagagccatcgaagggcttgccctgggcctcgcactcgaaaagtttgaagaagaacgtatttcaagaggaggatctctgaagggagacggcggggatcgttcctccgctctggataatcagcgaacacccctgtcgctggggcagagagaaccaccctggttggctcggccctgccatggtaactgtgaccccacacagcaggaggcggggggcggcgaggccgtagtaacgttcgaggaccgggcacgacaccgccagtctcagcgaaggagccggcatcgccgggtgaggaccgaaggtaaggagtcatcaagcgcatctcgatcccggtctgccagccaagaaaggagtttggacgaggctatgccgaccgagggggaaaaggaccatgagcttcgcggtaatcatggggctaaggagccaacaattcaagaggaacgcgctcaagacctgcgtaggacaaattccttaatggtgagccggggatcgggtctcgctggggggcttgacgaagccgatactcctctggtactccctcatccagaactggaggtaggcaagcacgttgttctaactgagcaagaacctgagggcagctctgagcaggcacttttagggaacgtccaactggacatgggaagagtgatttcgcagagcgaaccagacctgtcatgcatcaccgctaataccgataaggccactactgaatcgacctcagtcactgtggctatccctgatgtcgacccattggttgattctaccgtagtccacatttcaaataagaccgatggagaagccagccccctgaaggaggccgaaatacgcgaagacgaggaggaggtggagaagaagaaacaaaaaaaggaaaaacgggagacggggaaggccatggttccccacagctctatgtttattttcagcaccacaaaccctatcagacgggcgtgtcactacatcgttaacctgcgctactttgagatgtgtatactgcttgtgatcgccgccagctctatcgcattggctgctgaggaccccgtcctcactaactccgagcggaacaaagtcctacgatatttcgactacgtgtttaccggagtgttcacctttgaaatggtaatcaagatgatcgatcaaggtctcatattgcaagatggcagttacttcagagatctgtggaatatcctagattttgttgtggtcgttggcgcccttgtcgccttcgcgctggctatgtctctggagaccaataaaggcagggacatcaagaccataaaatcactgagagtgctgcgtgtcttaagacccctgaaaaccattaagagacttcccaagctaaaggctgtgttcgactgcgttgtcacatccctcaaaaacgtgtttaacattttaattgtgtacaagctctttatgtttatattcgctgtgattgcagtgcagctgtttaagggcaagtttttttactgcaccgactcttctaaagataccgaaaaagaatgcatagggaattatgttgaccacgagaaaaacaagatggaggtaaagggaagagaatggaagaggcatgaatttcactatgataacattatttgggctctcttaacactcttcactgtctccactggtgagggttggccacaggtgctgcaacactccgtagacgtaactgaagaggaccgggggccgtctcgctcaaaccggatggaaatgtctattttttatgtagtgtactttgtggtgttccctttctttttcgtaaacatctttgtcgccctcatcatcattacgtttcaggagcaaggcgacaagatgatggaagagtgctctctggaaaaaaacgagagggcctgcattgattttgccatctcagctaagcccttgacccggtatatgccacaaaacagacatacctttcagtaccgtgtgtggcacttcgtagtgtcgccaagttttgagtataccatcatggcaatgattgccctcaataccgtggtcttgatgatgaagtactattctgctccttgcacttacgaactggctctcaagtacttaaatatagcctttacaatggttttttcactagagtgcgttttaaaagtgatcgccttcggattcctcaattatttccgtgatacttggaatatttttgactttatcaccgtaatcggcagcattacagagataatcctgacggatagcaagctggtaaatacatcaggcttcaacatgagttttctaaaactcttccgtgccgcacgcctgatcaagttgctgcgccagggctataccatccgcatattgctgtggactttcgttcagagtttcaaggcccttccctatgtctgcctgttaatcgcaatgctattcttcatatacgctattatagggatgcaggttttcgggaacattaaactagatgaagagagtcatattaaccgccacaacaatttcagatcttttttcgggagcctgatgctcttgttccgaagtgcgactggcgaagcttggcaggagatcatgctgtcatgcctgggcgaaaagggttgcgaacctgacaccaccgcaccctctggacaaaatgagaacgagcggtgcggtaccgatttagcttatgtgtacttcgtctccttcatcttcttctgctccttcctgatgctgaacctgtttgtagccgtgattatggataactttgaatacctaactagagacagcagtatcctgggtccccatcatctcgatgagtttgtccgagtttgggccgagtacgacagagccgcatgcggtcgaatccactatactgaaatgtatgagatgctgaccttgatgtcccccccccttggcctcgggaagcggtgcccgtctaaggtggcctacaaaaggctggtcctgatgaacatgcccgtggcggaggatatgacagtgcatttcactagcacactgatggcactaattaggaccgctttagatattaaaatcgccaagggaggcgcagacaggcagcaactggacagcgagttgcagaaagagaccctggccatctggcctcatctctctcagaaaatgttggacctgctagtccctatgccaaaagcgtctgatctgaccgtgggcaagatctacgctgccatgatgatcatggactattacaaacagtccaaagttaagaaacagagacaacagctggaagagcagaagaatgcccccatgttccaaaggatggagccgtcctctctgccccaagaaattattgcaaatgccaaagcactgccatacctccagcaagatcccgtctctggcctttccgggcgttccggatatccttcaatgtcccctcttagccctcaagatatctttcagctcgcctgcatggatcccgctgacgacggacagttccaggaaaggcaatctctggtcgtgacagatccaagttcaatgagacgtagcttctctaccattagggacaagagatcgaatagtagctggctggaagagttttccatggagcgcagctcagagaacacttacaaatctcgccggagatcatatcactccagtctcaggctgtccgctcatagactcaacagcgatagcggccacaaatcggacacacaccggagcggaggcagagaacgggggaggtccaaggagaggaaacatctgctgtctcccgatgtcagccggtgtaattcagaggagcgggggactcaggccgactgggagtcccctgaaagacgccaatcccgctccccatccgagggacggtctcaaacacccaatcgccaggggactgggagtttgtcagagtcttcgatcccaagcgtgtccgatacttcaacaccgcggcggagccgccgtcagcttcctcccgtgcctccgaagccaaggccactgttgtcatactcatcgttaatccgccacgcaggcagcatctcgccacccgccgatggatccgaagagggaagtcccctcacgagtcaagccctggaatctaataacgcctgcctgacggaatcgtccaacagtccccatccccaacaatcccagcacgcctcgccacagagatacatctccgagccatatctcgcgctacatgaggatagccacgccagtgactgcggggaagaagagactctgacgttcgaggctgccgtggctacctccttaggaaggagcaacactatagggagcgcccctccacttaggcattcatggcaaatgcctaatggtcactataggcgcaggcgtcggggcggcccgggccccggaatgatgtgcggtgctgtgaataacctcctcagcgacacagaggaggacgataagtgttag

SEQ ID NO: 14777 - DNA, 6813 bp, Artificial Sequence
  derived and/or modified sequence
atggcacgattcggggaggccgtcgtggcgaggccaggcagtggagatggagacagcgatcagtctcgcaaccgacaggggaccccagttccggccagcggacaagccgctgcatataagcagaccaaagctcagagagccagaacaatggccctttataaccccattcccgtcagacaaaattgcttcacggtcaaccggtctctcttcatattcggcgaggacaatatcgtgagaaaatacgcaaaaaagctgatcgactggccccctttcgagtatatgatcctggcaacaatcatagccaactgcatcgtcctggccttggaacagcatctgcccgaggatgacaaaaccccaatgagccggcggctggagaaaaccgaaccctatttcatcggcattttctgcttcgaggccggaattaaaatagtagcactgggatttatctttcataagggcagctacctgcgtaacggttggaacgtaatggactttatcgtggtgttaagcggaatactcgcaaccgctggtacacacttcaacacgcatgtagatctgaggactctgcgcgcagtgcgggtcttgagaccactgaagctcgtcagcggcatcccttctcttcagatcgtccttaaaagtatcatgaaagctatggtgccgctgctccagatcggtctgctactgttctttgccatattgatgttcgccattataggattggaattctactccggtaaactacaccgggcttgtttcatgaacaattcgggcatcctggagggatttgaccctccacatccatgcggagtacaggggtgtcccgcaggttacgagtgtaaggattggatcgggccaaatgacggtattactcagtttgacaatatcctctttgcagtccttactgtgtttcagtgtattaccatggaaggctggacaacagtactgtataacaccaacgacgcgcttggagcgacatggaattggctttactttatacccctgatcatcattgggtctttctttgtcctgaaccttgtgctgggtgtgttgtccggagaatttgctaaagagagggaacgcgtggagaatcggcgcgcctttatgaagctgagacggcagcagcagatagaacgggaactcaacggttaccgggcatggatagataaagcagaggaggtaatgcttgccgaagaaaataagaatgctggcacatccgctctcgaagtccttcggagagctactattaaacgatcacggaccgaagcaatgacacgagacagcagcgatgagcattgtgttgacatatcctccgttgggacacctcttgcacgagctagcataaaatccgcaaaagtggatggcgtttcttactttcgccacaaggaacgcctcttgcgcatcagcattagacatatggtcaagtcccaggtgttttattggatcgtgctgtcgctggtggcgctcaatacggcatgcgtcgccattgtacaccacaatcagccgcaatggctgacacacctgctgtattatgccgaattcctgtttcttggtctgtttctactggagatgtcgctgaaaatgtatggaatggggcctagactgtattttcatagtagctttaactgtttcgattttggggtgactgtcggctctatttttgaagtcgtttgggctatctttcgccccggcacctcctttggtattagcgtgctgagagctctgcgactcttgaggatctttaaaatcacgaagtattgggcatccctgcgcaatctagtggtgtccctgatgagcagtatgaaatccattataagcctgctgttcctattgttcctgttcatagtggtgttcgcacttcttggcatgcaattgttcggtggacgtttcaacttcaatgatggtaccccttccgcgaatttcgatacattcccggcagccattatgactgtatttcagatcctaacgggcgaagattggaacgaggtcatgtataatggcatcagatctcaaggaggcgttagcagtggcatgtggtccgccatctattttatcgtccttaccctctttggtaactatactttacttaatgtattcctggcaatcgccgtagacaatctggctaacgcacaggagttgacaaaggacgagcaggaggaagaagaggctttcaaccagaaacacgccctgcagaaggcaaaggaggtttcccctatgtctgcacctaatatgccttcaattgaaagggaccgacggcggagacatcacatgagtatgtgggaaccccggtcctcccacctcagagaaagacgtagacgccatcatatgagtgtctgggagcagagaacatctcagcttagaaagcatatgcagatgagttcacaagaggctttaaacagagaagaagcaccaacaatgaaccccctcaaccccctgaaccccttaagcagtctcaaccccctgaacgctcatccatccctttatcgaaggccgagggctatcgagggactcgccctgggcctagcactggagaaattcgaggaggagcgaatctcgcgtgggggctctctgaaaggcgacggcggagatcgatcatctgccttggacaaccagcgtacgccattgtccctcggacagagggagcccccatggcttgcacggccctgccatggcaactgtgacccaacacagcaggaggccgggggtggcgaagctgtagtgacttttgaggatagggccagacaccgccagagtcaaagaagatcgcgtcacagacgggtgcgcacggagggtaaagagtcatcatccgccagccggtcacgtagtgcgagccaggaaaggagcctggacgaggctatgcctacagagggggagaaagaccacgaactgagaggaaatcacggtgccaaagagccaacaatccaggaagagcgtgcccaggatctgcggagaactaattctttgatggtgtctcgaggatccgggctggccgggggattagacgaggccgacaccccgctcgtgctgccacaccctgagcttgaagtcggcaaacatgtagtgctgacagaacaggagcctgagggcagttctgagcaagccctcctgggcaacgtccagttggatatgggcagagtgattagccagtcagagcccgatctgtcatgtatcacggccaataccgacaaggccactaccgagtcaacttcagtcaccgttgccattcccgacgtggatcccctggtggactctactgtggttcacatctcgaacaaaacagacggagaggcgtcaccactcaaggaagctgaaattcgcgaggatgaggaggaggtggagaagaagaagcagaaaaaggaaaaaagagagacaggtaaagctatggtaccccactcatctatgttcattttttctactaccaatccaatcagacgggcctgtcattatatagtcaacttacgttatttcgagatgtgcattctgctcgtgattgctgctagcagtatcgccttggctgctgaggatccagtgctgactaactccgaacggaataaggtgttgaggtacttcgactatgtgtttaccggggtctttacctttgagatggttataaagatgattgatcaggggctcattttacaggatggaagctatttccgggatttatggaacattttggatttcgtggtggtcgtgggagctctggtcgcattcgctctggccaacgcgctaggaaccaacaaagggcgcgatattaaaactataaaatccttaagagtcctgcgcgtactgcgtccattgaaaacaattaaaaggcttccaaagctgaaggcagtatttgattgtgtggtcacttccctgaagaatgtattcaatattctgattgtatacaagctatttatgtttatctttgctgtcatagccgtacaacttttcaaaggcaagttcttctactgtaccgactcctcaaaagatactgaaaaggagtgcattgggaattacgtggaccatgagaagaacaaaatggaggtcaagggaagggagtggaaaaggcatgaattccattacgataatataatatgggcgctgttgactttgtttacggtctcaacaggggaagggtggccacaggtgttacagcacagcgttgacgtgaccgaggaggatagaggtccatcccgaagcaaccggatggagatgtctattttttacgtggtgtatttcgtggtttttccatttttttttgtgaacatctttgtggcgctgatcataatcacctttcaggagcagggcgataagatgatggaggagtgcagtctcgagaagaatgagagggcttgcatcgactttgccatctccgccaagcccctgactcgttacatgcctcagaaccggcacacgtttcagtaccgcgtgtggcactttgtcgtaagtccctcattcgaatacaccattatggccatgatcgccttgaataccgtggtactcatgatgaaatactacagtgccccctgtacttacgagctggccctgaagtacttgaacatcgcatttaccatggttttttcactagagtgtgttctgaaagtgatcgctttcggattcctcaactactttagggacacttggaatatctttgacttcattacagttataggatctataacagagattattctgacagatagcaagttggtaaacaccagcgggttcaacatgtctttcctcaagctatttcgggctgcgcgcctcatcaagttactgagacagggttatacaatcaggattttgctgtggacattcgtccagtccttcaaagcactcccctacgtatgtctgctgattgcaatgctgttctttatctatgctattatcggaatgcaggtcttcggaaacataaagcttgacgaggaaagtcacattaaccggcacaataattttcgtagttttttcgggagcctgatgttactttttcgctccgcaactggggaagcctggcaggaaattatgttaagttgtctgggcgagaaaggctgcgagccagacacaaccgctcccagtggccagaacgaaaacgaacgttgcggcacagatttagcatacgtgtacttcgtgtcttttatctttttttgtagtttcctcatgctgaatcttttcgtcgctgtgattatggataatttcgaatacttgactagagatagtagtatcctcggaccgcaccaccttgatgagtttgtgcgcgtgtgggccgagtacgatagggcagcttgtggcaggattcactatacggaaatgtacgagatgcttacgttgatgagcccaccgttggggctgggaaagaggtgccccagtaaagtggcttacaagcgcttagtcctgatgaatatgcctgtagcggaggatatgacagttcattttacttcgaccctgatggctctgatcaggaccgcgctcgacattaagatcgccaaagggggcgctgacaggcagcagctagatagtgagctgcagaaggagacactcgccatttggccccacctgtcccagaagatgctagatctgctcgtccctatgccgaaagcttctgacttaactgtgggtaagatctatgccgcaatgatgataatggactactataagcagtccaaagtcaaaaaacagcggcagcagctggaggagcagaaaaatgccccgatgtttcagcgcatggagccttctagcctaccacaagaaattattgctaacgccaaggccttgccctacttacagcaggaccccgtgagtggcctgagcggcaggtcaggttacccgagcatgtcccccctgtccccacaggatatcttccaactggcctgcatggatccagccgacgacgggcaatttcaggagcggcaaagtctggtcgtcacggatccttcctcaatgcgaagatccttttccaccattagagacaaacgaagcaactcgtcttggctggaggagttctcaatggaaagatcttctgaaaacacgtacaagagccgacggcgcagctaccattcctctctcagactgagtgctcatcggcttaactccgattccggccataaatccgacacacaccgcagtggcggcagggagaggggtagatcgaaggaaagaaagcatctcctcagcccagacgtttcacgctgtaactcagaagagcgcggaacccaggccgactgggaaagccctgagcgaaggcagtccagaagtccatcagaggggcgttcgcagacaccaaatcgccagggaaccgggagtttgagtgagagcagcatcccctctgtgagcgacaccagcacaccgcgcagaagtaggcggcaattacctcccgtccctcctaaacctcggccactattatcctattcaagcctcatcagacatgcaggaagtatttcaccaccggctgatggttccgaggagggcagtcctctgactagccaggccttggaatctaacaacgcctgtctgaccgagtcaagcaattctccccacccgcagcagtctcagcacgccagcccccagcggtatatttccgaaccctacttggcccttcacgaggactcacacgctagtgattgtggcgaggaagaaacgctgactttcgaggcagccgtcgcaacttctctggggaggtctaataccatcggctccgcaccgcccttgaggcattcttggcagatgccaaacggtcactatcgcaggcgccgccgcggtggcccaggtccgggcatgatgtgcggcgccgtgaataacctgttatcagacactgaagaggatgacaaatgctag

SEQ ID NO: 14778 - DNA, 5634 bp, Artificial Sequence
  derived and/or modified sequence
atgctggccgaggagaacaagaatgccggcaccagcgccctggaggtgctgcggcgggccaccatcaagaggagcaggacagaggccatgacccgggacagcagtgatgagcactgtgtggacatcagctctgtgggcacccccctggcccgggccagcatcaagagcgccaaggtggatggagtgtcctacttccgccacaaggagcggctgctgcgcatcagcatccgccacatggtgaagagccaggtgttctactggatcgtgctgagcctggtggccctgaacacagcctgtgtggccatcgtgcaccacaaccagccccagtggctgacccacctgctgtactatgcagagttcctgttcctgggcctcttcctgctggagatgagcctgaagatgtatggcatgggcccccggctgtacttccacagcagcttcaactgctttgattttggagtgacagtgggcagcatctttgaggtggtgtgggccatcttccggcccggcaccagctttggcatctctgtgctgcgggccctgcggctgctgcgcatcttcaagatcaccaagtactgggccagcctgaggaacctggtggtgtccctgatgagctccatgaagagcatcatcagcctgctcttcctgctcttcctgttcatcgtggtgtttgccctgctgggcatgcagctgtttggaggccgcttcaacttcaatgatggcacccccagcgccaactttgacaccttccctgctgccatcatgaccgtcttccagatcctgaccggggaggactggaatgaggtgatgtacaacggcatccgcagccagggcggcgtgagcagcggcatgtggagcgccatctacttcatcgtgctgaccctgtttggaaactacaccctgctgaatgtgttcctggccatcgctgtggacaacctggccaatgcccaggagctgaccaaggatgagcaggaggaggaggaggccttcaaccagaagcacgccctgcagaaggccaaggaggtgagccccatgtctgcccccaacatgcccagcattgagcgggacagaagaagaagacaccacatgtccatgtgggagcccaggagcagccacctgcgggagaggagaagaagacaccacatgtctgtgtgggagcagaggaccagccagctgaggaagcacatgcagatgagcagccaggaggccctgaaccgggaggaggcccccaccatgaaccccctgaaccccctgaaccccctgagcagcctgaaccccctgaatgcccaccccagcctgtacagaagaccccgggccatcgagggcctggccctgggcctggccctggagaagtttgaggaggagcgcatcagccggggcggcagcctgaagggagatggaggagacaggagcagcgccctggacaaccagaggacccccctgagcctgggccagcgggagcccccctggctggcccggccctgccacggcaactgtgaccccacccagcaggaggccggcggcggggaggccgtggtgacctttgaggaccgggcccggcaccggcagagccagaggaggagccgccacagaagagtgaggacagagggcaaggagagcagcagcgccagccgcagccgcagcgccagccaggagaggagcctggatgaggccatgcccacagaaggagagaaggaccacgagctgcggggcaaccacggggccaaggagcccaccatccaggaggagcgggcccaggacctgcggaggaccaacagcctgatggtgtcccggggcagcggcctggccggcggcctggatgaagctgacacccccctggtgctgccccaccctgagctggaggtgggcaagcacgtggtgctgacagagcaggagcctgagggcagcagcgagcaggccctgctgggcaatgtgcagctggacatgggccgggtcatcagccagagcgagccagacctgagctgcatcacagccaacacagacaaggccaccacagagagcacctctgtgacagtggccatcccagatgtggaccccctggtggacagcacagtggtgcacatcagcaacaagacagatggagaggccagccccctgaaggaggccgagatcagagaagatgaggaggaggtggagaagaagaagcagaagaaggagaagcgggagaccgggaaggccatggtgccccacagctccatgttcatcttcagcaccaccaaccccatccggcgggcctgccactacatcgtgaacctgcgctactttgagatgtgcatcctgctggtgattgctgccagcagcatcgccctggccgctgaggaccctgtgctgaccaacagcgagaggaacaaggtgctgcgctactttgattatgtgttcaccggggtcttcacctttgagatggtgatcaagatgattgaccagggcctcatcctgcaggacggcagctacttccgggacctgtggaacatcctggactttgtggtggtggtgggcgccctggtggcctttgccctggccatgagcctggagaccaacaagggccgggacatcaagaccatcaagagcctgcgggtgctgcgggtgctgcggcccctgaagaccatcaagaggctgcccaagctgaaggctgtgtttgactgtgtggtgaccagcctgaagaatgtgttcaacatcctgattgtgtacaagctgttcatgttcatctttgctgtgattgctgtgcagctgttcaagggcaagttcttctactgcacagacagcagcaaggacacagagaaggaatgtattggcaactacgtggaccacgagaagaacaagatggaggtgaagggccgggagtggaagagacatgagttccactatgacaacatcatctgggccctgctgaccctcttcaccgtgtccactggagagggctggccccaggtgctgcagcacagcgtggatgtgacagaggaggaccggggccccagccgcagcaacaggatggagatgagcatcttctacgtggtgtactttgtggtgttccccttcttctttgtgaacatctttgtggccctgatcatcatcaccttccaggagcagggcgacaagatgatggaggagtgcagcctggagaagaatgaaagagcctgcatcgactttgccatcagcgccaagcccctgacccgctacatgccccagaacagacacaccttccagtacagagtgtggcactttgtggtgagccccagctttgagtacaccatcatggccatgattgccctgaacacagtggtgctgatgatgaagtactacagcgccccctgcacctatgagctggccctgaagtacctgaacatcgccttcaccatggtgttcagcctggagtgtgtgctgaaggtgattgccttcggcttcctgaactacttccgggacacctggaacatctttgacttcatcaccgtcatcggcagcatcacagagatcatcctgacagacagcaagctggtgaacaccagcggcttcaacatgtccttcctgaagctgttccgggccgcccggctcatcaagctgctgcggcagggctacaccatccgcatcctgctgtggacctttgtgcagagcttcaaggccctgccctacgtgtgcctgctgattgccatgctgttcttcatctatgccatcatcggcatgcaggtgtttggaaacatcaagctggatgaggagagccacatcaacagacacaacaacttccgctccttcttcggcagcctgatgctgctcttccgcagcgccaccggggaggcctggcaggagatcatgctgagctgcctgggggagaagggctgtgagccagacaccacagcccccagcggccagaatgaaaatgaaagatgtggcacagacctggcctacgtgtactttgtgtccttcatcttcttctgcagcttcctgatgctgaacctgtttgtggccgtcatcatggacaactttgagtacctgacccgggacagcagcatcctgggcccccaccacctggatgaatttgtgcgggtgtgggccgagtatgacagagctgcctgtggccgcatccactacacagagatgtatgagatgctgaccctgatgagcccccccctgggcctgggcaagcgctgccccagcaaggtggcctacaagaggctggtgctgatgaacatgcctgtggccgaggacatgacagtgcacttcaccagcaccctgatggccctgatcagaacagccctggacatcaagatcgccaagggcggcgctgaccggcagcagctggacagcgagctgcagaaggagaccctggccatctggccccacctgagccagaagatgctggacctgctggtgcccatgcccaaggccagtgacctgactgtgggcaagatctatgctgccatgatgatcatggactactacaagcagagcaaggtgaagaagcagaggcagcagctggaggagcagaagaatgcccccatgttccagaggatggagcccagcagcctgccccaggagatcatcgccaatgccaaggccctgccctacctgcagcaggaccctgtgtctggcctgagcggccgcagcggctaccccagcatgagccccctgagcccccaggacatcttccagctggcctgcatggaccctgcagatgatggccagttccaggagcggcagagcctggtggtgacagaccccagctccatgaggaggagcttcagcaccatccgggacaagaggagcaacagctcctggctggaggagttctccatggagaggagcagcgagaacacctacaagagcagaagaagaagctaccacagcagcctgcggctgagcgcccaccggctgaacagcgacagcggccacaagagtgacacccacaggtctgggggccgggagcggggccgcagcaaggagaggaagcacctgctgagcccagatgtgagccgctgcaacagcgaggagcggggcacccaggccgactgggagagccctgagcggcggcagagccgcagccccagcgagggccgcagccagacccccaaccggcagggcaccggcagcctgtctgagagcagcatccccagcgtgtctgacaccagcaccccaagaagaagccggcggcagctgccccctgtgccccccaagccccggcccctgctgagctacagcagcctcatcagacatgctggcagcatcagccccccagcagatggcagcgaggagggcagccccctgaccagccaggccctggagagcaacaatgcctgcctgacagagagcagcaacagcccccacccccagcagagccagcacgccagcccccagcgctacatcagcgagccctacctggccctgcacgaggacagccacgccagtgactgtggggaggaggagaccctgacctttgaggccgctgtggccaccagcctgggccgcagcaacaccatcggcagcgccccacccctgcggcacagctggcagatgcccaacggccactacagaagaagaagaagaggaggccctggccctggcatgatgtgtggggctgtgaacaacctgctgagtgacacagaagaagatgacaagtgctag

SEQ ID NO: 14779 - DNA, 6813 bp, Artificial Sequence
  derived and/or modified sequence
atggccaggtttggagaggccgtggtggcccggcccggcagcggagatggagacagcgaccagagcaggaaccggcagggcacccctgtgcctgccagcggccaggccgccgcctacaagcagaccaaggcccagagggcccggaccatggccctgtacaaccccatccctgtgcggcagaactgcttcaccgtgaacagaagcctcttcatctttggagaggacaacatcgtgaggaaatatgccaagaagctgattgactggcccccatttgagtacatgatcctggccaccatcatcgccaactgcatcgtgctggccctggagcagcacctgcctgaagatgacaagacccccatgagccggcggctggagaagacagagccctacttcatcggcatcttctgctttgaagctggcatcaagatcgtggccctgggcttcatcttccacaagggcagctacctgagaaatggctggaatgtgatggacttcatcgtggtgctgagcggcatcctggccacagctggcacccacttcaacacccacgtggacctgcggaccctgcgggctgtgcgggtgctgcggcccctgaagctggtgtctggcatccccagcctgcagatcgtgctgaagagcatcatgaaggccatggtgcccctgctgcagatcggcctgctgctcttctttgccatcctgatgtttgccatcatcggcctggagttctacagcggcaagctgcaccgggcctgcttcatgaacaacagcggcatcctggagggctttgaccccccccacccctgtggggtgcagggctgcccagctggctatgagtgcaaggactggattggccccaatgatggcatcacccagtttgacaacatcctgtttgctgtgctgactgtgttccagtgcatcaccatggagggctggaccaccgtgctgtacaacaccaatgatgccctgggcgccacctggaactggctgtacttcatccccctcatcatcatcggcagcttctttgtgctgaacctggtgctgggcgtgctgtctggagaatttgccaaggagcgggagcgggtggagaacagaagagccttcatgaagctgcggcggcagcagcagatcgagcgggagctgaatggctaccgggcctggattgacaaggccgaggaggtgatgctggccgaggagaacaagaatgccggcaccagcgccctggaggtgctgcggcgggccaccatcaagaggagcaggacagaggccatgacccgggacagcagtgatgagcactgtgtggacatcagctctgtgggcacccccctggcccgggccagcatcaagagcgccaaggtggatggagtgtcctacttccgccacaaggagcggctgctgcgcatcagcatccgccacatggtgaagagccaggtgttctactggatcgtgctgagcctggtggccctgaacacagcctgtgtggccatcgtgcaccacaaccagccccagtggctgacccacctgctgtactatgcagagttcctgttcctgggcctcttcctgctggagatgagcctgaagatgtatggcatgggcccccggctgtacttccacagcagcttcaactgctttgattttggagtgacagtgggcagcatctttgaggtggtgtgggccatcttccggcccggcaccagctttggcatctctgtgctgcgggccctgcggctgctgcgcatcttcaagatcaccaagtactgggccagcctgaggaacctggtggtgtccctgatgagctccatgaagagcatcatcagcctgctcttcctgctcttcctgttcatcgtggtgtttgccctgctgggcatgcagctgtttggaggccgcttcaacttcaatgatggcaccccatctgccaactttgacaccttccctgctgccatcatgacagtgttccagatcctgactggagaggactggaatgaggtgatgtacaacggcatccgcagccagggcggcgtgagcagcggcatgtggagcgccatctacttcatcgtgctgaccctgtttggaaactacaccctgctgaatgtgttcctggccatcgctgtggacaacctggccaatgcccaggagctgaccaaggatgagcaggaggaggaggaggccttcaaccagaagcacgccctgcagaaggccaaggaggtgagccccatgtctgcccccaacatgcccagcattgaaagagacagaagaagaagacaccacatgtccatgtgggagcccaggagcagccacctgcgggagaggagaagaagacaccacatgtctgtgtgggagcagaggaccagccagctgaggaagcacatgcagatgagcagccaggaggccctgaaccgggaggaggcccccaccatgaaccccctgaaccccctgaaccccctgagcagcctgaaccccctgaatgcccaccccagcctgtaccgccggccccgggccatcgagggcctggccctgggcctggccctggagaagtttgaggaggagcgcatcagcagaggaggcagcctgaagggagatggaggagacaggagcagcgccctggacaaccagaggacccccctgagcctgggccagcgggagcccccctggctggcccggccctgccacggcaactgtgaccccacccagcaggaggccggcggcggggaggccgtggtgacctttgaagatcgggcccggcaccggcagagccagaggaggagccgccaccggcgggtgaggacagagggcaaggagagcagcagcgccagccgcagccgcagcgccagccaggagaggagcctggatgaggccatgcccacagaaggagagaaggaccacgagctgcggggcaaccacggggccaaggagcccaccatccaggaggagcgggcccaggacctgcggaggaccaacagcctgatggtgtcccggggcagcggcctggccggcggcctggatgaggccgacacccccctggtgctgccccaccctgagctggaggtgggcaagcacgtggtgctgacagagcaggagcctgagggcagcagcgagcaggccctgctgggcaatgtgcagctggacatgggccgggtcatcagccagagcgagccagacctgagctgcatcacagccaacacagacaaggccaccacagagagcacctctgtgacagtggccatcccagatgtggaccccctggtggacagcacagtggtgcacatcagcaacaagacagatggagaggccagccccctgaaggaggccgagatccgggaggatgaggaggaggtggagaagaagaagcagaagaaggagaagcgggagaccgggaaggccatggtgccccacagctccatgttcatcttcagcaccaccaaccccatcagaagagcctgccactacatcgtgaacctgcgctactttgagatgtgcatcctgctggtgattgctgccagcagcatcgccctggccgcagaagatcctgtgctgaccaacagcgagaggaacaaggtgctgcgctactttgattatgtgttcaccggggtcttcacctttgagatggtgatcaagatgattgaccagggcctcatcctgcaggacggcagctacttccgggacctgtggaacatcctggactttgtggtggtggtgggcgccctggtggcctttgccctggccaatgccctgggcaccaacaagggccgggacatcaagaccatcaagagcctgcgggtgctgcgggtgctgcggcccctgaagaccatcaagaggctgcccaagctgaaggctgtgtttgactgtgtggtgaccagcctgaagaatgtgttcaacatcctgattgtgtacaagctgttcatgttcatctttgctgtgattgctgtgcagctgttcaagggcaagttcttctactgcacagacagcagcaaggacacagagaaggagtgcatcggcaactacgtggaccacgagaagaacaagatggaggtgaagggccgggagtggaagagacatgagttccactatgacaacatcatctgggccctgctgaccctcttcaccgtgtccactggagagggctggccccaggtgctgcagcacagcgtggatgtgacagaagaagatcggggccccagccgcagcaacaggatggagatgagcatcttctacgtggtgtactttgtggtgttccccttcttctttgtgaacatctttgtggccctgatcatcatcaccttccaggagcagggcgacaagatgatggaggagtgcagcctggagaagaatgaaagagcctgcatcgactttgccatcagcgccaagcccctgacccgctacatgccccagaacagacacaccttccagtacagagtgtggcactttgtggtgagccccagctttgagtacaccatcatggccatgattgccctgaacacagtggtgctgatgatgaagtactacagcgccccctgcacctatgagctggccctgaagtacctgaacatcgccttcaccatggtgttcagcctggagtgtgtgctgaaggtgattgccttcggcttcctgaactacttccgggacacctggaacatctttgacttcatcaccgtgattggcagcatcacagagatcatcctgacagacagcaagctggtgaacaccagcggcttcaacatgtccttcctgaagctgttccgggccgcccggctcatcaagctgctgcggcagggctacaccatccgcatcctgctgtggacctttgtgcagagcttcaaggccctgccctacgtgtgcctgctgattgccatgctgttcttcatctatgccatcatcggcatgcaggtgtttggaaacatcaagctggatgaggagagccacatcaacagacacaacaacttccgctccttcttcggcagcctgatgctgctcttccgcagcgccactggagaggcctggcaggagatcatgctgagctgcctgggggagaagggctgtgagccagacaccacagcccccagcggccagaatgaaaatgaaagatgtggcacagacctggcctacgtgtactttgtgtccttcatcttcttctgcagcttcctgatgctgaacctgtttgtggccgtcatcatggacaactttgagtacctgacccgggacagcagcatcctgggcccccaccacctggatgaatttgtgcgggtgtgggccgagtatgaccgggccgcctgtggccgcatccactacacagagatgtatgagatgctgaccctgatgagcccccccctgggcctgggcaagcgctgccccagcaaggtggcctacaagaggctggtgctgatgaacatgcctgtggccgaggacatgacagtgcacttcaccagcaccctgatggccctgatcagaacagccctggacatcaagatcgccaagggcggcgctgaccggcagcagctggacagcgagctgcagaaggagaccctggccatctggccccacctgagccagaagatgctggacctgctggtgcccatgcccaaggccagtgacctgactgtgggcaagatctatgctgccatgatgatcatggactactacaagcagagcaaggtgaagaagcagaggcagcagctggaggagcagaagaatgcccccatgttccagaggatggagcccagcagcctgccccaggagatcatcgccaatgccaaggccctgccctacctgcagcaggaccctgtgtctggcctgagcggccgcagcggctaccccagcatgagccccctgagcccccaggacatcttccagctggcctgcatggaccctgcagatgatggccagttccaggagcggcagagcctggtggtgacagaccccagctccatgagaagaagcttcagcaccatccgggacaagaggagcaacagctcctggctggaggagttctccatggagaggagcagcgagaacacctacaagagcagaagaagaagctaccacagcagcctgcggctgagcgcccaccggctgaacagcgacagcggccacaagagtgacacccacaggtctgggggccgggagcggggccgcagcaaggagaggaagcacctgctgagcccagatgtgagccgctgcaacagcgaggagcggggcacccaggccgactgggagagccctgagcggcggcagagccgcagccccagcgagggccgcagccagacccccaaccggcagggcaccggcagcctgtctgagagcagcatccccagcgtgtctgacaccagcaccccccggcgcagccggcggcagctgccccctgtgccccccaagccccggcccctgctgagctacagcagcctcatcagacatgctggcagcatcagccccccagcagatggcagcgaggagggcagccccctgaccagccaggccctggagagcaacaatgcctgcctgacagagagcagcaacagcccccacccccagcagagccagcacgccagcccccagcgctacatcagcgagccctacctggccctgcacgaggacagccacgccagtgactgtggggaggaggagaccctgacctttgaagctgctgtggccaccagcctgggccgcagcaacaccatcggcagcgccccacccctgcggcacagctggcagatgcccaacggccactacagaagaagaagaagaggaggccctggccctggcatgatgtgtggggctgtgaacaacctgctgagtgacacagaggaggatgacaagtgctag

SEQ ID NO: 14780 - DNA, 5634 bp, Artificial Sequence
  derived and/or modified sequence
atgctggccgaggagaacaagaacgccggcaccagcgccctggaggtgctgcgaagagctacgataaagaggtcccgcacagaagcaatgacgcgtgactcatcggacgaacattgcgtcgacataagttctgtcggaactccgctggccagggcctctatcaaatctgcaaaagttgatggggtaagctattttcgacataaggagcggctgttacgaatctctatccgtcatatggtgaaaagccaggtgttctattggatagtcctctctttggttgccttgaataccgcttgcgttgctattgtgcatcataaccagccccaatggctcactcacctgctgtactatgccgaattcctatttctcggcctgttcctgctcgaaatgtcactcaagatgtacgggatgggtcctaggttatattttcattcttccttcaattgtttcgacttcggtgttactgttggttccatattcgaggtggtctgggccatctttcggccaggtacctcctttggcatctctgtgcttagagctctgcgtctgctgcggatttttaagatcactaagtactgggcttccctcaggaacttggtggtgtcattgatgtcctccatgaagtcaatcataagtctactgttcctcctctttttgtttatcgtggtgttcgccttactaggcatgcaactctttggggggcgttttaattttaatgacgggaccccttccgcgaacttcgacacattcccagccgcaatcatgacggtatttcaaatccttactggggaagattggaacgaagtgatgtacaatggcatcaggtcccagggaggagtttccagcggcatgtggagcgctatctacttcattgtgcttacactcttcggtaactacacactgctcaacgtttttctggcaattgccgtggataacctggctaatgcccaggagctgacaaaggacgaacaggaagaggaagaggccttcaaccagaaacatgctcttcagaaagctaaagaggtcagccccatgtcagccccaaatatgccctctattgagagagatagacgccggcgccaccatatgtccatgtgggaaccacgctcatcacatcttagagaaaggcgccgcagacatcacatgagtgtgtgggagcagagaacttcacagctccgcaaacacatgcaaatgtcaagccaagaagctcttaaccgcgaggaagctccgaccatgaatccgctgaatccccttaaccccctttcctctcttaatccgctgaacgctcacccttcactgtatcgcaggccaagggccatcgagggcctggccctgggtttggccctcgagaagtttgaggaggaacgaattagtagaggaggaagcctcaagggtgatggaggagacagatcgtctgctttagacaatcaaaggacgccactgtccctggggcaacgagaacccccctggctagcacgcccctgtcacggaaactgcgatcctacacagcaggaggcggggggaggcgaagcagtggtgacgttcgaggatcgtgcaagacaccggcaaagtcagcggcgatctagacaccggagggtgaggaccgaggggaaggaatccagcagtgcttcacggtcccggtctgccagccaggagcgaagtctggatgaggctatgccaacggaaggcgaaaaagaccacgagctaaggggaaatcacggtgctaaggagcctacaatccaagaggaacgggctcaggacctcagaagaaccaatagtcttatggtttcgagagggagcggcctcgccggcggactcgatgaggcagatacgcctcttgtactgccacatcccgagctcgaggtgggtaaacatgttgtgctcaccgagcaggagcctgaggggagctctgaacaagccctactcggaaatgtgcagctagacatgggccgcgtgatcagccagtcagagcccgatctgagctgtatcactgccaataccgataaagcaaccacagaatctacctctgtaactgtcgcgatccctgacgtcgacccactggtggattccactgtggttcatattagtaataagaccgatggagaggcctcccccctgaaggaagctgaaatacgtgaggatgaagaagaagtggagaagaaaaagcagaaaaaagagaagcgcgagaccggcaaagctatggtgcctcatagctcaatgtttattttctccacaaccaatcctatcaggagggcatgtcattatattgttaatctcaggtatttcgagatgtgtatcctgctggtgatagcagccagctctatagccctggccgcagaggacccagtgctgacgaactccgaaagaaacaaagtactccgttactttgactacgtgtttacgggtgttttcactttcgagatggtcatcaaaatgattgaccagggccttattctccaggacggttcttactttcgggatctttggaatatcctggacttcgttgtcgtcgtgggcgctctggtggcattcgctctagccatgagcctggagacaaataagggcagggatataaagacaattaagtctctgcgggtgctccgtgttctgcgccctctcaaaacaattaaacggctgccaaaactcaaagcggtcttcgactgcgtggtgacgagccttaagaacgttttcaatatactgattgtctataagctgttcatgttcatctttgctgtcatcgcggtccagctcttcaagggcaagtttttctattgtaccgactcctctaaagataccgagaaggagtgcataggtaattacgtggatcacgagaagaacaagatggaggttaaagggcgagagtggaaacggcatgaattccactacgataacattatttgggccctgctcactttatttacagtgtctaccggagaagggtggcctcaggtattgcagcacagcgtcgatgtgactgaagaggataggggaccgtcccggtccaaccgcatggaaatgagcatcttttatgtcgtctactttgtcgtattcccatttttctttgtcaacatctttgtggccttgattattatcacttttcaggagcagggcgacaagatgatggaggaatgctcgttggagaaaaacgagcgtgcatgcattgacttcgccatctcagccaagcccctgacacgttacatgccccagaatcggcataccttccaatatagagtatggcatttcgtggtcagcccgtcatttgaatacaccatcatggccatgatcgctctgaacaccgtcgtgctaatgatgaagtactattctgccccatgtacttacgagctggctctgaagtatctaaacatcgccttcactatggtgttctccctggaatgcgtactgaaagttatcgcttttgggtttcttaattactttcgtgatacttggaacatcttcgacttcatcacggtgattgggagtattacagagattattcttacagattccaagctggtgaatacatctggattcaatatgtcttttcttaagctttttcgcgctgcaagactcatcaagctcctgagacagggttacaccatccgcatcctgctttggacctttgtgcagtcttttaaagccttgccctacgtgtgcctgcttattgccatgttattttttatttacgcgatcatcggcatgcaggtcttcggcaatatcaagctggacgaggaatcacatattaaccggcacaataatttcaggagcttcttcgggtcactgatgctgctcttcaggtccgcaaccggcgaggcatggcaggagatcatgctgtcgtgtctcggcgagaaaggctgcgaaccggataccacagctccttccggccagaatgaaaacgagcgatgcggtaccgatctggcatacgtgtactttgtctccttcatttttttctgttccttcctcatgctaaacctgttcgtggcggtcattatggataatttcgagtacttaaccagggattccagcatcctgggcccgcaccatctggatgagtttgtgcgagtctgggccgaatatgacagagcagcttgtggtaggatacattatactgaaatgtatgagatgctgactttaatgtcacctccactgggcctaggcaaaaggtgccctagtaaggtggcatacaaacggctcgtgctaatgaacatgcctgtggccgaggacatgaccgtgcactttactagcaccctgatggcactgatacgtaccgccctcgacatcaagatcgctaagggaggcgccgataggcagcaattggattccgagctgcagaaggagactcttgccatctggccccatctaagtcaaaagatgttggatctgctggtccctatgccaaaggcatcagacttaaccgtgggaaagatttacgccgcaatgatgattatggattattacaaacaatcaaaagtgaagaagcagagacagcaactcgaggaacagaaaaacgcccctatgttccaaagaatggaacccagcagcctgccccaggaaatcatagcgaatgccaaagccttgccctatctacagcaggatcctgtgagcggcctgtcgggaaggtccggatatccatctatgagccccctctccccccaggacatctttcaactggcgtgtatggatccagccgacgatggtcagttccaggagagacagtccctggtcgttactgacccttcctctatgaggaggagtttcagcaccatcagagataagcgcagcaacagttcctggcttgaagaattctccatggagcgatcgtcagaaaacacttataaatcgagaagacgtagctaccattcgagcttgcgactgtcggcgcacagactgaattccgattctggacacaagtccgacactcatagaagtggcggccgtgagagaggccggtcaaaagagaggaagcacctactctctccagacgtcagtaggtgtaattccgaggagcggggcacacaggccgactgggagtccccggaacgacggcagagtcgatccccaagtgagggccgctctcagacacctaacagacaaggcaccggctctctctccgagagtagcatacccagcgtgtcggatacctcaaccccccgtagaagtcggcgccagctaccccctgtgccaccaaagccccgccctctcctcagctattccagcttgattaggcatgcaggttctattagtccccccgccgatgggtcagaagaagggagccctctgactagccaagcactggaaagtaacaacgcgtgcttaactgagtcttccaactccccgcaccctcagcagtctcagcacgcctcaccacagcgatacatttctgaaccgtatttggctttgcacgaagacagccacgcatctgattgcggggaagaagagacactgacctttgaggccgccgttgcgacatcactcggtcggtcgaacactatcggtagtgcccctcccttacggcattcttggcagatgcctaatggtcattataggagaaggaggcgtgggggccctggtccaggcatgatgtgcggagcagtaaataatctgttatcggacactgaagaagacgacaaatgctag

SEQ ID NO: 14781 - DNA, 6813 bp, Artificial Sequence
  derived and/or modified sequence
atggcccggttcggcgaggccgtggtggcccggcccggcagcggcgacggggattcggatcagagccgcaacaggcaaggaacgcccgtcccagcaagcggacaggccgctgcatataagcaaaccaaggcacagcgcgcccgaactatggcactctataacccaatccccgtgaggcagaactgtttcaccgtgaacaggtccctgtttattttcggtgaggacaacatcgtcagaaaatatgccaagaaactgattgactggcctccatttgagtacatgatcttggccactataattgccaattgcatcgtccttgccctcgagcagcatctccctgaagatgataagaccccaatgtccaggcgcctggaaaagacagaaccgtacttcattgggattttctgttttgaggcagggatcaagatcgtggcactcgggtttatctttcacaaaggttcataccttcgtaacgggtggaacgtaatggactttattgtggtcctctcaggcattttagctaccgccgggacacactttaacactcatgttgatctcaggacactcagggccgtaagagtgctgaggccgctcaagctcgtttccggtatcccgagtcttcagatcgtgcttaagtccatcatgaaagccatggtgcccctcctgcagatcgggttactgctcttcttcgccattttgatgtttgcaataattggtctggagttctatagcggcaaacttcaccgggcttgtttcatgaataattccggcatcctcgagggttttgatcctccccacccctgcggtgtgcagggctgccccgccggctatgagtgcaaagactggatcggcccaaacgatggaatcacccagtttgacaatatcttgttcgccgtcctaaccgtgtttcaatgtattactatggagggctggaccactgtgctgtataacactaatgacgccctgggtgctacatggaattggctgtacttcatccccctgataatcatcggtagcttctttgtgttaaatctcgtcttgggcgtcctgtccggagaattcgccaaggagcgcgagcgtgtggagaatcgacgcgcttttatgaagcttcgccggcagcagcagattgagagggaactgaacgggtatcgagcttggatcgataaggccgaggaagtcatgttagccgaagagaataagaatgccgggacctctgcactggaggttctccgcagggctacgattaaacgaagtcggactgaggcgatgacgagggactcatctgatgagcattgcgtggatataagctctgtcgggaccccactggctcgggcgtccattaagtcggcaaaggtcgacggcgtgagctatttcaggcataaggagcggctgctccgaatttcaatcaggcatatggtcaagagccaagtattctattggatagtcctgagtttagtcgccttaaatacagcttgtgtggccatcgtccaccataaccagccgcagtggcttacccacctgctatattacgcagagttcctgtttctgggtttgtttctgctggaaatgtctctaaagatgtacgggatgggccctcggctgtatttccacagctcgtttaactgctttgacttcggagtgaccgtaggcagcatctttgaagtggtctgggccatttttcgccctgggacgtctttcggcattagcgtcctgcgggctctgcgtttgttgaggatcttcaaaatcaccaagtattgggcctcattgcggaacctggtagtctctctgatgtctagcatgaagagcataatctccctactgttcctcctgttcctgttcatcgttgtgttcgcgttgctcgggatgcagctatttggcggcagatttaactttaacgatgggacgcctagtgccaatttcgacacatttcccgcagccatcatgaccgtgttccaaatcctgacaggcgaggattggaacgaagtgatgtataacggcataagaagccagggtggtgtatcttccggcatgtggagtgccatatatttcatcgtgctcaccctgttcggcaactatacactgttgaacgtgttcttggccatcgcagttgataaccttgctaatgctcaggagctgacaaaagacgagcaggaggaggaggaggcctttaatcagaaacatgcactgcagaaagccaaggaggtgtcacccatgagtgcacctaatatgccgtccatcgagcgcgaccggaggcgacgccaccatatgagcatgtgggaacctcgcagcagccatctccgagaaagaagaaggcgacaccatatgtcagtgtgggaacaacgcacttcacagctccgaaaacatatgcagatgagtagccaagaagcgcttaatagggaagaggccccgacaatgaacccgctgaatcccctgaatccactcagctcccttaatcccctgaacgcacatccatcattatatagacgacccagagccatcgagggtctggccctcggcctggcgctggaaaaattcgaagaagagaggatttccagggggggatccttgaagggagatggcggagacaggagttccgcactggacaatcaacgtacccctctgtctttaggtcagcgcgaaccaccatggttagctcgtccgtgccatggaaattgcgatcccacccagcaagaagcaggcgggggtgaggccgttgtcacattcgaggacagggcccgtcataggcagagccaacggcgatccagacaccggagggtgaggaccgagggcaaggagagctcctccgccagtcgatctcggtccgcaagccaggagagaagcctcgacgaggccatgcctactgaaggcgaaaaagatcatgagttgaggggcaatcatggcgcaaaagagcctactattcaggaagagagagcccaagatctgcgcaggacaaattccctgatggtgagtcggggatcaggactggcaggtggtctggatgaagccgacacacctttagtgcttccgcaccctgagctcgaggtgggaaaacacgtagtgctgaccgagcaagaacccgagggaagctccgagcaggccctgcttgggaatgttcagcttgatatgggccgagtaatctcccagagcgagcctgacctgagctgtattacagccaatacagacaaggccacaactgaaagcacatccgtcacggtcgctatacctgacgttgatccactcgtggattctaccgtcgtgcatatttctaacaagacagacggggaggccagccctctaaaggaggccgaaattcgcgaagacgaggaggaagtggagaagaagaagcaaaaaaaagaaaagcgcgaaaccggtaaagctatggtcccacacagttctatgttcatcttttccacaacaaatccgattcggcgcgcttgccattatatcgttaacctgagatatttcgagatgtgcattttgctggtgatcgctgcctcttccatcgctctggcggcggaggacccggtgctcactaattccgagcggaacaaggtcttacgctattttgattacgttttcacaggcgtgttcacatttgaaatggtaattaaaatgatcgatcaggggctcatactgcaggacggcagctatttcagagacttgtggaatatcctcgatttcgtggtggtggtgggcgccttggtggcgttcgcactggccaatgctctgggcacaaataagggcagagatatcaagacgataaaaagcctccgagtgctcagagtattgagacctcttaagactatcaagcgtttgccgaagctgaaagccgtgtttgattgcgtggtgacatccctgaaaaacgtgtttaacatcctcatcgtgtacaagctcttcatgtttatatttgccgtgatcgccgttcagctgttcaaggggaaattcttctattgcactgattcttcaaaggataccgagaaagaatgcataggcaactacgtggatcatgagaaaaataagatggaagttaagggcagggaatggaagcgccacgaattccactacgataacatcatatgggctttactcacccttttcactgtctctacaggcgagggctggccacaggtgttgcaacatagcgtagacgtgactgaagaggaccggggcccatctaggagcaaccggatggagatgtccatattctatgtggtgtatttcgtggtgttcccattctttttcgtgaatatattcgtggcactgataataatcactttccaggagcaaggggacaagatgatggaagagtgttctttagagaagaatgaaagagcctgcatcgactttgctattagtgctaaaccccttacccggtatatgcctcagaaccgacatacctttcagtaccgggtctggcattttgtcgtgtctcctagttttgagtatacaataatggcgatgattgcgctcaacaccgtcgtcttaatgatgaagtactactcagccccctgcacatacgaacttgctctgaaatacctgaatatcgccttcacaatggtcttctccctggagtgtgtgctcaaagttattgccttcggatttctgaattacttccgggacacctggaatattttcgacttcatcaccgtgattggttccataaccgaaatcattctaaccgatagtaagcttgttaatacctcaggtttcaatatgagctttcttaagctcttcagagctgcaagactgatcaaactcctaagacaggggtataccattcgaatccttctgtggacattcgttcagtcattcaaggctttgccgtacgtgtgtcttttgatcgcgatgctcttttttatctacgctatcattggcatgcaagtatttggcaacatcaaactagatgaggaaagccatatcaacagacacaataactttcgcagctttttcggaagtttaatgttacttttccggtctgctactggagaggcatggcaggagatcatgctgagttgtctcggtgaaaaaggatgtgagcccgacaccactgctccctccggccaaaacgaaaacgaacggtgcggcactgatttggcatacgtatactttgtctcatttatcttcttctgttcctttctcatgctcaacttgttcgtggccgtaatcatggataacttcgagtacctcactcgtgattcttcaattctcggacctcaccacctggatgagtttgtgagggtgtgggctgagtatgacagggctgcctgcggccgaatccactatactgagatgtacgagatgttaaccctgatgtctcccccacttggacttgggaagagatgtcccagcaaggttgcatataagaggctggtcctgatgaacatgcctgtggctgaggatatgaccgtccactttaccagcacactgatggccttgattcggacagcacttgatataaagattgccaaaggcggcgccgaccgccaacagctagattccgagttgcaaaaggaaacattggcgatttggcctcatttgtctcagaagatgctggatttgctagtgccgatgccaaaggcctctgacctgaccgtcggcaaaatctatgccgcgatgatgatcatggactattacaaacagtccaaagtgaaaaaacaacggcagcagctggaagaacagaagaatgcgccgatgttccagcgaatggagccctccagtctgccccaggagattattgccaatgctaaggcacttccctatctgcaacaagatccagtgtcaggattgagcggccgctctggatatccctccatgtcacctctgagtcctcaggatatttttcagctggcctgcatggatccagctgatgatgggcagttccaggaacgacagtctctggtggtgacagatccatcctcaatgaggaggagcttctcaacaatccgggataaacgtagcaactcctcttggttagaggagtttagtatggagcggtctagcgagaacacctacaaatctcgtcgacgcagctatcattcttctctccgcctctcagcccatagactaaactccgacagtgggcataagtccgatacacaccggtcaggcgggcgggagcgcggtcgcagcaaagaacgcaaacatctgctaagccccgacgtcagcaggtgcaattctgaggaacgtggcactcaggccgattgggagagtccggagcgaagacaatctaggtccccaagtgagggccgatcccaaacccccaataggcagggcactggcagcctgtccgagagctcaatcccttctgtgtccgatacatcaacgccacgcagaagtcgaaggcagctgcctcccgtgcctcctaaacctcgacctctgctctcttattcttcacttatccgccacgcaggctctatttcccctcctgccgatgggtccgaggaaggatcacctcttacctcacaggctctcgaaagtaacaatgcatgcctcaccgagagttccaattcaccacaccctcaacagtctcagcatgcctcaccacagaggtacattagcgaaccttacctcgccttacacgaagatagtcacgccagtgattgtggcgaggaagagacactgacgttcgaggccgccgtcgctacatctctgggccgcagcaacacaatcggatctgctcctccactgcgtcatagttggcagatgccaaatggacattaccggagaaggagaagggggggacccggccccggaatgatgtgcggcgccgtgaataatttgcttagcgacactgaggaggatgacaaatgctag

SEQ ID NO: 14782 - DNA, 5633 bp, Artificial Sequence
  derived and/or modified sequence
atgcttgctgaggaaaataaaaatgctgggacatcagccctcgaggtgctccggagggccaccatcaagagaagcaggactgaagccatgacccgcgactcgagtgatgagcactgcgtagatatatcaagcgtggggacgcctctcgcccgtgccagtatcaagtctgccaaggtggatggggtgtcatatttccgccacaaggagaggctcttgcggatttccatcaggcacatggttaagagtcaggtgttctattggattgtcctgtctctcgtggcccttaataccgcttgtgtggcaatcgtccatcacaatcaacctcagtggttgactcacctcctctattacgcagaattcctttttcttggcctgttcctgctggagatgtctctaaagatgtatggtatgggaccaagattgtactttcactcctcttttaattgcttcgattttggggtgactgtcggcagtatcttcgaggtcgtgtgggctatttttaggcccggaacatctttcggcattagtgtcctcagagccctgcggctactgcgaattttcaagataacgaaatattgggcttccctccgcaatcttgtggtctctcttatgagtagcatgaaatcaatcatttctctgttgttcttgctcttcttgttcattgtggtctttgccctcctgggaatgcaacttttcggaggcagatttaattttaacgatgggaccccgtccgccaacttcgacacttttcccgctgcaattatgactgtgtttcagatcctcacaggagaggactggaatgaggtgatgtataacggcattagaagtcagggcggagtgagctcaggcatgtggtcagccatttactttatagtcctgactttgtttggaaactacacccttcttaacgtgtttcttgccattgctgtggataacctggccaatgctcaggagttaaccaaggatgaacaagaagaagaagaggcatttaatcagaagcacgccctccaaaaagcaaaagaggtgtcacccatgtccgctcccaatatgcccagcatcgagagggacagacgtcgccgacaccatatgagcatgtgggaacctcggtcctctcacttacgggagagacgtcgacggcatcatatgtccgtctgggagcaaaggacaagccagctgcgaaagcacatgcaaatgtcgtcacaggaggccctgaatcgcgaagaggctccaaccatgaaccccctcaacccccttaatccgcttagctctttgaacccactaaatgcccatcccagcctgtaccggcgtcctcgggcaatcgagggccttgcgctgggccttgcattggagaagtttgaagaagagcgcatttcacgagggggttcactgaagggcgatggcggagacaggtcaagcgcgctggacaatcagagaacccccctgtcactcgggcagcgcgaacccccttggctcgctagaccctgccatggtaattgcgaccccacccaacaggaggcaggtggaggagaagccgttgtgacatttgaggatagggctagacacaggcaaagccagcgcaggtctaggcaccgccgtgtccgcaccgagggtaaagagtctagctcggcctctaggtctcggtcagcaagtcaggaaagaagcctcgacgaggctatgccaactgagggggagaaagaccacgagctgcgaggcaatcacggtgccaaggagcctacaatacaagaggagagagcgcaggatttgcggagaaccaatagtttgatggtgtcccgagggtccggacttgcgggtggcctggacgaggccgacactcccctcgtccttccgcaccctgagttggaggtgggcaagcacgtggttctgaccgaacaagagcctgaaggctcatccgaacaggccttgttgggaaacgtgcagctggatatgggcagagtaatctcccaatccgagcccgatttatcctgtatcaccgccaataccgacaaggcgaccaccgagtccacttctgtgacagtggcgattcccgacgtcgaccctcttgttgactctaccgtcgtgcacatcagtaacaagacagatggcgaggccagtcctttaaaagaggccgagatccgggaggatgaagaagaagttgagaaaaaaaagcagaagaaggagaagagggagacgggcaaagcaatggtcccccattcgtctatgttcatattctcaacaactaaccccatacgcagggcatgccactacatcgtgaacttacggtatttcgagatgtgcattctgttggtcattgctgcatcttctatagccctggcagcggaggaccctgtcctgactaattcagaaagaaacaaagtgttgagatactttgactacgtcttcacaggcgtattcactttcgagatggtcattaagatgatagatcagggcctaatcctacaggatggcagttactttcgcgatctttggaacattttggatttcgtcgtagtggtgggtgcccttgtggcctttgctctagccatgtcccttgaaaccaataaaggaagagacatcaaaacaatcaagagcctgcgggtgctccgcgtacttagacccctgaaaaccattaagcgcctacctaagctgaaagcggtctttgactgcgtggtgacgtctctgaagaatgtgttcaacattcttatcgtttataagctgttcatgttcatctttgctgtgattgccgtgcagctatttaagggcaagtttttctattgcaccgacagtagtaaggataccgagaaagagtgcatcggcaactatgtagaccatgaaaagaataaaatggaagtaaagggcagggaatggaagaggcacgagttccactatgacaacataatttgggcactgctcaccctgtttaccgttagcaccggagaaggttggcctcaagtgttgcagcacagcgtggatgtgactgaggaagaccgtgggccttccaggtccaaccggatggagatgtccattttctatgtggtgtattttgtcgttttcccctttttcttcgtgaatatctttgtggcccttatcattatcacttttcaggagcagggcgataagatgatggaagagtgttccttggagaaaaacgagcgcgcttgtattgattttgccattagtgcgaaacctctgacaagatacatgcctcagaataggcatacattccagtatagagtgtggcacttcgtcgtcagtccatccttcgagtacaccatcatggcaatgatcgcactgaacactgtggtcctgatgatgaaatactactcggcaccttgcacatacgagctagccctgaaatatctaaacattgcgttcaccatggtgttctctctcgagtgcgtactgaaggtcatcgcatttgggtttctgaattacttcagagacacctggaatatttttgacttcatcacggttatcggcagcattactgagatcatacttaccgatagcaaactggtgaatacatctgggtttaacatgagtttccttaagctgtttagagctgcccgtctaattaaactgctgcgtcaaggctataccatccgcatcctcctgtggacatttgtccagagcttcaaggcactgccctatgtctgcctgctcatcgcaatgctgtttttcatctatgctattatcgggatgcaggtcttcggaaatataaagctggacgaagagagccacataaaccggcacaacaattttcggtccttcttcgggagtttgatgctactgtttcgttctgccacaggggaagcctggcaggagatcatgctctcatgtctgggcgagaaaggatgtgagcccgacacgacagccccatcaggtcagaacgagaatgagcgatgtggcacggatctcgcttatgtttatttcgtctcatttatcttcttctgcagttttctgatgctgaacttgtttgttgcagtgataatggataactttgagtacttgacaagagactccagtatattaggaccacatcaccttgatgagtttgtccgcgtgtgggccgaatacgatagagcagcttgcggacggatccactatacggagatgtatgagatgctcactctgatgtctcctcctctaggactcggaaagcgctgcccgagcaaggtagcatacaaaaggctcgtgctcatgaacatgcctgtggcagaggatatgacagtgcattttacatccacgctgatggccctgatccggacggccctcgacatcaagatcgccaaaggcggtgctgaccggcagcaactggattctgagctacagaaagaaacactcgccatatggcctcatctctcccagaagatgctggacctacttgtgcccatgcccaaagcctcagatctcacagttgggaaaatctatgctgcaatgatgattatggactattataagcagagcaaagttaagaaacagcgacaacagcttgaagaacagaagaatgcaccaatgttccagcggatggaaccatctagcctgccccaggagattatcgcaaatgctaaagccctcccttacctgcagcaggaccctgtgagcgggctatccggacgcagtggttatccttcaatgtctcccctgtctcctcaggatatttttcaactggcttgcatggacccagctgacgatgggcagtttcaagaacgacagtcacttgtcgtgactgatccgagttccatgcgtcggagcttctctaccatacgcgataaacgctcaaacagtagttggttagaagagttttccatggagcgatcttcagaaaatacctacaagagccgcaggaggtcttaccactctagcctccgattgtctgctcatagattgaactctgactcgggacataagagcgatacccacagatcagggggtcgcgaacggggaaggtccaaagagaggaagcatctcctatcaccagacgttagtcggtgtaacagcgaggagcggggtacacaggccgactgggagtcccccgagcgccgacaaagtaggagtccctctgagggccgatcacagacaccaaatcgacaggggacgggttcactgagcgagtcatccattccgtctgtgtccgacaccagcacaccacgccgttcccggcgtcaacttccgccagtcccgccaaaaccacgcccacttctgtcatactccagtctgatcagacatgcaggaagcatctccccccctgctgatggcagtgaagaagggagtccactaacttctcaagcccttgagtccaataatgcctgtctcacagaatcttcaaatagccctcacccacagcagtctcagcacgcctcacctcagcggtatatctcagaaccctatctagctctgcacgaggacagccacgcatctgactgtggtgaggaggaaacactcacatttgaagccgctgtcgcaacatctttaggtcgttccaatactatcggttcagctcctcccttaagacactcttggcaaatgccgaacgggcactataggagacggaggcgtggcggtcccggtcccggaatgatgtgcggggcagtcaacaacctcctgagcgatacagaggaagacgataaatgcta

SEQ ID NO: 14783 - DNA, 6812 bp, Artificial Sequence
  derived and/or modified sequence
atggcccgattcggcgaggctgtggtagctcgacctgggagtggcgacggggactccgaccagagtcgaaaccggcaaggtacgcctgtgccggcttcgggtcaggccgctgcatataaacaaacaaaagcacaaagggctcggacaatggccttatacaatcctattcccgtgagacagaactgtttcaccgtgaataggtccctgttcatattcggagaagataatatcgtgaggaagtatgctaagaaactgatagactggcccccattcgagtacatgatcctggccactataatcgccaattgcatcgtgctcgcgttggagcaacacctgccagaggatgacaagaccccgatgtccagaaggcttgagaaaacagagccctatttcataggcatcttttgttttgaggcgggaattaagatagtggccctgggattcattttccataaagggtcatatctcaggaacggctggaatgtgatggatttcattgttgtgctaagcggaatcttagccacagctggcacacattttaacacgcacgtggacctccggacactgagagctgtgagagttctccgacccctcaagctggtctctggcattccatccctccaaatagtcttgaagagtattatgaaggcaatggtacctcttttacagatcgggttactgctcttcttcgctatcctgatgttcgcaataatagggttggagttctattccggcaagcttcacagagcgtgctttatgaataattccggtattctggaggggtttgatcctcctcacccctgcggcgtgcaaggctgccccgctgggtatgagtgcaaggattggattggccctaacgacgggataacccaattcgacaacatcctttttgctgttctcaccgtatttcagtgtatcaccatggaagggtggactacagttctgtataacactaacgacgccctcggagctacctggaactggctgtatttcattcctctgatcatcatcggcagcttctttgtgctaaaccttgtgctcggcgttctcagcggagagttcgcaaaggaaagggagcgtgttgagaatcggagagcatttatgaagctacgacggcaacagcagatagaacgggaattaaacggatacagagcttggattgacaaggctgaagaagtcatgctggccgaagaaaacaagaatgcaggtacgagtgccctggaggttctccgacgagcaacgatcaagagatcaaggaccgaagccatgacaagagacagcagcgacgaacattgtgtcgatatatccagtgtcggcacacccctcgcccgagccagcattaaaagtgctaaggtggatggagtgagttacttccggcataaagagagattgctgcggatttccattcgacacatggtcaagtcgcaagtgttctattggattgtcctaagcctggttgctctgaacacggcatgcgtggctattgtacaccacaatcaaccccagtggttaactcaccttctttactacgcggaatttctcttccttggcctgtttctgctagagatgtcactcaagatgtacgggatggggcctcgactttatttccatagctcttttaattgctttgattttggcgtcaccgtgggatcaatatttgaagtagtgtgggctatctttcggccaggaaccagctttggaattagcgtgctaagagctctgaggcttctccggattttcaagataacaaaatattgggcaagccttaggaatttggtggtgagcttgatgagttccatgaagagtatcattagcttgttgttcctcctcttccttttcatcgtcgttttcgccctgctgggaatgcagctgttcgggggtagattcaacttcaatgatggaacgcccagcgccaattttgacacattcccggctgcaataatgacagtgtttcaaatactgaccggagaagattggaacgaggttatgtacaatgggatccggtcccaaggtggggtgtcttctgggatgtggagtgctatctattttatagtcttgactctgttcggcaactatacgctgttaaatgtgttccttgcaattgcagttgacaacttggcaaacgctcaggaactgaccaaagacgaacaagaagaagaagaagctttcaaccagaaacatgcgctgcagaaggccaaagaagtgagccccatgagcgccccaaatatgccctcaatcgagcgtgatcggagacggagacatcatatgtctatgtgggagcccagaagttctcatcttcgtgagcggcgtcgtcggcatcatatgtcggtatgggaacagcgcacttcccagctcagaaagcacatgcagatgagctcacaagaggcattgaacagggaggaagctccaacaatgaatcctctgaaccccctgaatcctctgagctccctcaatccactgaacgctcacccatctctgtaccggagacccagagccatcgagggactggcacttggtttggccctcgagaaattcgaagaagagaggatcagtaggggcggatctctgaaaggggacggaggcgatcggtcatccgcgcttgacaaccaaagaactccccttagccttggccagagggagcccccatggctagccaggccctgccacgggaactgcgatcctactcagcaggaagctggcggaggggaggccgttgtgacctttgaggacagagcccgacaccgtcagtctcagcgtagaagccggcatcgccgtgtccgtaccgagggaaaggagagttcctcagcctctcgcagcaggtccgcatcacaggaacgcagtctagacgaagccatgcctaccgagggggagaaagatcatgaactgcgaggcaaccatggggctaaagagcctactatccaggaagaaagagcccaggatctccggagaaccaactcgcttatggtgagcagggggtctggcctggctggtggcctcgatgaagctgatacccctctggtgctgcctcacccagaattagaagtgggtaagcatgttgtgctgaccgagcaggagccagaggggtcatcggaacaggccctcctgggcaacgtacagctggacatgggacgggtgatatcccagtcagagcccgacctatcctgcataaccgctaatacagacaaggcgactaccgagtctaccagcgtcacagtggcgatacctgatgttgaccccctagtggattccacagtggttcatattagcaataaaactgatggcgaggcctctccgctaaaagaggccgaaatccgagaagacgaagaagaagtggagaaaaagaaacaaaaaaaggagaaaagggagaccggtaaggcaatggtgccacactcaagtatgtttatcttctccacaacaaaccctattaggcgagcatgtcactatatagtgaacctgcgctattttgagatgtgtattttgctggtaatcgcggcatcatccattgccctcgctgcagaggaccctgtgctgaccaactccgagaggaataaggtactgcgatattttgactacgttttcaccggtgtcttcacttttgagatggtgatcaaaatgatcgatcaggggctgatcttgcaggatggctcttacttcagggatttgtggaacattctcgactttgtagttgttgtcggcgcactagtggcctttgccttggccaatgcactgggcaccaacaagggcagagacatcaaaactatcaagtctcttcgggtgttacgagtgctccgtcctcttaagacaataaagaggctgcccaagctgaaggccgtcttcgattgtgtcgtgacctccctgaaaaacgttttcaacatcctgattgtttacaagctttttatgtttatcttcgccgttatcgcggtccagctgttcaagggaaagtttttttattgtacagattctagtaaagacacagagaaagaatgtattggcaactatgtggatcacgagaaaaataagatggaagtgaaaggaagggaatggaagcgccacgagtttcactacgataacatcatctgggccctcctgacactgttcaccgtgtccactggggaggggtggccacaggtgcttcagcatagcgtggacgttaccgaggaggaccggggaccctcacgttccaataggatggagatgagtatcttttacgtggtctactttgtggtctttccattttttttcgttaatatcttcgtggctcttatcattatcacctttcaagaacagggcgataaaatgatggaagaatgctctcttgagaagaatgagagggcgtgtatcgattttgcaattagcgccaaaccacttacacgctatatgccccagaataggcacactttccagtacagggtgtggcattttgtggtttctcctagtttcgagtatacaatcatggccatgatagctctgaacaccgtggtgctgatgatgaagtattacagcgcgccttgcacctatgagctggcattgaaatatctgaatatagcatttaccatggtgttcagcctggagtgcgttctaaaggttatcgccttcggatttcttaactactttagagatacctggaacattttcgattttatcactgtgatcgggtccatcaccgagatcatcctgactgatagtaagctggtaaacaccagcggcttcaatatgagttttctgaaactcttcagagccgctcgacttatcaaattgctccgccagggatacacaatcagaattctactgtggacatttgtgcagagctttaaagctcttccttatgtgtgcctgctgatcgccatgttgtttttcatttacgctattatcggcatgcaagtcttcggcaatataaaactcgatgaggaaagtcacattaatcgccacaacaattttcgctcattctttggttcgctgatgctgcttttccgctcagccaccggggaggcttggcaggaaatcatgctgtcttgtctgggcgaaaagggctgcgagcccgacactaccgctccctccgggcagaacgagaacgagagatgcggcaccgaccttgcatatgtctacttcgtgagctttatattcttttgctcattccttatgctgaatctttttgtggccgtgataatggacaacttcgaataccttactcgggatagtagtatcctggggcctcatcacctggatgagttcgtgcgcgtctgggcagaatatgatagagctgcttgcggacggatccactatacggagatgtacgaaatgctcacactgatgtccccgccactgggattagggaaacggtgccctagtaaagtagcttacaagagattggttctcatgaatatgcccgttgctgaggacatgacagtgcatttcaccagcaccctgatggctctgatacggacggcactggacatcaagatcgctaagggtggtgcagaccgccaacaactcgattctgagctccaaaaggagaccctcgccatttggccccacttgtcacagaaaatgctggacctcttggtcccgatgccgaaggcttctgatctgacagtcggtaagatttatgctgcaatgatgattatggattactataagcaaagcaaggtgaagaaacagagacagcaactggaggagcagaagaatgctccaatgttccagagaatggaaccttcttccctaccgcaggaaattatagccaatgctaaagcgctcccatacctgcagcaggaccctgtctcaggtctctcaggaagatctggttatcccagcatgagccccctttcaccccaggatatcttccaactggcgtgtatggatccggctgatgacggacaattccaggagagacagtctctagtggttacagacccttcgtctatgcgtcggtccttttccacaatccgggacaaacgaagtaatagcagttggcttgaagaattctccatggagaggtcttccgaaaatacttacaaaagccgcaggagatcttaccactcgagccttcggctgagcgcccatcgattaaatagtgattccggccacaaatctgacacccaccgtagcgggggaagagagcgcggacggtctaaggagcgtaagcacctcctgtctcctgatgtttctcgttgtaatagcgaagagcggggaacacaagccgattgggaatcccccgagagaaggcagagtagatcaccctctgaaggaaggtctcagacacccaataggcagggcaccggcagcttgagcgagagtagcatcccatctgtcagcgacacgtccactccaagaaggtcaaggcggcaactcccgccagtccctcccaagccccgtccccttcttagttattcttccttgattcggcacgccggaagtatctctccccctgctgatggtagcgaggaagggtcccccctcacatcccaggctttagagtctaacaatgcgtgcctgacagaaagttctaattcgccgcaccctcaacagtcgcagcatgcgagccctcaaaggtatatcagcgaaccctatctcgcactacacgaggatagtcatgctagtgattgcggggaagaggagactctaactttcgaggccgcagtggcaacaagtttgggccgatctaacactattggttctgcccctccacttcggcacagttggcagatgccaaatggacattatcgacgcaggcggagagggggacctggccctggaatgatgtgtggggctgtgaataatttgctcagcgatacggaagaagatgataaatgtta

SEQ ID NO: 14784 - DNA, 9719 bp, Artificial Sequence
  derived and/or modified sequence
gctgctgctgcctctccgaagagctcgcggagctccccagaggcggtggtccccgtgcttgtctggatgcggctctgagtctccgtgtgtctttctgcttgttgctgtgtgcgggtgttcggccgcgatcacctttgtgtgtcttctgtctgtttaaacctcaggatggctcgcttcggggaggcggtggtcgccaggccagggtccggcgatggagactcggaccagagcaggaaccggcaaggaacccccgtgccggcctcggggcaggcggccgcctacaagcagacgaaagcacagagggcgcggactatggctttgtacaaccccattcccgtccggcagaactgtttcaccgtcaacagatccctgttcatcttcggagaagataacattgtcaggaaatatgccaagaagctcatcgattggccgccatttgagtacatgatcctggccaccatcattgccaactgcatcgtcctggccctggagcagcatcttcctgaggatgacaagacccccatgtcccgaagactggagaagacagaaccttatttcattgggatcttttgctttgaagctgggatcaaaattgtggccctggggttcatcttccataagggctcttacctccgcaatggctggaatgtcatggacttcatcgtggtcctcagtggcatcctggccactgcaggaacccacttcaatactcacgtggacctgaggaccctccgggctgtgcgtgtcctgcggcctttgaagctcgtgtcagggatacctagcctgcagattgtgttgaagtccatcatgaaggccatggtacctcttctgcagattggccttctgctcttctttgccatcctgatgtttgctatcattggtttggagttctacagtggcaagttacatcgagcatgcttcatgaacaattcaggtattctagaaggatttgacccccctcacccatgtggtgtgcagggctgcccagctggttatgaatgcaaggactggatcggccccaatgatgggatcacccagtttgataacatcctttttgctgtgctgactgtcttccagtgcatcaccatggaagggtggaccactgtgctgtacaataccaatgatgccttaggagccacctggaattggctgtacttcatccccctcatcatcattggatccttctttgttctcaacctagtcctgggagtgctttccggggaatttgccaaagagagagagagagtggagaaccgaagggctttcatgaagctgcggcgccagcagcagattgagcgtgagctgaatggctaccgtgcctggatagacaaagcagaggaagtcatgctcgctgaagaaaataaaaatgctggaacatccgccttagaagtgcttcgaagggcaaccatcaagaggagccggacagaggccatgactcgagactccagtgatgagcactgtgttgatatctcctctgtgggcacacctctggcccgagccagtatcaaaagtgcaaaggtagacggggtctcttatttccggcacaaggaaaggcttctgcgcatctccattcgccacatggttaaatcccaggtgttttactggattgtgctgagccttgtggcactcaacactgcctgtgtggccattgtccatcacaaccagccccagtggctcacccacctcctctactatgcagaatttctgtttctgggactcttcctcttggagatgtccctgaagatgtatggcatggggcctcgcctttattttcactcttcattcaactgctttgattttggggtcacagtgggcagtatctttgaagtggtctgggcaatcttcagacctggtacgtcttttggaatcagtgtcttgcgagccctccggcttctaagaatatttaaaataaccaagtattgggcttccctacggaatttggtggtctccttgatgagctcaatgaagtctatcatcagtttgcttttcctcctcttcctcttcatcgttgtctttgctctcctaggaatgcagttatttggaggcaggtttaactttaatgatgggactccttcggcaaattttgataccttccctgcagccatcatgactgtgttccagatcctgacgggtgaggactggaatgaggtgatgtacaatgggatccgctcccagggtggggtcagctcaggcatgtggtctgccatctacttcattgtgctcaccttgtttggcaactacacgctactgaatgtgttcttggctatcgctgtggataatctcgccaacgcccaggaactgaccaaggatgaacaggaggaagaagaggccttcaaccagaaacatgcactgcagaaggccaaggaggtcagcccgatgtctgcacccaacatgccttcgatcgaaagagacagaaggagaagacaccacatgtcgatgtgggagccacgcagcagccacctgagggagcggaggcgccggcaccacatgtccgtgtgggagcagcgtaccagccagctgaggaagcacatgcagatgtccagccaggaggccctcaacagagaggaggcgccgaccatgaacccgctcaaccccctcaacccgctcagctccctcaacccgctcaatgcccaccccagcctttatcggcgacccagggccattgagggcctggccctgggcctggccctggagaagttcgaggaggagcgcatcagccgtggggggtccctcaagggggatggaggggaccgatccagtgccctggacaaccagaggacccctttgtccctgggccagcgggagccaccatggctggccaggccctgtcatggaaactgtgacccgactcagcaggaggcagggggaggagaggctgtggtgacctttgaggaccgggccaggcacaggcagagccaacggcgcagccggcatcgccgcgtcaggacagaaggcaaggagtcctcttcagcctcccggagcaggtctgccagccaggaacgcagtctggatgaagccatgcccactgaaggggagaaggaccatgagctcaggggcaaccatggtgccaaggagccaacgatccaagaagagagagcccaggatttaaggaggaccaacagtctgatggtgtccagaggctccgggctggcaggaggccttgatgaggctgacacccccctagtcctgccccatcctgagctggaagtggggaagcacgtggtgctgacggagcaggagccagaaggcagcagtgagcaggccctgctggggaatgtgcagctagacatgggccgggtcatcagccagagcgagcctgacctctcctgcatcacggccaacacggacaaggccaccaccgagagcaccagcgtcaccgtcgccatccccgacgtggaccccttggtggactcaaccgtggtgcacattagcaacaagacggatggggaagccagtcccttgaaggaggcagagatcagagaggatgaggaggaggtggagaagaagaagcagaagaaggagaagcgtgagacaggcaaagccatggtgccccacagctcaatgttcatcttcagcaccaccaacccgatccggagggcctgccactacatcgtgaacctgcgctactttgagatgtgcatcctcctggtgattgcagccagcagcatcgccctggcggcagaggaccccgtcctgaccaactcggagcgcaacaaagtcctgaggtattttgactatgtgttcacgggcgtgttcacctttgagatggttataaagatgatagaccaaggcttgatcctgcaggatgggtcctacttccgagacttgtggaacatcctggactttgtggtggtcgttggcgcattggtggcctttgctctggcgatgtccctggaaaccaacaaaggacgggacatcaagaccatcaagtctctgcgggtgctccgagttctaaggccactgaaaaccatcaagcgcttgcccaagctcaaggccgtcttcgactgcgtagtgacctccttgaagaatgtcttcaacatactcattgtgtacaagctcttcatgttcatctttgctgtcatcgcagttcagctcttcaagggaaagttcttttattgcacggacagttccaaggacacagagaaggagtgcataggcaactatgtagatcatgagaaaaacaagatggaggtgaagggccgggaatggaagcgccatgaattccactacgacaacattatctgggccctgctgaccctcttcaccgtctccacaggggaaggatggcctcaagttctgcagcactctgtagatgtgacagaggaagaccgaggcccaagccgcagcaaccgcatggagatgtctatcttttatgtagtctactttgtggtcttccccttcttctttgtcaatatctttgtggctctcatcatcatcaccttccaggagcaaggggataagatgatggaggagtgcagcctggagaagaatgagagggcgtgcatcgacttcgccatcagcgccaaacctctcacccgctacatgccgcagaacagacacaccttccagtaccgcgtgtggcactttgtggtgtctccgtcctttgagtacaccattatggccatgatcgccttgaatactgttgtgctgatgatgaagtattattctgctccctgtacctatgagctggccctgaagtacctgaatatcgccttcaccatggtgttttccctggaatgtgtcctgaaggtcatcgcttttggctttttgaactatttccgagacacctggaatatctttgacttcatcaccgtgattggcagtatcacagaaattatcctgacagacagcaagctggtgaacaccagtggcttcaatatgagctttctgaagctcttccgagctgcccgcctcataaagctcctgcgtcagggctataccatacgcattttgctgtggacctttgtgcagtcctttaaggccctcccttatgtctgccttttaattgccatgcttttcttcatttatgccatcattgggatgcaggtatttggaaacataaaattagacgaggagagtcacatcaaccggcacaacaacttccggagtttctttgggtccctaatgctactcttcaggagtgccacaggtgaggcctggcaggagattatgctgtcatgccttggggagaagggctgtgagcctgacaccaccgcaccatcagggcagaacgagaacgaacgctgcggcaccgatctggcctacgtgtactttgtctccttcatcttcttctgctccttcttgatgctcaacctgtttgtggccgtcatcatggacaactttgagtacctgactcgggactcctccatcctggggcctcaccacttggacgagtttgtccgcgtctgggcagaatatgaccgagcagcatgtggccgcatccattacactgagatgtatgaaatgctgactctcatgtcacctccgctaggcctcggcaagagatgtccctccaaagtggcatataagaggttggtcctgatgaacatgccagtagctgaggacatgacggtccacttcacctccacacttatggctctgatccggacagctctggacattaaaattgccaaaggtggtgcagacaggcagcagctagactcagagctacaaaaggagaccctagccatctggcctcacctatcccagaagatgctggatctgcttgtgcccatgcccaaagcctctgacctgactgtgggcaaaatctatgcagcaatgatgatcatggactactataagcagagtaaggtgaagaagcagaggcagcagctggaggaacagaaaaatgcccccatgttccagcgcatggagccttcatctctgcctcaggagatcattgctaatgccaaagccctgccttacctccagcaggaccccgtttcaggcctgagtggccggagtggatacccttcgatgagtccactctctccccaggatatattccagttggcttgtatggaccccgccgatgacggacagttccaagaacggcagtctctggtggtgacagaccctagctccatgagacgttcattttccactattcgggataagcgttcaaattcctcgtggttggaggaattctccatggagcgaagcagtgaaaatacctacaagtcccgtcgccggagttaccactcctccttgcggctgtcagcccaccgcctgaactctgattcaggccacaagtctgacactcaccgctcagggggcagggagcggggacgatcaaaagagcgaaagcatcttctctctcctgatgtctcccgctgcaattcagaagagcgagggacccaggctgactgggagtccccagagcgccgtcaatccaggtcacccagtgagggcaggtcacagacgcccaacagacagggcacaggttccctaagtgagagctccatcccctctgtctctgacaccagcaccccaagaagaagtcgtcggcagctcccacccgtcccgccaaagccccggcccctcctttcctacagctccctgattcgacacgcgggcagcatctctccacctgctgatggaagcgaggagggctccccgctgacctcccaagctctggagagcaacaatgcttgcctgaccgagtcttccaactctccgcacccccagcagagccaacatgcctccccacagcgctacatctccgagccctacttggccctgcacgaagactcccacgcctcagactgtggtgaggaggagacgctcactttcgaagcagccgtggctactagcctgggccgttccaacaccatcggctcagccccacccctgcggcatagctggcagatgcccaacgggcactatcggcggcggaggcgcggggggcctgggccaggcatgatgtgtggggctgtcaacaacctgctaagtgacacggaagaagatgacaaatgctagaggctgctcccccctccgatgcatgctcttctctcacatggagaaaaccaagacagaattgggaagccagtgcggcccgggggggaggaagagggaaaaggaagatggaaggacaccatgcattatcagagaagaggaagtaaaggacaatcagaacaccagtcaaacccaccaaattgctttattcccctttgcaagatgggcactgccatagttctgcctctttgctggggaaagaaaccaggaacgtggagggttattactgcgggagaagggacacgaggatggctttgcttccccttgccccttcccacttttctaaaagctgtggagggatctagctggcctatgtctacactcagtgccctgagaagcctggaagactttctggctcttaactggggagtagtggagaccataggagaggactctcctccctcaccagctcttacgcctcagccagcaccactgccaccagggcaactgcagcagcatctcatgcataaccctgtggcttgcttcccccagggcagcacaggctaagtcaggaacatcggatgccagggagggaggagaaagccgaagcgaaaggggtcagggtgctgaggcaacagcagcaagggctggtctggacaagaaaagccatagcccggcagcccctaccatgagggagacagagaaacagaactggtggtgctggggggtatagccccccatccttgaggcctgtcacccacacagtaggtgctgagagttaggacaggtcaggaagtcccccagggtccacaaaggtgcctgaggctctggtaagggtgaagataaaagtatttaacaaccgctatggcatcaatgtaagtggagtttggtcctagtgccggagcccatgctattccaggcattggctctttagatgccagtcatgggggaaccctgagggtgtgggtagagtagcaggggccacctaagagattaaaaacagtctgttttccaaccagtgtggaagcaattaaatatgcgtaacagtgctacggccacaccagcacctcctggctgaaggtcagcccacactctggtccatgaggcagcaaggccagtgctgtgccaagcccggtaaggccaagtgccgaggcccagccttccctgccactcctctgagagggcagaacacacatatccaagtaggctacccaccactgggtagggatttctgtaaagatgggaaaggctgatagattgaaataagcttctgtgaaagtctggatttactgaggacctcccctgaggagggaccgttgggaccgcagattctgcagctggtgtggggttcaggtcagtttgtcaggatgctttaaggtgattagtaaatatacctcagcttagacttgggctgctccttctagcaaagcaggctccagtggggcctcatcatacaggatgacaagactggggccctgttcaccttgaacatgcccctgggccaagatggggcttcacccctccccagagtaagagctggggctgacagtcccaccctgtcattcctaatagcccaaacgcagaagcactgagcaagagagccctttcttgccaagccagtgctcttttggtatatggcatacagctccattggaggggacacatcactggctttatctggtggaaatgtacctttcccttaagttcctccttagtgccatcacagcaggtgaatgggtgccctacggggccctccttcccccaccaggaacagatggaacctgccacccaggatcctgatctgccctgcactgagcactcagtggataaacactcctccagcccagacacactcctcctcttgggcaggagcaatccagagttgttatttttcttagaaggagcctcttttccctctattttttaaattgaaatataatagctgcatcagccctgaaaagccaaattcaaccacatggctggagaatcatttgtcatggccccgccttctcttctgatactaatggagcttcatgacccacggtcagcccccaaaccaaagttgtcccaacagaggaggccagtgaggcagagacagagctctcccactctcagaccctcttttgtcttcattttcctctcccacttagcacatgtgtgcttgagggtggctgggaatgtgatatacagcaccctgatcctaacaggtgtgattgttacgtaagacgctgatactgggccttgtattgcttttaaagtttcctctgctcagcatcatttcatgccaaagtgctgctatgggctgctttgtgtgcacaaaattgctttttccacctcggaaatgcagctttccctagggggaggcctacaacaggacgaccattctgagccagtgagtctattgcatggtgttttgagaaagggaattttagtgacaccttatgccatttcaagaggagaaatgcaggctggcagagcaatttccagaaatggaatttgcctgcaaatagtataaacaacactaaatttactgtgccaggaaatcttcctgaactccttgaactcatacacacaggtatttgagtcctgaataaagtgttggaaagcactgcagatgcggtcacctgactgaccacctgggttttctattaccagtgaatttcttttattcaccttcccttgaccaagaaattgggtttcttttccctcagcctgcacttactcttctattaagaccagaaaataaaataattttccgttgagtc

SEQ ID NO: 14785 - DNA, 9724 bp, Artificial Sequence
  derived and/or modified sequence
gctgctgctgcctctccgaagagctcgcggagctccccagaggcggtggtccccgtgcttgtctggatgcggctctgagtctccgtgtgtctttctgcttgttgctgtgtgcgggtgttcggccgcgatcacctttgtgtgtcttctgtctgtttaaacctcaggatggctcgcttcggggaggcggtggtcgccaggccagggtccggcgatggagactcggaccagagcaggaaccggcaaggaacccccgtgccggcctcggggcaggcggccgcctacaagcagacgaaagcacagagggcgcggactatggctttgtacaaccccattcccgtccggcagaactgtttcaccgtcaacagatccctgttcatcttcggagaagataacattgtcaggaaatatgccaagaagctcatcgattggccgccatttgagtacatgatcctggccaccatcattgccaactgcatcgtcctggccctggagcagcatcttcctgaggatgacaagacccccatgtcccgaagactggagaagacagaaccttatttcattgggatcttttgctttgaagctgggatcaaaattgtggccctggggttcatcttccataagggctcttacctccgcaatggctggaatgtcatggacttcatcgtggtcctcagtggcatcctggccactgcaggaacccacttcaatactcacgtggacctgaggaccctccgggctgtgcgtgtcctgcggcctttgaagctcgtgtcagggatacctagcctgcagattgtgttgaagtccatcatgaaggccatggtacctcttctgcagattggccttctgctcttctttgccatcctgatgtttgctatcattggtttggagttctacagtggcaagttacatcgagcatgcttcatgaacaattcaggtattctagaaggatttgacccccctcacccatgtggtgtgcagggctgcccagctggttatgaatgcaaggactggatcggccccaatgatgggatcacccagtttgataacatcctttttgctgtgctgactgtcttccagtgcatcaccatggaagggtggaccactgtgctgtacaataccaatgatgccttaggagccacctggaattggctgtacttcatccccctcatcatcattggatccttctttgttctcaacctagtcctgggagtgctttccggggaatttgccaaagagagagagagagtggagaaccgaagggctttcatgaagctgcggcgccagcagcagattgagcgtgagctgaatggctaccgtgcctggatagacaaagcagaggaagtcatgctcgctgaagaaaataaaaatgctggaacatccgccttagaagtgcttcgaagggcaaccatcaagaggagccggacagaggccatgactcgagactccagtgatgagcactgtgttgatatctcctctgtgggcacacctctggcccgagccagtatcaaaagtgcaaaggtagacggggtctcttatttccggcacaaggaaaggcttctgcgcatctccattcgccacatggttaaatcccaggtgttttactggattgtgctgagccttgtggcactcaacactgcctgtgtggccattgtccatcacaaccagccccagtggctcacccacctcctctactatgcagaatttctgtttctgggactcttcctcttggagatgtccctgaagatgtatggcatggggcctcgcctttattttcactcttcattcaactgctttgattttggggtcacagtgggcagtatctttgaagtggtctgggcaatcttcagacctggtacgtcttttggaatcagtgtcttgcgagccctccggcttctaagaatatttaaaataaccaagtattgggcttccctacggaatttggtggtctccttgatgagctcaatgaagtctatcatcagtttgcttttcctcctcttcctcttcatcgttgtctttgctctcctaggaatgcagttatttggaggcaggtttaactttaatgatgggactccttcggcaaattttgataccttccctgcagccatcatgactgtgttccagatcctgacgggtgaggactggaatgaggtgatgtacaatgggatccgctcccagggtggggtcagctcaggcatgtggtctgccatctacttcattgtgctcaccttgtttggcaactacacgctactgaatgtgttcttggctatcgctgtggataatctcgccaacgcccaggaactgaccaaggatgaacaggaggaagaagaggccttcaaccagaaacatgcactgcagaaggccaaggaggtcagcccgatgtctgcacccaacatgccttcgatcgaaagagacagaaggagaagacaccacatgtcgatgtgggagccacgcagcagccacctgagggagcggaggcgccggcaccacatgtccgtgtgggagcagcgtaccagccagctgaggaagcacatgcagatgtccagccaggaggccctcaacagagaggaggcgccgaccatgaacccgctcaaccccctcaacccgctcagctccctcaacccgctcaatgcccaccccagcctttatcggcgacccagggccattgagggcctggccctgggcctggccctggagaagttcgaggaggagcgcatcagccgtggggggtccctcaagggggatggaggggaccgatccagtgccctggacaaccagaggacccctttgtccctgggccagcgggagccaccatggctggccaggccctgtcatggaaactgtgacccgactcagcaggaggcagggggaggagaggctgtggtgacctttgaggaccgggccaggcacaggcagagccaacggcgcagccggcatcgccgcgtcaggacagaaggcaaggagtcctcttcagcctcccggagcaggtctgccagccaggaacgcagtctggatgaagccatgcccactgaaggggagaaggaccatgagctcaggggcaaccatggtgccaaggagccaacgatccaagaagagagagcccaggatttaaggaggaccaacagtctgatggtgtccagaggctccgggctggcaggaggccttgatgaggctgacacccccctagtcctgccccatcctgagctggaagtggggaagcacgtggtgctgacggagcaggagccagaaggcagcagtgagcaggccctgctggggaatgtgcagctagacatgggccgggtcatcagccagagcgagcctgacctctcctgcatcacggccaacacggacaaggccaccaccgagagcaccagcgtcaccgtcgccatccccgacgtggaccccttggtggactcaaccgtggtgcacattagcaacaagacggatggggaagccagtcccttgaaggaggcagagatcagagaggatgaggaggaggtggagaagaagaagcagaagaaggagaagcgtgagacaggcaaagccatggtgccccacagctcaatgttcatcttcagcaccaccaacccgatccggagggcctgccactacatcgtgaacctgcgctactttgagatgtgcatcctcctggtgattgcagccagcagcatcgccctggcggcagaggaccccgtcctgaccaactcggagcgcaacaaagtcctgaggtattttgactatgtgttcacgggcgtgttcacctttgagatggttataaagatgatagaccaaggcttgatcctgcaggatgggtcctacttccgagacttgtggaacatcctggactttgtggtggtcgttggcgcattggtggcctttgctctggcgaacgctttgggaaccaacaaaggacgggacatcaagaccatcaagtctctgcgggtgctccgagttctaaggccactgaaaaccatcaagcgcttgcccaagctcaaggccgtcttcgactgcgtagtgacctccttgaagaatgtcttcaacatactcattgtgtacaagctcttcatgttcatctttgctgtcatcgcagttcagctcttcaagggaaagttcttttattgcacggacagttccaaggacacagagaaggagtgcataggcaactatgtagatcatgagaaaaacaagatggaggtgaagggccgggaatggaagcgccatgaattccactacgacaacattatctgggccctgctgaccctcttcaccgtctccacaggggaaggatggcctcaagttctgcagcactctgtagatgtgacagaggaagaccgaggcccaagccgcagcaaccgcatggagatgtctatcttttatgtagtctactttgtggtcttccccttcttctttgtcaatatctttgtggctctcatcatcatcaccttccaggagcaaggggataagatgatggaggagtgcagcctggagaagaatgagagggcgtgcatcgacttcgccatcagcgccaaacctctcacccgctacatgccgcagaacagacacaccttccagtaccgcgtgtggcactttgtggtgtctccgtcctttgagtacaccattatggccatgatcgccttgaatactgttgtgctgatgatgaagtattattctgctccctgtacctatgagctggccctgaagtacctgaatatcgccttcaccatggtgttttccctggaatgtgtcctgaaggtcatcgcttttggctttttgaactatttccgagacacctggaatatctttgacttcatcaccgtgattggcagtatcacagaaattatcctgacagacagcaagctggtgaacaccagtggcttcaatatgagctttctgaagctcttccgagctgcccgcctcataaagctcctgcgtcagggctataccatacgcattttgctgtggacctttgtgcagtcctttaaggccctcccttatgtctgccttttaattgccatgcttttcttcatttatgccatcattgggatgcaggtatttggaaacataaaattagacgaggagagtcacatcaaccggcacaacaacttccggagtttctttgggtccctaatgctactcttcaggagtgccacaggtgaggcctggcaggagattatgctgtcatgccttggggagaagggctgtgagcctgacaccaccgcaccatcagggcagaacgagaacgaacgctgcggcaccgatctggcctacgtgtactttgtctccttcatcttcttctgctccttcttgatgctcaacctgtttgtggccgtcatcatggacaactttgagtacctgactcgggactcctccatcctggggcctcaccacttggacgagtttgtccgcgtctgggcagaatatgaccgagcagcatgtggccgcatccattacactgagatgtatgaaatgctgactctcatgtcacctccgctaggcctcggcaagagatgtccctccaaagtggcatataagaggttggtcctgatgaacatgccagtagctgaggacatgacggtccacttcacctccacacttatggctctgatccggacagctctggacattaaaattgccaaaggtggtgcagacaggcagcagctagactcagagctacaaaaggagaccctagccatctggcctcacctatcccagaagatgctggatctgcttgtgcccatgcccaaagcctctgacctgactgtgggcaaaatctatgcagcaatgatgatcatggactactataagcagagtaaggtgaagaagcagaggcagcagctggaggaacagaaaaatgcccccatgttccagcgcatggagccttcatctctgcctcaggagatcattgctaatgccaaagccctgccttacctccagcaggaccccgtttcaggcctgagtggccggagtggatacccttcgatgagtccactctctccccaggatatattccagttggcttgtatggaccccgccgatgacggacagttccaagaacggcagtctctggtggtgacagaccctagctccatgagacgttcattttccactattcgggataagcgttcaaattcctcgtggttggaggaattctccatggagcgaagcagtgaaaatacctacaagtcccgtcgccggagttaccactcctccttgcggctgtcagcccaccgcctgaactctgattcaggccacaagtctgacactcaccgctcagggggcagggagcggggacgatcaaaagagcgaaagcatcttctctctcctgatgtctcccgctgcaattcagaagagcgagggacccaggctgactgggagtccccagagcgccgtcaatccaggtcacccagtgagggcaggtcacagacgcccaacagacagggcacaggttccctaagtgagagctccatcccctctgtctctgacaccagcaccccaagaagaagtcgtcggcagctcccacccgtcccgccaaagccccggcccctcctttcctacagctccctgattcgacacgcgggcagcatctctccacctgctgatggaagcgaggagggctccccgctgacctcccaagctctggagagcaacaatgcttgcctgaccgagtcttccaactctccgcacccccagcagagccaacatgcctccccacagcgctacatctccgagccctacttggccctgcacgaagactcccacgcctcagactgtggtgaggaggagacgctcactttcgaagcagccgtggctactagcctgggccgttccaacaccatcggctcagccccacccctgcggcatagctggcagatgcccaacgggcactatcggcggcggaggcgcggggggcctgggccaggcatgatgtgtggggctgtcaacaacctgctaagtgacacggaagaagatgacaaatgctagaggctgctcccccctccgatgcatgctcttctctcacatggagaaaaccaagacagaattgggaagccagtgcggcccgggggggaggaagagggaaaaggaagatggaaggacaccatgcattatcagagaagaggaagtaaaggacaatcagaacaccagtcaaacccaccaaattgctttattcccctttgcaagatgggcactgccatagttctgcctctttgctggggaaagaaaccaggaacgtggagggttattactgcgggagaagggacacgaggatggctttgcttccccttgccccttcccacttttctaaaagctgtggagggatctagctggcctatgtctacactcagtgccctgagaagcctggaagactttctggctcttaactggggagtagtggagaccataggagaggactctcctccctcaccagctcttacgcctcagccagcaccactgccaccagggcaactgcagcagcatctcatgcataaccctgtggcttgcttcccccagggcagcacaggctaagtcaggaacatcggatgccagggagggaggagaaagccgaagcgaaaggggtcagggtgctgaggcaacagcagcaagggctggtctggacaagaaaagccatagcccggcagcccctaccatgagggagacagagaaacagaactggtggtgctggggggtatagccccccatccttgaggcctgtcacccacacagtaggtgctgagagttaggacaggtcaggaagtcccccagggtccacaaaggtgcctgaggctctggtaagggtgaagataaaagtatttaacaaccgctatggcatcaatgtaagtggagtttggtcctagtgccggagcccatgctattccaggcattggctctttagatgccagtcatgggggaaccctgagggtgtgggtagagtagcaggggccacctaagagattaaaaacagtctgttttccaaccagtgtggaagcaattaaatatgcgtaacagtgctacggccacaccagcacctcctggctgaaggtcagcccacactctggtccatgaggcagcaaggccagtgctgtgccaagcccggtaaggccaagtgccgaggcccagccttccctgccactcctctgagagggcagaacacacatatccaagtaggctacccaccactgggtagggatttctgtaaagatgggaaaggctgatagattgaaataagcttctgtgaaagtctggatttactgaggacctcccctgaggagggaccgttgggaccgcagattctgcagctggtgtggggttcaggtcagtttgtcaggatgctttaaggtgattagtaaatatacctcagcttagacttgggctgctccttctagcaaagcaggctccagtggggcctcatcatacaggatgacaagactggggccctgttcaccttgaacatgcccctgggccaagatggggcttcacccctccccagagtaagagctggggctgacagtcccaccctgtcattcctaatagcccaaacgcagaagcactgagcaagagagccctttcttgccaagccagtgctcttttggtatatggcatacagctccattggaggggacacatcactggctttatctggtggaaatgtacctttcccttaagttcctccttagtgccatcacagcaggtgaatgggtgccctacggggccctccttcccccaccaggaacagatggaacctgccacccaggatcctgatctgccctgcactgagcactcagtggataaacactcctccagcccagacacactcctcctcttgggcaggagcaatccagagttgttatttttcttagaaggagcctcttttccctctattttttaaattgaaatataatagctgcatcagccctgaaaagccaaattcaaccacatggctggagaatcatttgtcatggccccgccttctcttctgatactaatggagcttcatgacccacggtcagcccccaaaccaaagttgtcccaacagaggaggccagtgaggcagagacagagctctcccactctcagaccctcttttgtcttcattttcctctcccacttagcacatgtgtgcttgagggtggctgggaatgtgatatacagcaccctgatcctaacaggtgtgattgttacgtaagacgctgatactgggccttgtattgcttttaaagtttcctctgctcagcatcatttcatgccaaagtgctgctatgggctgctttgtgtgcacaaaattgctttttccacctcggaaatgcagctttccctagggggaggcctacaacaggacgaccattctgagccagtgagtctattgcatggtgttttgagaaagggaattttagtgacaccttatgccatttcaagaggagaaatgcaggctggcagagcaatttccagaaatggaatttgcctgcaaatagtataaacaacactaaatttactgtgccaggaaatcttcctgaactccttgaactcatacacacaggtatttgagtcctgaataaagtgttggaaagcactgcagatgcggtcacctgactgaccacctgggttttctattaccagtgaatttcttttattcaccttcccttgaccaagaaattgggtttcttttccctcagcctgcacttactcttctattaagaccagaaaataaaataattttccgttgagtcacaaa

SEQ ID NO: 14786 - DNA, 5634 bp, Artificial Sequence
  derived and/or modified sequence
atgctggccgaggagaacaagaacgccggcaccagcgccctggaggtgctgagaagagccaccatcaagagaagcagaaccgaggccatgaccagagacagcagcgacgagcactgcgtggacatcagcagcgtgggcacccccctggccagagccagcatcaagagcgccaaggtggacggcgtgagctacttcagacacaaggagagactgctgagaatcagcatcagacacatggtgaagagccaggtgttctactggatcgtgctgagcctggtggccctgaacaccgcctgcgtggccatcgtgcaccacaaccagccccagtggctgacccacctgctgtactacgccgagttcctgttcctgggcctgttcctgctggagatgagcctgaagatgtacggcatgggccccagactgtacttccacagcagcttcaactgcttcgacttcggcgtgaccgtgggcagcatcttcgaggtggtgtgggccatcttcagacccggcaccagcttcggcatcagcgtgctgagagccctgagactgctgagaatcttcaagatcaccaagtactgggccagcctgagaaacctggtggtgagcctgatgagcagcatgaagagcatcatcagcctgctgttcctgctgttcctgttcatcgtggtgttcgccctgctgggcatgcagctgttcggcggcagattcaacttcaacgacggcacccccagcgccaacttcgacaccttccccgccgccatcatgaccgtgttccagatcctgaccggcgaggactggaacgaggtgatgtacaacggcatcagaagccagggcggcgtgagcagcggcatgtggagcgccatctacttcatcgtgctgaccctgttcggcaactacaccctgctgaacgtgttcctggccatcgccgtggacaacctggccaacgcccaggagctgaccaaggacgagcaggaggaggaggaggccttcaaccagaagcacgccctgcagaaggccaaggaggtgagccccatgagcgcccccaacatgcccagcatcgagagagacagaagaagaagacaccacatgagcatgtgggagcccagaagcagccacctgagagagagaagaagaagacaccacatgagcgtgtgggagcagagaaccagccagctgagaaagcacatgcagatgagcagccaggaggccctgaacagagaggaggcccccaccatgaaccccctgaaccccctgaaccccctgagcagcctgaaccccctgaacgcccaccccagcctgtacagaagacccagagccatcgagggcctggccctgggcctggccctggagaagttcgaggaggagagaatcagcagaggcggcagcctgaagggcgacggcggcgacagaagcagcgccctggacaaccagagaacccccctgagcctgggccagagagagcccccctggctggccagaccctgccacggcaactgcgaccccacccagcaggaggccggcggcggcgaggccgtggtgaccttcgaggacagagccagacacagacagagccagagaagaagcagacacagaagagtgagaaccgagggcaaggagagcagcagcgccagcagaagcagaagcgccagccaggagagaagcctggacgaggccatgcccaccgagggcgagaaggaccacgagctgagaggcaaccacggcgccaaggagcccaccatccaggaggagagagcccaggacctgagaagaaccaacagcctgatggtgagcagaggcagcggcctggccggcggcctggacgaggccgacacccccctggtgctgccccaccccgagctggaggtgggcaagcacgtggtgctgaccgagcaggagcccgagggcagcagcgagcaggccctgctgggcaacgtgcagctggacatgggcagagtgatcagccagagcgagcccgacctgagctgcatcaccgccaacaccgacaaggccaccaccgagagcaccagcgtgaccgtggccatccccgacgtggaccccctggtggacagcaccgtggtgcacatcagcaacaagaccgacggcgaggccagccccctgaaggaggccgagatcagagaggacgaggaggaggtggagaagaagaagcagaagaaggagaagagagagaccggcaaggccatggtgccccacagcagcatgttcatcttcagcaccaccaaccccatcagaagagcctgccactacatcgtgaacctgagatacttcgagatgtgcatcctgctggtgatcgccgccagcagcatcgccctggccgccgaggaccccgtgctgaccaacagcgagagaaacaaggtgctgagatacttcgactacgtgttcaccggcgtgttcaccttcgagatggtgatcaagatgatcgaccagggcctgatcctgcaggacggcagctacttcagagacctgtggaacatcctggacttcgtggtggtggtgggcgccctggtggccttcgccctggccatgagcctggagaccaacaagggcagagacatcaagaccatcaagagcctgagagtgctgagagtgctgagacccctgaagaccatcaagagactgcccaagctgaaggccgtgttcgactgcgtggtgaccagcctgaagaacgtgttcaacatcctgatcgtgtacaagctgttcatgttcatcttcgccgtgatcgccgtgcagctgttcaagggcaagttcttctactgcaccgacagcagcaaggacaccgagaaggagtgcatcggcaactacgtggaccacgagaagaacaagatggaggtgaagggcagagagtggaagagacacgagttccactacgacaacatcatctgggccctgctgaccctgttcaccgtgagcaccggcgagggctggccccaggtgctgcagcacagcgtggacgtgaccgaggaggacagaggccccagcagaagcaacagaatggagatgagcatcttctacgtggtgtacttcgtggtgttccccttcttcttcgtgaacatcttcgtggccctgatcatcatcaccttccaggagcagggcgacaagatgatggaggagtgcagcctggagaagaacgagagagcctgcatcgacttcgccatcagcgccaagcccctgaccagatacatgccccagaacagacacaccttccagtacagagtgtggcacttcgtggtgagccccagcttcgagtacaccatcatggccatgatcgccctgaacaccgtggtgctgatgatgaagtactacagcgccccctgcacctacgagctggccctgaagtacctgaacatcgccttcaccatggtgttcagcctggagtgcgtgctgaaggtgatcgccttcggcttcctgaactacttcagagacacctggaacatcttcgacttcatcaccgtgatcggcagcatcaccgagatcatcctgaccgacagcaagctggtgaacaccagcggcttcaacatgagcttcctgaagctgttcagagccgccagactgatcaagctgctgagacagggctacaccatcagaatcctgctgtggaccttcgtgcagagcttcaaggccctgccctacgtgtgcctgctgatcgccatgctgttcttcatctacgccatcatcggcatgcaggtgttcggcaacatcaagctggacgaggagagccacatcaacagacacaacaacttcagaagcttcttcggcagcctgatgctgctgttcagaagcgccaccggcgaggcctggcaggagatcatgctgagctgcctgggcgagaagggctgcgagcccgacaccaccgcccccagcggccagaacgagaacgagagatgcggcaccgacctggcctacgtgtacttcgtgagcttcatcttcttctgcagcttcctgatgctgaacctgttcgtggccgtgatcatggacaacttcgagtacctgaccagagacagcagcatcctgggcccccaccacctggacgagttcgtgagagtgtgggccgagtacgacagagccgcctgcggcagaatccactacaccgagatgtacgagatgctgaccctgatgagcccccccctgggcctgggcaagagatgccccagcaaggtggcctacaagagactggtgctgatgaacatgcccgtggccgaggacatgaccgtgcacttcaccagcaccctgatggccctgatcagaaccgccctggacatcaagatcgccaagggcggcgccgacagacagcagctggacagcgagctgcagaaggagaccctggccatctggccccacctgagccagaagatgctggacctgctggtgcccatgcccaaggccagcgacctgaccgtgggcaagatctacgccgccatgatgatcatggactactacaagcagagcaaggtgaagaagcagagacagcagctggaggagcagaagaacgcccccatgttccagagaatggagcccagcagcctgccccaggagatcatcgccaacgccaaggccctgccctacctgcagcaggaccccgtgagcggcctgagcggcagaagcggctaccccagcatgagccccctgagcccccaggacatcttccagctggcctgcatggaccccgccgacgacggccagttccaggagagacagagcctggtggtgaccgaccccagcagcatgagaagaagcttcagcaccatcagagacaagagaagcaacagcagctggctggaggagttcagcatggagagaagcagcgagaacacctacaagagcagaagaagaagctaccacagcagcctgagactgagcgcccacagactgaacagcgacagcggccacaagagcgacacccacagaagcggcggcagagagagaggcagaagcaaggagagaaagcacctgctgagccccgacgtgagcagatgcaacagcgaggagagaggcacccaggccgactgggagagccccgagagaagacagagcagaagccccagcgagggcagaagccagacccccaacagacagggcaccggcagcctgagcgagagcagcatccccagcgtgagcgacaccagcacccccagaagaagcagaagacagctgccccccgtgccccccaagcccagacccctgctgagctacagcagcctgatcagacacgccggcagcatcagcccccccgccgacggcagcgaggagggcagccccctgaccagccaggccctggagagcaacaacgcctgcctgaccgagagcagcaacagcccccacccccagcagagccagcacgccagcccccagagatacatcagcgagccctacctggccctgcacgaggacagccacgccagcgactgcggcgaggaggagaccctgaccttcgaggccgccgtggccaccagcctgggcagaagcaacaccatcggcagcgccccccccctgagacacagctggcagatgcccaacggccactacagaagaagaagaagaggcggccccggccccggcatgatgtgcggcgccgtgaacaacctgctgagcgacaccgaggaggacgacaagtgctag

SEQ ID NO: 14787 - DNA, 6813 bp, Artificial Sequence
  derived and/or modified sequence
atggccagattcggcgaggccgtggtggccagacccggcagcggcgacggcgacagcgaccagagcagaaacagacagggcacccccgtgcccgccagcggccaggccgccgcctacaagcagaccaaggcccagagagccagaaccatggccctgtacaaccccatccccgtgagacagaactgcttcaccgtgaacagaagcctgttcatcttcggcgaggacaacatcgtgagaaagtacgccaagaagctgatcgactggccccccttcgagtacatgatcctggccaccatcatcgccaactgcatcgtgctggccctggagcagcacctgcccgaggacgacaagacccccatgagcagaagactggagaagaccgagccctacttcatcggcatcttctgcttcgaggccggcatcaagatcgtggccctgggcttcatcttccacaagggcagctacctgagaaacggctggaacgtgatggacttcatcgtggtgctgagcggcatcctggccaccgccggcacccacttcaacacccacgtggacctgagaaccctgagagccgtgagagtgctgagacccctgaagctggtgagcggcatccccagcctgcagatcgtgctgaagagcatcatgaaggccatggtgcccctgctgcagatcggcctgctgctgttcttcgccatcctgatgttcgccatcatcggcctggagttctacagcggcaagctgcacagagcctgcttcatgaacaacagcggcatcctggagggcttcgaccccccccacccctgcggcgtgcagggctgccccgccggctacgagtgcaaggactggatcggccccaacgacggcatcacccagttcgacaacatcctgttcgccgtgctgaccgtgttccagtgcatcaccatggagggctggaccaccgtgctgtacaacaccaacgacgccctgggcgccacctggaactggctgtacttcatccccctgatcatcatcggcagcttcttcgtgctgaacctggtgctgggcgtgctgagcggcgagttcgccaaggagagagagagagtggagaacagaagagccttcatgaagctgagaagacagcagcagatcgagagagagctgaacggctacagagcctggatcgacaaggccgaggaggtgatgctggccgaggagaacaagaacgccggcaccagcgccctggaggtgctgagaagagccaccatcaagagaagcagaaccgaggccatgaccagagacagcagcgacgagcactgcgtggacatcagcagcgtgggcacccccctggccagagccagcatcaagagcgccaaggtggacggcgtgagctacttcagacacaaggagagactgctgagaatcagcatcagacacatggtgaagagccaggtgttctactggatcgtgctgagcctggtggccctgaacaccgcctgcgtggccatcgtgcaccacaaccagccccagtggctgacccacctgctgtactacgccgagttcctgttcctgggcctgttcctgctggagatgagcctgaagatgtacggcatgggccccagactgtacttccacagcagcttcaactgcttcgacttcggcgtgaccgtgggcagcatcttcgaggtggtgtgggccatcttcagacccggcaccagcttcggcatcagcgtgctgagagccctgagactgctgagaatcttcaagatcaccaagtactgggccagcctgagaaacctggtggtgagcctgatgagcagcatgaagagcatcatcagcctgctgttcctgctgttcctgttcatcgtggtgttcgccctgctgggcatgcagctgttcggcggcagattcaacttcaacgacggcacccccagcgccaacttcgacaccttccccgccgccatcatgaccgtgttccagatcctgaccggcgaggactggaacgaggtgatgtacaacggcatcagaagccagggcggcgtgagcagcggcatgtggagcgccatctacttcatcgtgctgaccctgttcggcaactacaccctgctgaacgtgttcctggccatcgccgtggacaacctggccaacgcccaggagctgaccaaggacgagcaggaggaggaggaggccttcaaccagaagcacgccctgcagaaggccaaggaggtgagccccatgagcgcccccaacatgcccagcatcgagagagacagaagaagaagacaccacatgagcatgtgggagcccagaagcagccacctgagagagagaagaagaagacaccacatgagcgtgtgggagcagagaaccagccagctgagaaagcacatgcagatgagcagccaggaggccctgaacagagaggaggcccccaccatgaaccccctgaaccccctgaaccccctgagcagcctgaaccccctgaacgcccaccccagcctgtacagaagacccagagccatcgagggcctggccctgggcctggccctggagaagttcgaggaggagagaatcagcagaggcggcagcctgaagggcgacggcggcgacagaagcagcgccctggacaaccagagaacccccctgagcctgggccagagagagcccccctggctggccagaccctgccacggcaactgcgaccccacccagcaggaggccggcggcggcgaggccgtggtgaccttcgaggacagagccagacacagacagagccagagaagaagcagacacagaagagtgagaaccgagggcaaggagagcagcagcgccagcagaagcagaagcgccagccaggagagaagcctggacgaggccatgcccaccgagggcgagaaggaccacgagctgagaggcaaccacggcgccaaggagcccaccatccaggaggagagagcccaggacctgagaagaaccaacagcctgatggtgagcagaggcagcggcctggccggcggcctggacgaggccgacacccccctggtgctgccccaccccgagctggaggtgggcaagcacgtggtgctgaccgagcaggagcccgagggcagcagcgagcaggccctgctgggcaacgtgcagctggacatgggcagagtgatcagccagagcgagcccgacctgagctgcatcaccgccaacaccgacaaggccaccaccgagagcaccagcgtgaccgtggccatccccgacgtggaccccctggtggacagcaccgtggtgcacatcagcaacaagaccgacggcgaggccagccccctgaaggaggccgagatcagagaggacgaggaggaggtggagaagaagaagcagaagaaggagaagagagagaccggcaaggccatggtgccccacagcagcatgttcatcttcagcaccaccaaccccatcagaagagcctgccactacatcgtgaacctgagatacttcgagatgtgcatcctgctggtgatcgccgccagcagcatcgccctggccgccgaggaccccgtgctgaccaacagcgagagaaacaaggtgctgagatacttcgactacgtgttcaccggcgtgttcaccttcgagatggtgatcaagatgatcgaccagggcctgatcctgcaggacggcagctacttcagagacctgtggaacatcctggacttcgtggtggtggtgggcgccctggtggccttcgccctggccaacgccctgggcaccaacaagggcagagacatcaagaccatcaagagcctgagagtgctgagagtgctgagacccctgaagaccatcaagagactgcccaagctgaaggccgtgttcgactgcgtggtgaccagcctgaagaacgtgttcaacatcctgatcgtgtacaagctgttcatgttcatcttcgccgtgatcgccgtgcagctgttcaagggcaagttcttctactgcaccgacagcagcaaggacaccgagaaggagtgcatcggcaactacgtggaccacgagaagaacaagatggaggtgaagggcagagagtggaagagacacgagttccactacgacaacatcatctgggccctgctgaccctgttcaccgtgagcaccggcgagggctggccccaggtgctgcagcacagcgtggacgtgaccgaggaggacagaggccccagcagaagcaacagaatggagatgagcatcttctacgtggtgtacttcgtggtgttccccttcttcttcgtgaacatcttcgtggccctgatcatcatcaccttccaggagcagggcgacaagatgatggaggagtgcagcctggagaagaacgagagagcctgcatcgacttcgccatcagcgccaagcccctgaccagatacatgccccagaacagacacaccttccagtacagagtgtggcacttcgtggtgagccccagcttcgagtacaccatcatggccatgatcgccctgaacaccgtggtgctgatgatgaagtactacagcgccccctgcacctacgagctggccctgaagtacctgaacatcgccttcaccatggtgttcagcctggagtgcgtgctgaaggtgatcgccttcggcttcctgaactacttcagagacacctggaacatcttcgacttcatcaccgtgatcggcagcatcaccgagatcatcctgaccgacagcaagctggtgaacaccagcggcttcaacatgagcttcctgaagctgttcagagccgccagactgatcaagctgctgagacagggctacaccatcagaatcctgctgtggaccttcgtgcagagcttcaaggccctgccctacgtgtgcctgctgatcgccatgctgttcttcatctacgccatcatcggcatgcaggtgttcggcaacatcaagctggacgaggagagccacatcaacagacacaacaacttcagaagcttcttcggcagcctgatgctgctgttcagaagcgccaccggcgaggcctggcaggagatcatgctgagctgcctgggcgagaagggctgcgagcccgacaccaccgcccccagcggccagaacgagaacgagagatgcggcaccgacctggcctacgtgtacttcgtgagcttcatcttcttctgcagcttcctgatgctgaacctgttcgtggccgtgatcatggacaacttcgagtacctgaccagagacagcagcatcctgggcccccaccacctggacgagttcgtgagagtgtgggccgagtacgacagagccgcctgcggcagaatccactacaccgagatgtacgagatgctgaccctgatgagcccccccctgggcctgggcaagagatgccccagcaaggtggcctacaagagactggtgctgatgaacatgcccgtggccgaggacatgaccgtgcacttcaccagcaccctgatggccctgatcagaaccgccctggacatcaagatcgccaagggcggcgccgacagacagcagctggacagcgagctgcagaaggagaccctggccatctggccccacctgagccagaagatgctggacctgctggtgcccatgcccaaggccagcgacctgaccgtgggcaagatctacgccgccatgatgatcatggactactacaagcagagcaaggtgaagaagcagagacagcagctggaggagcagaagaacgcccccatgttccagagaatggagcccagcagcctgccccaggagatcatcgccaacgccaaggccctgccctacctgcagcaggaccccgtgagcggcctgagcggcagaagcggctaccccagcatgagccccctgagcccccaggacatcttccagctggcctgcatggaccccgccgacgacggccagttccaggagagacagagcctggtggtgaccgaccccagcagcatgagaagaagcttcagcaccatcagagacaagagaagcaacagcagctggctggaggagttcagcatggagagaagcagcgagaacacctacaagagcagaagaagaagctaccacagcagcctgagactgagcgcccacagactgaacagcgacagcggccacaagagcgacacccacagaagcggcggcagagagagaggcagaagcaaggagagaaagcacctgctgagccccgacgtgagcagatgcaacagcgaggagagaggcacccaggccgactgggagagccccgagagaagacagagcagaagccccagcgagggcagaagccagacccccaacagacagggcaccggcagcctgagcgagagcagcatccccagcgtgagcgacaccagcacccccagaagaagcagaagacagctgccccccgtgccccccaagcccagacccctgctgagctacagcagcctgatcagacacgccggcagcatcagcccccccgccgacggcagcgaggagggcagccccctgaccagccaggccctggagagcaacaacgcctgcctgaccgagagcagcaacagcccccacccccagcagagccagcacgccagcccccagagatacatcagcgagccctacctggccctgcacgaggacagccacgccagcgactgcggcgaggaggagaccctgaccttcgaggccgccgtggccaccagcctgggcagaagcaacaccatcggcagcgccccccccctgagacacagctggcagatgcccaacggccactacagaagaagaagaagaggcggccccggccccggcatgatgtgcggcgccgtgaacaacctgctgagcgacaccgaggaggacgacaagtgctag

SEQ ID NO: 14788 - protein, 1091 aa, Artificial Sequence
  derived and/or modified sequence
MAAGCLLALTLTLFQSLLIGPSSEEPFPSAVTIKSWVDKMQEDLVTLAKTASGVNQLVDIYEKYQDLYTVEPNNARQLVEIAARDIEKLLSNRSKALVRLALEAEKVQAAHQWREDFASNEVVYYNAKDDLDPEKNDSEPGSQRIKPVFIEDANFGRQISYQHAAVHIPTDIYEGSTIVLNELNWTSALDEVFKKNREEDPSLLWQVFGSATGLARYYPASPWVDNSRTPNKIDLYDVRRRPWYIQGAASPKDMLILVDVSGSVSGLTLKLIRTSVSEMLETLSDDDFVNVASFNSNAQDVSCFQHLVQANVRNKKVLKDAVNNITAKGITDYKKGFSFAFEQLLNYNVSRANCNKIIMLFTDGGEERAQEIFNKYNKDKKVRVFTFSVGQHNYDRGPIQWMACENKGYYYEIPSIGAIRINTQEYLDVLGRPMVLAGDKAKQVQWTNVYLDALELGLVITGTLPVFNITGQFENKTNLKNQLILGVMGVDVSLEDIKRLTPRFTLCPNGYYFAIDPNGYVLLHPNLQPKNPKSQEPVTLDFLDAELENDIKVEIRNKMIDGESGEKTFRTLVKSQDERYIDKGNRTYTWTPVNGTDYSLALVLPTYSFYYIKAKLEETITQARSKKGKMKDSETLKPDNFEESGYTFIAPRDYCNDLKISDNNTEFLLNFNEFIDRKTPNNPSCNADLINRVLLDAGFTNELVQNYWSKQKNIKGVKARFVVTDGGITRVYPKEAGENWQENPETYEDSFYKRSLDNDNYVFTAPYFNKSGPGAYESGIMVSKAVEIYIQGKLLKPAVVGIKIDVNSWIENFTKTSIRDPCAGPVCDCKRNSDVMDCVILDDGGFLLMANHDDYTNQIGRFFGEIDPSLMRHLVNISVYAFNKSYDYQSVCEPGAAPKQGAGHRSAYVPSVADILQIGWWATAAAWSILQQFLLSLTFPRLLEAVEMEDDDFTASLSKQSCITEQTQYFFDNDSKSFSGVLDCGNCSRIFHGEKLMNTNLIFIMVESKGTCPCDTRLLIQAEQTSDGPNPCDMVKQPRYRKGPDVCFDNNVLEDYTDCGGVSGLNPSLWYIIGIQFLLLWLVSGSTHRLL

SEQ ID NO: 14789 - DNA, 3276 bp, Artificial Sequence
  derived and/or modified sequence
atggccgccggctgcctgctggccctgaccctgaccctgttccagagcctgctgatcggccccagcagcgaggagcccttccccagcgccgtgaccatcaagagctgggtggacaagatgcaggaggacctggtgaccctggccaagaccgccagcggcgtgaaccagctggtggacatctacgagaagtaccaggacctgtacaccgtggagcccaacaacgccagacagctggtggagatcgccgccagagacatcgagaagctgctgagcaacagaagcaaggccctggtgagactggccctggaggccgagaaggtgcaggccgcccaccagtggagagaggacttcgccagcaacgaggtggtgtactacaacgccaaggacgacctggaccccgagaagaacgacagcgagcccggcagccagagaatcaagcccgtgttcatcgaggacgccaacttcggcagacagatcagctaccagcacgccgccgtgcacatccccaccgacatctacgagggcagcaccatcgtgctgaacgagctgaactggaccagcgccctggacgaggtgttcaagaagaacagagaggaggaccccagcctgctgtggcaggtgttcggcagcgccaccggcctggccagatactaccccgccagcccctgggtggacaacagcagaacccccaacaagatcgacctgtacgacgtgagaagaagaccctggtacatccagggcgccgccagccccaaggacatgctgatcctggtggacgtgagcggcagcgtgagcggcctgaccctgaagctgatcagaaccagcgtgagcgagatgctggagaccctgagcgacgacgacttcgtgaacgtggccagcttcaacagcaacgcccaggacgtgagctgcttccagcacctggtgcaggccaacgtgagaaacaagaaggtgctgaaggacgccgtgaacaacatcaccgccaagggcatcaccgactacaagaagggcttcagcttcgccttcgagcagctgctgaactacaacgtgagcagagccaactgcaacaagatcatcatgctgttcaccgacggcggcgaggagagagcccaggagatcttcaacaagtacaacaaggacaagaaggtgagagtgttcaccttcagcgtgggccagcacaactacgacagaggccccatccagtggatggcctgcgagaacaagggctactactacgagatccccagcatcggcgccatcagaatcaacacccaggagtacctggacgtgctgggcagacccatggtgctggccggcgacaaggccaagcaggtgcagtggaccaacgtgtacctggacgccctggagctgggcctggtgatcaccggcaccctgcccgtgttcaacatcaccggccagttcgagaacaagaccaacctgaagaaccagctgatcctgggcgtgatgggcgtggacgtgagcctggaggacatcaagagactgacccccagattcaccctgtgccccaacggctactacttcgccatcgaccccaacggctacgtgctgctgcaccccaacctgcagcccaagaaccccaagagccaggagcccgtgaccctggacttcctggacgccgagctggagaacgacatcaaggtggagatcagaaacaagatgatcgacggcgagagcggcgagaagaccttcagaaccctggtgaagagccaggacgagagatacatcgacaagggcaacagaacctacacctggacccccgtgaacggcaccgactacagcctggccctggtgctgcccacctacagcttctactacatcaaggccaagctggaggagaccatcacccaggccagaagcaagaagggcaagatgaaggacagcgagaccctgaagcccgacaacttcgaggagagcggctacaccttcatcgcccccagagactactgcaacgacctgaagatcagcgacaacaacaccgagttcctgctgaacttcaacgagttcatcgacagaaagacccccaacaaccccagctgcaacgccgacctgatcaacagagtgctgctggacgccggcttcaccaacgagctggtgcagaactactggagcaagcagaagaacatcaagggcgtgaaggccagattcgtggtgaccgacggcggcatcaccagagtgtaccccaaggaggccggcgagaactggcaggagaaccccgagacctacgaggacagcttctacaagagaagcctggacaacgacaactacgtgttcaccgccccctacttcaacaagagcggccccggcgcctacgagagcggcatcatggtgagcaaggccgtggagatctacatccagggcaagctgctgaagcccgccgtggtgggcatcaagatcgacgtgaacagctggatcgagaacttcaccaagaccagcatcagagacccctgcgccggccccgtgtgcgactgcaagagaaacagcgacgtgatggactgcgtgatcctggacgacggcggcttcctgctgatggccaaccacgacgactacaccaaccagatcggcagattcttcggcgagatcgaccccagcctgatgagacacctggtgaacatcagcgtgtacgccttcaacaagagctacgactaccagagcgtgtgcgagcccggcgccgcccccaagcagggcgccggccacagaagcgcctacgtgcccagcgtggccgacatcctgcagatcggctggtgggccaccgccgccgcctggagcatcctgcagcagttcctgctgagcctgaccttccccagactgctggaggccgtggagatggaggacgacgacttcaccgccagcctgagcaagcagagctgcatcaccgagcagacccagtacttcttcgacaacgacagcaagagcttcagcggcgtgctggactgcggcaactgcagcagaatcttccacggcgagaagctgatgaacaccaacctgatcttcatcatggtggagagcaagggcacctgcccctgcgacaccagactgctgatccaggccgagcagaccagcgacggccccaacccctgcgacatggtgaagcagcccagatacagaaagggccccgacgtgtgcttcgacaacaacgtgctggaggactacaccgactgcggcggcgtgagcggcctgaaccccagcctgtggtacatcatcggcatccagttcctgctgctgtggctggtgagcggcagcacccacagactgctgtag

SEQ ID NO: 14790 - DNA, 3276 bp, Artificial Sequence
  derived and/or modified sequence
atggccgccggatgtctgctcgcgttgacccttaccctgttccaatcattgctgattggaccatcctccgaggagccattcccatccgccgtgaccatcaagtcatgggtggataagatgcaagaggatctggtcacactcgccaaaacagcttcaggcgtcaaccagctagtggatatttatgaaaaataccaggatctgtacacggtcgagcccaacaatgcacgccagctggttgaaattgcagctagagatattgaaaagcttttgagtaacagaagcaaagctctggtgcgattggcactggaggcagaaaaggtccaggccgcacaccagtggcgggaagacttcgccagcaacgaagttgtctactataacgctaaggacgaccttgacccagagaagaatgatagcgagccaggatcccagcgtatcaagccagtttttattgaagatgccaattttggccgtcagataagctaccagcacgcggccgtgcacattcccacggatatttatgagggttcgactatagtgctgaatgagctcaattggacaagtgcactggacgaagttttcaagaaaaatcgggaggaggacccttccctgctttggcaggtgttcggatcagcaactggattagctagatactatccggcctccccgtgggtcgataactcacggactccaaataaaattgatctgtatgacgtacggcgccggccttggtatatccagggcgcagcgagccctaaggatatgctgatcctggtggatgtctcgggaagtgtgtctggtttgacactaaagcttatacgcacttctgtgtcagagatgctggagacgttgagcgacgacgatttcgtgaacgtggcgtcattcaatagtaacgcccaggatgtaagctgttttcagcacctggtgcaagcgaatgtaaggaataagaaggtactgaaggatgccgtaaacaatattaccgccaagggaatcacggattataagaaaggattctcttttgcctttgagcagctgctaaactataacgtgtctagggccaattgtaacaaaattattatgctttttaccgacggtggagaggaacgagctcaggagatcttcaacaagtataataaggataaaaaagtaagggtatttaccttctcagtcgggcaacacaattatgatcggggtcctatccaatggatggcctgtgaaaacaaggggtattactatgaaattccgtcgatcggcgcgatccgcattaatacgcaagagtatttagatgtcttgggccgccccatggtgctagccggggacaaggccaagcaggtgcagtggaccaatgtttacctggatgcactggagctagggctggtgatcaccggaactctgccagtgtttaacatcacaggacagtttgaaaataagacaaatttgaagaaccagctgatcctgggcgtgatgggcgtggacgtgtctctagaggatatcaagagactcaccccacgttttaccctgtgccccaacggttattattttgccatcgacccaaacggctatgttctgctgcacccgaatctgcagcccaagaaccccaagagccaggagcctgttacactcgacttccttgatgcagaattagagaacgacatcaaggttgaaatccggaataagatgatcgatggcgaaagtggagagaaaacatttcggaccctagtcaagtcgcaagatgaacggtatatagataaaggcaatagaacatatacatggactcccgtgaacgggaccgactactcgttggctctcgttctgccgacttactccttctactatattaaggctaagctcgaggaaacaattacccaagcgcgctctaaaaaggggaaaatgaaggattccgaaaccctgaaaccggacaattttgaggaatcgggatacacttttatcgcacctcgggactattgcaacgacctgaagatctctgataacaataccgagttcctgctgaactttaatgagttcatcgaccgaaagacccctaacaatcccagctgtaacgcagacctgatcaacagggtactgctagatgccggcttcaccaatgaattagttcagaattattggtccaaacagaaaaatatcaagggcgtaaaggctcgcttcgtggtgacagacggcggaattacaagggtttatcctaaagaggctggagagaattggcaggagaaccctgagacatacgaggacagcttttataagcgttccttagacaacgataattatgtgttcacagcgccatatttcaataagtctggcccaggcgcctacgaaagtggcattatggtcagcaaggccgttgaaatttatatccagggaaaactgttaaaacctgcagtggtgggcataaaaattgatgttaatagctggatcgagaattttacaaaaacctctattagagacccatgcgcagggcctgtgtgcgactgtaaacggaactccgatgtgatggattgtgtgattctagacgacggaggtttcctcttaatggctaaccacgatgactacacaaatcagataggacgcttctttggcgaaatcgacccatcactgatgaggcatctggtaaatatctctgtgtatgcctttaataagagctacgattatcagtcagtgtgtgaacccggagccgctccgaaacagggcgctgggcacaggtctgcttacgtcccatccgtggctgacattctgcagatcggatggtgggctacagccgccgcttggtccatcttacagcagtttctgttatccctgacatttcctaggttattagaggctgtagagatggaagacgacgatttcacagcttctctgagtaaacaatcctgcattaccgaacagacccagtatttcttcgacaatgactctaaaagttttagcggggttctggactgcgggaactgcagcagaatctttcacggggagaaactgatgaatacaaacctcattttcattatggttgagtctaaaggaacctgcccatgtgatacgcggctgttgatccaggctgaacaaacttcggacggcccgaacccttgcgacatggtgaaacagcctcgctaccgaaaggggccagacgtttgctttgataacaatgttctcgaggattacaccgattgtggaggggtgagcggattgaatccaagtctttggtacattatcggcatccaattcctcctactatggctggtgagcggttctacgcaccggctcctgtag

SEQ ID NO: 14791 - DNA, 3276 bp, Artificial Sequence
  derived and/or modified sequence
atggctgctggctgcctgctggccctgaccctgaccctcttccagagcctgctgattggccccagcagcgaggagcccttccccagcgctgtgaccatcaagtcctgggtggacaagatgcaggaggacctggtgaccctggccaagacagccagcggcgtgaaccagctggtggacatctatgagaagtaccaggacctgtacacagtggagcccaacaatgcccggcagctggtggagattgctgcccgggacatcgagaagctgctgagcaacagaagcaaggccctggtgcggctggccctggaggccgagaaggtgcaggccgcccaccagtggagagaagattttgccagcaatgaggtggtgtactacaatgccaaggatgacctggaccctgagaagaatgacagcgagcccggcagccagaggatcaagcctgtgttcattgaagatgccaactttggccggcagatctcctaccagcacgccgctgtgcacatccccacagacatctatgagggcagcaccatcgtgctgaatgagctgaactggaccagcgccctggatgaggtgttcaagaagaaccgggaggaggaccccagcctgctgtggcaggtgtttggcagcgccaccggcctggcccgctactacccagccagcccctgggtggacaacagcaggacccccaacaagattgacctgtatgatgtgagaagaagaccctggtacatccagggcgccgccagccccaaggacatgctgatcctggtggatgtgtctggctctgtgtctggcctgaccctgaagctgatccgcacctctgtgtctgagatgctggagaccctgagtgatgatgactttgtgaatgtggccagcttcaacagcaatgcccaggatgtgtcctgcttccagcacctggtgcaggccaacgtgaggaacaagaaggtgctgaaggatgctgtgaacaacatcacagccaagggcatcacagactacaagaagggcttctcctttgcctttgagcagctgctgaactacaacgtgtcccgggccaactgcaacaagatcatcatgctgttcacagatggaggagaggagcgggcccaggagatcttcaacaagtacaacaaggacaagaaggtgcgggtcttcaccttctctgtgggccagcacaactatgaccggggccccatccagtggatggcctgtgaaaataaaggctactactatgagatccccagcatcggggccatccgcatcaacacccaggagtacctggatgtgctgggccggcccatggtgctggccggggacaaggccaagcaggtgcagtggaccaacgtgtacctggatgccctggagctgggcctggtgatcaccggcaccctgcctgtgttcaacatcaccggccagtttgagaacaagaccaacctgaagaaccagctgatcctgggcgtgatgggcgtggatgtgtccctggaggacatcaagaggctgaccccccgcttcaccctgtgccccaacggctactactttgccatcgaccccaacggctacgtgctgctgcaccccaacctgcagcccaagaaccccaagagccaggagcctgtgaccctggacttcctggatgctgagctggagaatgacatcaaggtggagatccggaacaagatgattgatggagagagcggggagaagaccttccgcaccctggtgaagagccaggatgagcgctacatcgacaagggcaacagaacctacacctggacccctgtgaatggaacagactacagcctggccctggtgctgcccacctacagcttctactacatcaaggccaagctggaggagaccatcacccaggcccggagcaagaagggcaagatgaaggacagcgagaccctgaagccagacaactttgaggagagcggctacaccttcatcgccccccgggactactgcaatgacctgaagatcagtgacaacaacacagagttcctgctgaacttcaatgagttcatcgacaggaagacccccaacaaccccagctgcaatgctgacctgatcaacagagtgctgctggatgctggcttcaccaatgagctggtgcagaactactggagcaagcagaagaacatcaagggcgtgaaggccaggtttgtggtgacagatggcggcatcaccagggtgtaccccaaggaggccggggagaactggcaggagaaccctgagacctatgaggacagcttctacaagaggagcctggacaatgacaactacgtgttcaccgccccctacttcaacaagagcggccctggggcctatgagagcggcatcatggtgtccaaggctgtggagatctacatccagggcaagctgctgaagccagctgtggtgggcatcaagattgatgtgaacagctggattgagaacttcaccaagaccagcatccgggacccctgtgccggccctgtgtgtgactgcaagaggaacagtgatgtgatggactgtgtgatcctggatgatggcggcttcctgctgatggccaaccatgatgactacaccaaccagatcggccgcttctttggagaaattgaccccagcctgatgaggcacctggtgaacatctctgtgtatgccttcaacaagagctatgactaccagagcgtgtgtgagcccggggccgcccccaagcagggcgccggccacaggtctgcctacgtgcccagcgtggccgacatcctgcagatcggctggtgggccacagctgctgcctggagcatcctgcagcagttcctgctgagcctgaccttcccccggctgctggaggccgtggagatggaggatgatgacttcaccgccagcctgagcaagcagagctgcatcacagagcagacccagtacttctttgacaatgacagcaagagcttctctggagtgctggactgtggcaactgcagccgcatcttccacggggagaagctgatgaacaccaacctgatcttcatcatggtggagagcaagggcacctgcccctgtgacacccggctgctgatccaggccgagcagaccagtgatggccccaacccctgtgacatggtgaagcagccccgctacaggaagggcccagatgtgtgctttgacaacaacgtgctggaggactacacagactgtggcggcgtgtctggcctgaaccccagcctgtggtacatcatcggcatccagttcctgctgctgtggctggtgtctggcagcacccaccggctgctgtag

SEQ ID NO: 14792 - DNA, 3276 bp, Artificial Sequence
  derived and/or modified sequence
atggccgccggctgcctgctggccctgaccctgaccctgttccagtccctgctgattggaccgagttctgaggagcctttcccttccgcggtgaccataaagtcctgggtcgataaaatgcaggaagatctggtgacattggccaagacagcctccggcgtgaaccagttggttgacatctatgaaaaataccaggacctctatactgtggagcctaataacgctaggcaattagtggaaatcgcagcccgggacattgagaagctgttatcaaaccgctcaaaagcccttgttagactcgctttggaggccgagaaagtgcaggccgcccatcagtggagagaggacttcgcctctaatgaagtggtttactacaacgctaaagacgacctcgaccccgaaaagaacgactcagaacccgggagccagcgcatcaaacccgtttttatcgaagacgcaaattttggaaggcagattagttaccagcacgccgcggtgcacattcctacagatatctatgaaggatctactatcgtgctcaatgagcttaactggacatctgcgctagacgaagtgtttaaaaagaatagagaggaagaccccagtcttttgtggcaggtcttcggctcggctactggacttgcccgatattatccagcttctccttgggtggataattcccgcacaccaaacaaaatcgacttgtatgacgtgagacgtcgaccttggtatatacagggcgcggcctcaccgaaagacatgttaatactggtcgatgtctctggtagcgtctcagggctgactctgaaactgatcagaacttccgtcagcgagatgctggaaacactctccgacgatgatttcgttaacgttgcgagttttaattccaacgcacaggacgtctcgtgttttcagcacctagtccaggcaaatgttcgcaataaaaaggtgctgaaagatgctgttaacaatatcaccgcgaaggggatcactgactataagaagggcttttcctttgcattcgagcagctcttgaattacaatgtctcgagggctaattgcaataagataataatgctctttactgatggcggtgaggagagagcccaggagatcttcaataagtacaacaaggacaaaaaagtcagggtctttaccttctcggtcggacaacataattacgatagaggcccgatccaatggatggcctgcgagaacaaaggctactactacgagattcccagcattggcgcaattaggattaacacccaggagtacctcgacgtgctcggaaggcccatggttcttgctggagataaggccaaacaggtccagtggactaacgtttacctggatgctctggaactgggcctggtgattactggcactcttcccgtgttcaacataacaggtcagtttgagaacaagacaaacctcaaaaatcagctcatcctgggtgtgatgggtgttgatgtgagtctagaggatattaagagactcacgccaagatttactctatgccccaacggatattacttcgcaatcgatcctaatgggtacgttttactgcaccctaacctacagcccaagaatcctaaaagtcaagagccggtcacacttgacttcctggacgcggaactcgaaaatgacatcaaggtggaaatcagaaacaagatgattgacggcgagtctggggagaagactttcaggactctggtgaagtcccaggacgaaaggtacatcgacaaaggcaacaggacgtacacttggactcctgtgaatggtaccgattactcactcgccctcgtcctacctacctacagcttctactacattaaagctaagctggaggagacgatcactcaggcccgtagcaagaagggcaagatgaaagacagcgaaaccctgaaacctgataatttcgaggagagtggatatacatttattgcacccagggactattgcaatgacctcaaaatttccgataacaacacagagttcctgctgaattttaacgagtttattgataggaaaacaccgaataatcctagctgcaacgctgacctgataaatagagtcctgctggacgccgggtttaccaatgaattggtccagaactattggtcgaagcagaaaaacatcaaaggagtgaaagcccggttcgtggtcactgatggcggcatcaccagagtgtatcctaaggaggctggggaaaattggcaggaaaaccctgaaacctatgaagattcattctataaaaggtcgctggacaacgacaactacgtcttcaccgccccatacttcaataaaagtggaccgggtgcctacgagtccgggatcatggtgtccaaggccgtcgagatctatatccaggggaaacttttgaagcccgccgtagttgggataaagatcgatgtaaactcatggattgagaactttactaagacctccatccgcgatccttgcgcgggaccggtttgcgattgcaagcgaaatagcgatgtcatggattgtgtaatcttggacgatggggggttcctgctaatggccaaccacgatgactacacaaatcagataggtcgcttcttcggcgaaatcgatcctagtctgatgcggcacttggtgaacatctccgtatatgcgttcaacaagtcatatgactaccagtccgtgtgcgagcctggggcagccccaaagcagggagcggggcataggtccgcctatgtgccctccgtggcagatattctccagatcgggtggtgggccacagctgctgcctggtctattctgcaacagttcctgttatctctgacgttccctaggctgctggaagccgttgagatggaagatgacgacttcaccgccagcctgagcaaacagtcttgcattacggagcaaacccagtactttttcgacaatgactccaaaagcttctcgggtgtgctggactgtggaaattgctcgcggatcttccatggtgagaagctgatgaacacaaatttgatatttatcatggtggaatccaaagggacttgtccatgtgatacaagactcttgattcaagctgagcagacctctgatggaccaaacccttgcgacatggtgaaacagcctcgataccggaaaggtccagatgtctgtttcgacaataatgtgctggaggactataccgactgtggaggagtcagcggattaaatcccagcctttggtacatcatcgggattcagtttctgctcctgtggcttgtgtctggatcaactcataggttactgtag

SEQ ID NO: 14793 - DNA, 3276 bp, Artificial Sequence
  derived and/or modified sequence
atggctgcaggctgcctccttgctcttacactgaccctgtttcagagtctgctgatcggtcctagctctgaagaaccttttcccagcgccgtcacgattaagtcatgggttgataagatgcaggaggatctagtcaccctggccaaaaccgcgtccggggtgaatcaactggtggacatttatgaaaaatatcaggacctgtatacggtggagccaaacaacgcaagacagcttgtggagattgcagccagagatatcgaaaagctgctttctaataggtctaaagctctggtgaggctggcgctggaagcagagaaagtacaagcagcccaccagtggcgcgaggattttgcatcaaatgaggttgtttactacaatgcaaaagacgacttggatcctgagaagaacgactccgaacctggctcccagcgcatcaaacccgtattcatcgaagacgccaacttcgggagacagatctcctatcaacacgccgcagtgcatattcccacggatatctacgagggaagcacaattgttttgaacgaactcaactggacaagcgccctggatgaggtgttcaagaaaaaccgcgaggaggacccctccctgctgtggcaggtgtttgggagcgcaactggactggccaggtattatcccgcatcgccttgggtggataactcccgcacacctaacaagatagacttgtacgatgtgaggagacggccttggtatattcaaggggctgcaagtcccaaagacatgctgatcctggtcgatgtaagcggctccgttagtggtttaaccctgaaactaatccgcacaagcgttagcgagatgctcgaaactctctccgacgacgacttcgtgaacgtggcgtcctttaacagcaacgcacaggatgttagctgctttcagcacctggttcaggcgaacgtaaggaacaagaaggtactgaaagacgcagtgaataatattacagcaaaagggatcactgactataaaaaaggtttctcttttgcctttgaacagctcctaaattataacgtttcgagggcaaactgcaacaagattattatgttgtttaccgacggaggggaggagcgagcccaggagatatttaataagtataataaagacaagaaagtgagagtgttcactttttctgtgggccagcacaattatgatcgcggacctatccagtggatggcctgtgaaaataagggttattactatgaaatcccttctattggggctattaggattaacactcaggagtacctcgacgtgttaggcagaccaatggtattggcaggggataaagctaagcaggtgcagtggactaacgtgtacctggatgcactggaattaggtctggtgatcacaggaaccctgccagtctttaatatcaccgggcagtttgaaaacaaaacaaacttgaagaaccagctgattctgggggtgatgggcgtggatgtctctttggaggacatcaagaggcttactcctaggttcactctgtgccccaatggctactacttcgctatagatccaaacggctatgtactcctgcatccaaacctgcagccaaagaatccaaagagccaggagcccgtaaccctcgactttctcgacgccgaactggagaatgacatcaaagtcgagatccgtaacaaaatgatcgacggagaaagcggtgagaagaccttccggaccttggtgaagagtcaagatgaaaggtatatcgacaagggaaatcgcacctacacttggacccccgtgaacggcacagactactcactggcgctggtactgccaacgtacagtttctactatataaaagccaagctggaggagaccattacacaggcacgatcaaagaagggaaagatgaaagatagcgagacgctgaagcctgacaactttgaggagtccggctacacttttatagctccacgagactattgcaacgatcttaagatctctgacaacaacactgagttcctgctgaatttcaacgaatttattgaccgaaagacgcctaataatccttcctgcaatgcagatttgatcaaccgggtgcttctggatgctggattcacgaatgaactcgtacagaattactggtctaagcagaagaatatcaaaggtgtgaaagcgaggttcgtggtcaccgacggcggaattacacgcgtctatcccaaggaagctggtgagaactggcaggagaatcctgagacatacgaggactcgttttataagcgcagcctggacaacgataattacgtcttcactgccccttacttcaacaagtcagggccaggcgcttatgaatccgggatcatggtgagtaaggctgttgagatctatattcaagggaaattgcttaagcctgccgtcgtgggaatcaaaattgacgtgaattcttggatcgaaaattttacaaagactagcattagggatccctgtgccggaccagtctgtgactgtaaacgaaattccgatgtcatggactgcgtgattctggatgatgggggattcctgttgatggccaatcatgacgactacaccaatcagatcgggagattctttggcgaaattgacccatctctcatgaggcacctggtaaacattagcgtgtacgctttcaataagtcgtacgattatcaaagcgtgtgcgagcctggcgcagcccctaagcagggagcagggcacaggtccgcgtatgttccatccgttgcagatattctgcagatcggttggtgggctaccgccgcagcgtggagtatcctgcagcagttcctgttaagccttacatttccgagacttctagaagctgtagaaatggaggatgatgacttcaccgccagtctgtcaaaacaatcctgcattacagaacagacacagtactttttcgataatgattccaaatccttctccggcgtgctggactgtggaaactgttctcggatctttcacggcgaaaagttgatgaacacgaacctaattttcatcatggtggaatctaagggaacatgtccatgtgacactaggttattgatccaggccgagcagacctctgatgggcctaacccgtgcgacatggttaagcagccacggtaccggaagggtcctgatgtgtgcttcgacaacaatgtcctggaggattacacagactgcggcggagtctctggtctcaacccttccctgtggtacatcattgggatccagtttctcctactgtggctggtcagcggatccacgcaccggctgctctag

SEQ ID NO: 14794 - DNA, 7563 bp, Artificial Sequence
  derived and/or modified sequence
agggaggaaaccgagagggagagcgagagcgcgcgagcgccggcgggctcgccgaggtctgtttccaaagtcgcccttgatggcggcggaggcaaggcggccgcggcgcggagcagccgacgcacgctagtgggtccgcccgccaccgccccttcctcggcgtccgctcccgcccttgccgtcccccgcgcggctccgcgcctcgggccccgggcgcagccagccctccagacgcccgcggtcccggcggcgtgtgctgctcttcctccgcccgcggtttccagcgccgctccttcccccgcttgggcagggagggggcattgatcttcgatcgcgaagatggctgctggctgcctgctggccttgactctgacacttttccaatctttgctcatcggcccctcgtcggaggagccgttcccttcggccgtcactatcaaatcatgggtggataagatgcaagaagaccttgtcacactggcaaaaacagcaagtggagtcaatcagcttgttgatatttatgagaaatatcaagatttgtatactgtggaaccaaataatgcacgccagctggtagaaattgcagccagggatattgagaaacttctgagcaacagatctaaagccctggtgcgcctggcattggaagcggagaaagttcaagcagctcaccagtggagagaagattttgcaagcaatgaagttgtctactacaatgcaaaggatgatctcgatcctgagaaaaatgacagtgagccaggcagccagaggataaaacctgttttcattgaagatgctaattttggacgacaaatatcttatcagcacgcagcagtccatattcctactgacatctatgagggctcaacaattgtgttaaatgaactcaactggacaagtgccttagatgaagttttcaaaaagaatcgcgaggaagacccttcattattgtggcaggtttttggcagtgccactggcctagctcgatattatccagcttcaccatgggttgataatagtagaactccaaataagattgacctttatgatgtacgcagaagaccatggtacatccaaggagctgcatctcctaaagacatgcttattctggtggatgtgagtggaagtgttagtggattgacacttaaactgatccgaacatctgtctccgaaatgttagaaaccctctcagatgatgatttcgtgaatgtagcttcatttaacagcaatgctcaggatgtaagctgttttcagcaccttgtccaagcaaatgtaagaaataaaaaagtgttgaaagacgcggtgaataatatcacagccaaaggaattacagattataagaagggctttagttttgcttttgaacagctgcttaattataatgtttccagagcaaactgcaataagattattatgctattcacggatggaggagaagagagagcccaggagatatttaacaaatacaataaagataaaaaagtacgtgtattcacgttttcagttggtcaacacaattatgacagaggacctattcagtggatggcctgtgaaaacaaaggttattattatgaaattccttccattggtgcaataagaatcaatactcaggaatatttggatgttttgggaagaccaatggttttagcaggagacaaagctaagcaagtccaatggacaaatgtgtacctggatgcattggaactgggacttgtcattactggaactcttccggtcttcaacataaccggccaatttgaaaataagacaaacttaaagaaccagctgattcttggtgtgatgggagtagatgtgtctttggaagatattaaaagactgacaccacgttttacactgtgccccaatgggtattactttgcaatcgatcctaatggttatgttttattacatccaaatcttcagccaaagaaccccaaatctcaggagccagtaacattggatttccttgatgcagagttagagaatgatattaaagtggagattcgaaataagatgattgatggggaaagtggagaaaaaacattcagaactctggttaaatctcaagatgagagatatattgacaaaggaaacaggacatacacatggacacctgtcaatggcacagattacagtttggccttggtattaccaacctacagtttttactatataaaagccaaactagaagagacaataactcaggccagatcaaaaaagggcaaaatgaaggattcggaaaccctgaagccagataattttgaagaatctggctatacattcatagcaccaagagattactgcaatgacctgaaaatatcggataataacactgaatttcttttaaatttcaacgagtttattgatagaaaaactccaaacaacccatcatgtaacgcggatttgattaatagagtcttgcttgatgcaggctttacaaatgaacttgtccaaaattactggagtaagcagaaaaatatcaagggagtgaaagcacgatttgttgtgactgatggtgggattaccagagtttatcccaaagaggctggagaaaattggcaagaaaacccagagacatatgaggacagcttctataaaaggagcctagataatgataactatgttttcactgctccctactttaacaaaagtggacctggtgcctatgaatcgggcattatggtaagcaaagctgtagaaatatatattcaagggaaacttcttaaacctgcagttgttggaattaaaattgatgtaaattcctggatagagaatttcaccaaaacctcaatcagagatccgtgtgctggtccagtttgtgactgcaaaagaaacagtgacgtaatggattgtgtgattctggatgatggtgggtttcttctgatggcaaatcatgatgattatactaatcagattggaagattttttggagagattgatcccagcttgatgagacacctggttaatatatcagtttatgcttttaacaaatcttatgattatcagtcagtatgtgagcccggtgctgcaccaaaacaaggagcaggacatcgctcagcatatgtgccatcagtagcagacatattacaaattggctggtgggccactgctgctgcctggtctattctacagcagtttctcttgagtttgacctttccacgactccttgaggcagttgagatggaggatgatgacttcacggcctccctgtccaagcagagctgcattactgaacaaacccagtatttcttcgataacgacagtaaatcattcagtggtgtattagactgtggaaactgttccagaatctttcatggagaaaagcttatgaacaccaacttaatattcataatggttgagagcaaagggacatgtccatgtgacacacgactgctcatacaagcggagcagacttctgacggtccaaatccttgtgacatggttaagcaacccagataccgaaaagggcctgatgtctgctttgataacaatgtcttggaggattatactgactgtggtggtgtttctggattaaatccctccctgtggtatatcattggaatccagtttctactactttggctggtatctggcagcacacaccgcctgttatgaccttctaaaaaccaaatctgcatagttaaactccagaccctgccaaaacatgagccctgccctcaattacagtaacgtagggtcagctataaaatcagacaaacattagctgggcctgttccatggcataacactaaggcgcagactcctaaggcacccactggctgcatgtcagggtgtcagatccttaaacgtgtgtgaatgctgcatcatctatgtgtaacatcaaagcaaaatcctatacgtgtcctctattggaaaatttgggagtttgttgttgcattgttggtgattacatgtgaaagggttccccatacaattgttaatgaaccataagaaatgtcttgatattgacctggaattttgacttgctgcaattttactaagaaaatctctaaggggaaagaaattatttttgccttcactttttcttctgtgaaaagttaattcctgctttaagtagcaattattgaaatatatagagaaagagagaattaacattggtctaaattgttgaaatataaataatggctaattttctatgaaaaatttgccatgaataaaatgccttatgaagaacggcttctttgccaaaaataaaacacaattgatgaccaattcaattttgatggggtaatgaattgatggtttgaaaatagtaactaagaaattattaaactaaaggtgcttgagggagaaattagaatatgtgacatatttcctcataaatgtaagcaagcccttaataaatgctttgatgtaatgttccttttgttcacagtacagttatgtagtgctagccagatatttaaaaatgctctaagaaaagcttgtcaggggggagggggaaatgtttttcttgtgataaatgaactttggtttaccaagggtattttgcatgatgctgctgctattttaacttttcagttgttttttctcttactgtagagtgtagtcattgaaaagttaactgagtgatattgttatgtaagaatctgaaccttgcagtgtaaatgcacttaagtcatctttaaaatgttgttaaactactctgaatatactgtgcaatgtaaatgctgaatgattggggttagataaatggtgaaatgagaattaatgaattttatacagattcatgctttcgcctgataacctatgtacagatattttaagtacataaatcagatttgacacatttattttttgaaaagtacatatatgttctcaatgaagattcatcctaggtttcctctttgttcgtttcaatagtagcacatacaatccaaaagttcctgctactgctgcttttgcccttccattttaaatggtatgatcgtttggccaaaatttccatgcaagttgataagggttttacaataatctgaacaaataggaaaccttgaatctctatgtatgcacatgaatacttgattgtgaataataaaagttgttttttatacagcctcattggtgaaaatggttagtgtagtaaatcagatatttcattatagactaatatggtagcagattatttatgcttttaaaaattattttctggagcaaacagtatttgaagaaaaggtaaaaactatgaatgtgtaattctaagaatagttaataattttactgaaggctgaacgtatgtagatattttttatgataaaatgcagtttttctttttttggaacatgccaattactggtatgtgtatatgctggaaattttcttacatatcctttttaagtcaaagttattaacattatccagcatgctttaatatgctccacatatcaaagatataaccaataatttaacgtagcttaaaagataacatttgttttgtttttagctttgcatacatttgtaattccctcccaccaccaatataccttaggtaccatttgtgtacatttcaagattttttttttcaataaaaaggtggggggaaatggaatcactttgccaactattgttctaagagttgacatcagttaccatttctaatgcattgttgtgattttgtagtgtcattcataactggtattgacattttagaaaacaccaaagtgatttaaaatatatgtggggaaaaaaacttctcactctagtaacaatgttttaatcatgttgtttgttaaatatttaaaagttattgttcaatttttgctagactatcttaaatcatgatagtgttgggaagggggtatcaaaatataaaattgttagtttgtgtatataaacaatgcacattaaaacaattgaattgcttccagcatacaacaaactaccttaaaattatgttcaaaatctattaaatatattttcatggctaatgtcgagtatatgttttcatcaattacattgttattgtattaatcgcggttaaacttggcatctcttggcaggatcctatttaatttctgttgccatcaaaatatatttatatgcatgagttttgctataaacctttattttctgctataaagttatatattatgacaaccataaatgcaattacaaattgggtaagaacaagctgaataaaagttgttcccatgactaatattagtcttcatgcttttagcatattttttaagacagtaacactcatcccatcaaattattacattacatttagtatttttctgagttacattgacaagaacttaaattatagcctgttattaatattgatttccaacgactgaacagtacaacagatcaataaaaaagtttatacactgctttaactaatttttgttatactcatgtggcttagtgtagttagtcactaaaacagagttcaagtgagcttggcaatggtgttgagtaacaagaaagaattttgcattaatgatttctttttattttcctcatttaaacaaccagcattactgccaaacaccaaccgtggtccatatttgtaacaggtttttaacatgacatagttagcaagtttgattgaagagatttttaggtcctgggcctataagattttagtatgatcttttttcatgtttctaatgcttgaggtgttactgcttaacttgggaaaaaaaaaaacaaaaaacagtgttcctgccatttgtaagttttcctataatattccttttattaactttaaaactggacttatcgggttcaaataggcagtatcccttttaagtgacctttgcaacccaagtgttacttgcttatttgatgctctcttgtattttaaatctcatttaaatctttgtctgtgaccaacaaagcttaagattttgtcttcatttaaaactctgaatctattccattgatcatgttagacgttcaaatgtttaatggtatagtctgacctagtgaaacaaaatggatgttgttactttttttaaagaatagaatgaaataactatttcacttgcccaaaattttaaatattttttcatctaaacttgtattgtttcccatagcagaatgtcaatattcacagtacatttctgtaaagagcaaaccaatataatgttttgagtgttgaaaaaaattccagatttttgaagaattagacaactcttcatctaccttatttctagttcacacagttatctcaaattccactgaaactaatgggatactgtcttgtgtagatgccagttgagtttataatgtgacctagtaaagctgtcttttttgttgtgttgtatgagtgtcggatcatgcttttaggaatacttttattaaaatggtgtgcattcatgcaaaaggccaactggcttttgtgaacaatagatcttttctcccctttattttgttctcttgacacttttgtgaaaattacctagcctgataaaaacattttgtaaaaatttgtataatactgttataaaatatttataatcccagaaaatgttgtgttaaatcttgtgcaaaaacagtatattcagaataaaagtttatcatttaaagtca

SEQ ID NO: 14795 - protein, 598 aa, Artificial Sequence
  derived and/or modified sequence
MVQKTSMSRGPYPPSQEIPMEVFDPSPQGKYSKRKGRFKRSDGSTSSDTTSNSFVRQGSAESYTSRPSDSDVSLEEDREALRKEAERQALAQLEKAKTKPVAFAVRTNVGYNPSPGDEVPVQGVAITFEPKDFLHIKEKYNNDWWIGRLVKEGCEVGFIPSPVKLDSLRLLQEQKLRQNRLGSSKSGDNSSSSLGDVVTGTRRPTPPASAKQKQKSTEHVPPYDVVPSMRPIILVGPSLKGYEVTDMMQKALFDFLKHRFDGRISITRVTADISLAKRSVLNNPSKHIIIERSNTRSSLAEVQSEIERIFELARTLQLVALDADTINHPAQLSKTSLAPIIVYIKITSPKVLQRLIKSRGKSQSKHLNVQIAASEKLAQCPPEMFDIILDENQLEDACEHLAEYLEAYWKATHPPSSTPPNPLLNRTMATAALAASPAPVSNLQGPYLASGDQPLERATGEHASMHEYPGELGQPPGLYPSSHPPGRAGTLRALSRQDTFDADTPGSRNSAYTELGDSCVDMETDPSEGPGLGDPAGGGTPPARQGSWEDEEEDYEEELTDNRNRGRNKARYCAEGGGPVLGRNKNELEGWGRGVYIR

SEQ ID NO: 14796 - protein, 548 aa, Artificial Sequence
  derived and/or modified sequence
SGSLYFQGSAESYTSRPSDSDVSLEEDREALRKEAERQALAQLEKAKTKPVAFAVRTNVGYNPSPGDEVPVQGVAITFEPKDFLHIKEKYNNDWWIGRLVKEGCEVGFIPSPVKLDSLRLLQEQKLRQNRLGSSKSGDNSSSSLGDVVTGTRRPTPPASGKSHRHATEHVPPYDVVPSMRPIILVGPSLKGYEVTDMMQKALFDFLKHRFDGRISITRVTADISLAKRSVLNNPSKHIIIERSNTRSSLAEVQSEIERIFELARTLQLVALDADTINHPAQLSKTSLAPIIVYIKITSPKVLQRLIKSRGKSQSKHLNVQIAASEKLAQCPPEMFDIILDENQLEDACEHLAEYLEAYWKATHPPSSTPPNPLLNRTMATAALAASPAPVSNLQGPYLASGDQPLERATGEHASMHEYPGELGQPPGLYPSSHPPGRAGTLRALSRQDTFDADTPGSRNSAYTELGDSCVDMETDPSEGPGLGDPAGGGTPPARQGSWEDEEEDYEEELTDNRNRGRNKARYCAEGGGPVLGRNKNELEGWGRGVYIR

SEQ ID NO: 14797 - DNA, 1797 bp, Artificial Sequence
  derived and/or modified sequence
atggtgcagaagacaagcatgtctcgcggaccctatccaccgtctcaggaaatccctatggaagtatttgacccaagccctcaaggcaagtactcaaagcgtaagggtaggtttaaacgatccgatggctctaccagcagcgacactacctccaattcttttgtgcggcaaggttccgccgagagctataccagccggccctctgacagcgacgtttccctggaggaggaccgcgaggcactgaggaaggaagccgaacgccaagcccttgcacaattagagaaagcaaagactaagcctgtcgccttcgccgtcaggaccaacgtgggctataatccctccccaggggacgaagtgccagtgcagggcgtcgctatcaccttcgaaccgaaagattttctccacattaaggaaaagtacaataatgattggtggatcggccgccttgtgaaagagggatgcgaggtcgggttcataccgtcccctgtcaaactagattctctacggttgttacaggaacagaaattacggcaaaatcggttaggaagctcaaagtccggcgacaactcatcatcttccctgggggacgtggtcaccggcacacgacggcccacgcctccagcatccgcaaagcagaaacagaagtcaacagagcatgtacctccctacgatgtggtgcccagtatgcgaccaatcattctcgtagggccttcgctgaaggggtacgaagtcactgatatgatgcagaaggccttgtttgatttcctcaaacacagattcgacggaaggattagcattacccgagttacagcggacatctccctcgccaagagatctgtgcttaacaatccctccaagcacataatcattgagcgttccaatactcggtctagtttggccgaggtccagagtgaaatcgagcgtatattcgaactagccaggaccctacagctcgtcgcccttgatgcagacactattaaccaccccgcccaattaagcaagacatctcttgcccctatcatagtgtacataaagattacctctcccaaggtgctgcaacggctcattaagtctcgtggaaaatcacagtccaagcatttgaacgtccagattgccgccagcgagaaactggcgcagtgcccaccagaaatgttcgacatcatacttgatgagaatcagctcgaagacgcgtgtgagcatttagctgaataccttgaggcgtactggaaggcgacgcaccctcccagcagcacgccccctaaccccctactaaaccgcactatggcaactgcagcgctagcagcatcacctgcacccgtcagcaacctgcagggcccctatctggcctccggggaccagcccctcgaacgcgctacaggcgagcacgccagtatgcacgaatatccaggagaactaggccagcctcccggactgtatccaagcagccaccctccagggcgtgcaggtacccttcgcgctctcagcaggcaggatacattcgatgctgacacaccaggatctaggaattcggcctatacggagctgggtgattcatgcgttgatatggaaaccgacccttccgaagggcctgggctcggcgacccggcaggagggggcactcccccagcccggcagggttcttgggaggatgaagaagaagattacgaggaggagctgactgataatcggaaccgtgggaggaataaggcaaggtactgcgccgaggggggggggcctgtgttaggcaggaataagaatgaactcgaaggctgggggcgcggtgtatacattagatag

SEQ ID NO: 14798 - DNA, 1647 bp, Artificial Sequence
  derived and/or modified sequence
tccgggagcctgtattttcagggcagcgccgaaagctacacaagccgccccagcgatagtgacgtatcacttgaagaagacagggaagctctccgaaaagaagctgagcgccaggctctggcccagttagaaaaggccaagaccaagcccgtggcttttgccgtccggactaatgtcgggtacaaccccagtcctggcgacgaggtgcccgttcagggggttgcgattacatttgagcccaaagattttctacatataaaggagaaatacaacaatgattggtggatcggtagactggtgaaggaaggttgcgaggtaggtttcataccttcccctgtcaaactggattctcttcggcttctccaggaacagaagttgaggcaaaatagattgggctccagtaagagcggtgacaactccagctcctcacttggcgatgtagtgactgggacacgacgacccactccccccgctagcggcaagagccaccgtcacgcaacagagcacgtgcctccatacgacgtagtgccctcaatgaggcccattatcctggtcgggcccagcttgaagggctacgaggtgacagacatgatgcaaaaagcactgttcgacttcctcaagcacagattcgacggacgaattagcataactagggtgacagccgacattagcctcgccaaacgttctgtgttaaacaatccctctaagcacatcataatcgagcgctccaatacacggtctagtctcgctgaggtccagtcagagattgaacgcatctttgagttagctcgaacactccagcttgtcgcactggacgctgataccattaaccatccagcccagctgagtaagacctccctagccccgataatagtatatatcaaaattacatcccccaaggtgctgcagcgccttatcaagtcaagaggtaagtcccagtccaagcatttaaacgtccagattgcggcctctgaaaaacttgctcagtgcccccctgagatgttcgacatcatcctggacgagaatcagttggaagacgcctgcgaacacctcgccgagtacttggaggcttactggaaagcaactcatcctccctctagcacccccccaaaccctctcctcaataggacgatggccaccgcggccttagccgcttccccagcacccgtgagtaatctgcaaggtccgtatctggctagcggcgaccagcccctggagagggccactggggagcacgcgagcatgcacgaatatccgggcgaactcggccagccccccggcctgtacccatcaagccacccccctggtagagctggcacattacgagccctgagcagacaggacacattcgacgccgatacccccggatctcgtaactccgcctacacagagttgggcgatagctgtgttgacatggaaacagacccttctgagggcccaggcttgggtgaccctgccggtggcggcacccctcccgctcgacaaggctcatgggaagacgaggaagaggattacgaagaagagttgacagataataggaataggggacgaaataaagccagatattgcgctgaaggagggggaccggtgctgggcagaaacaagaacgagctcgaaggatgggggaggggggtttacatcaggtag

SEQ ID NO: 14799 - DNA, 1797 bp, Artificial Sequence
  derived and/or modified sequence
atggtgcagaagacctccatgagccggggcccctacccacccagccaggagatccccatggaggtgtttgaccccagcccccagggcaagtacagcaagaggaagggccgcttcaagagaagtgatggcagcaccagcagtgacaccaccagcaacagctttgtgcggcagggcagcgctgagagctacaccagccggcccagcgacagtgatgtgtccctggaggaggaccgggaggccctgaggaaggaggccgagcggcaggccctggcccagctggagaaggccaagaccaagcctgtggcctttgctgtgaggaccaacgtgggctacaaccccagccctggagatgaggtgcctgtgcagggcgtggccatcacctttgagcccaaggacttcctgcacatcaaggagaagtacaacaatgactggtggattggccgcctggtgaaggagggctgtgaggtgggcttcatccccagccctgtgaagctggacagcctgcggctgctgcaggagcagaagctgcggcagaaccggctgggcagcagcaagagcggggacaacagcagcagcagcctgggagatgtggtgacaggcacccggcggcccaccccaccagccagcgccaagcagaagcagaagagcacagaacatgtgcccccctatgatgtggtgcccagcatgaggcccatcatcctggtgggccccagcctgaagggctatgaggtgacagacatgatgcagaaggccctgtttgacttcctgaagcacagatttgatggccgcatcagcatcaccagggtgacagctgacatcagcctggccaagaggtctgtgctgaacaaccccagcaagcacatcatcatcgagaggagcaacaccaggagcagcctggccgaggtgcagagcgagattgaaagaatttttgagctggcccggaccctgcagctggtggccctggatgctgacaccatcaaccacccagcccagctgagcaagaccagcctggcccccatcatcgtgtacatcaagatcaccagccccaaggtgctgcagaggctcatcaagagccggggcaagagccagagcaagcacctgaatgtgcagattgctgccagcgagaagctggcccagtgccccccagagatgtttgacatcatcctggatgagaaccagctggaggatgcctgtgagcacctggccgagtacctggaggcctactggaaggccacccacccccccagcagcaccccacccaaccccctgctgaacagaaccatggccacagctgccctggccgccagccctgcccctgtgagcaacctgcagggcccctacctggccagcggggaccagcccctggagcgggccactggagagcacgcctccatgcatgagtacccaggagagctgggccagcccccaggcctgtaccccagcagccaccccccaggccgggccggcaccctgcgggccctgagccggcaggacacctttgatgctgacaccccaggcagcaggaacagcgcctacacagagctgggggacagctgtgtggacatggagacagaccccagcgagggccctggcctgggggaccctgctgggggcggcaccccaccagcccggcagggctcctgggaggatgaggaggaggactatgaggaggagctgacagacaacagaaacagaggaagaaacaaggcccgctactgtgccgagggcggcggccctgtgctgggcaggaacaagaatgagctggagggctggggccggggcgtgtacatcagatag

SEQ ID NO: 14800 - DNA, 1647 bp, Artificial Sequence
  derived and/or modified sequence
tctggcagcctgtacttccagggcagcgctgagagctacaccagccggcccagcgacagtgatgtgtccctggaggaggaccgggaggccctgaggaaggaggccgagcggcaggccctggcccagctggagaaggccaagaccaagcctgtggcctttgctgtgaggaccaacgtgggctacaaccccagccctggagatgaggtgcctgtgcagggcgtggccatcacctttgagcccaaggacttcctgcacatcaaggagaagtacaacaatgactggtggattggccgcctggtgaaggagggctgtgaggtgggcttcatccccagccctgtgaagctggacagcctgcggctgctgcaggagcagaagctgcggcagaaccggctgggcagcagcaagagcggggacaacagcagcagcagcctgggagatgtggtgacaggcacccggcggcccaccccaccagccagcggcaagagccacagacatgccacagaacatgtgcccccctatgatgtggtgcccagcatgaggcccatcatcctggtgggccccagcctgaagggctatgaggtgacagacatgatgcagaaggccctgtttgacttcctgaagcacagatttgatggccgcatcagcatcaccagggtgacagctgacatcagcctggccaagaggtctgtgctgaacaaccccagcaagcacatcatcatcgagaggagcaacaccaggagcagcctggccgaggtgcagagcgagattgaaagaatttttgagctggcccggaccctgcagctggtggccctggatgctgacaccatcaaccacccagcccagctgagcaagaccagcctggcccccatcatcgtgtacatcaagatcaccagccccaaggtgctgcagaggctcatcaagagccggggcaagagccagagcaagcacctgaatgtgcagattgctgccagcgagaagctggcccagtgccccccagagatgtttgacatcatcctggatgagaaccagctggaggatgcctgtgagcacctggccgagtacctggaggcctactggaaggccacccacccccccagcagcaccccacccaaccccctgctgaacagaaccatggccacagctgccctggccgccagccctgcccctgtgagcaacctgcagggcccctacctggccagcggggaccagcccctggagcgggccactggagagcacgcctccatgcatgagtacccaggagagctgggccagcccccaggcctgtaccccagcagccaccccccaggccgggccggcaccctgcgggccctgagccggcaggacacctttgatgctgacaccccaggcagcaggaacagcgcctacacagagctgggggacagctgtgtggacatggagacagaccccagcgagggccctggcctgggggaccctgctgggggcggcaccccaccagcccggcagggctcctgggaggatgaggaggaggactatgaggaggagctgacagacaacagaaacagaggaagaaacaaggcccgctactgtgccgagggcggcggccctgtgctgggcaggaacaagaatgagctggagggctggggccggggcgtgtacatcagatag

SEQ ID NO: 14801 - DNA, 1797 bp, Artificial Sequence
  derived and/or modified sequence
atggtgcagaagaccagcatgagccggggcccctacccccccagccaagagatcccaatggaggtgttcgatccttccccccagggaaaatattccaagagaaaggggcggttcaaaagaagcgacggatccacctcgagtgacaccacctccaacagctttgtccggcaaggcagtgcagagtcttatacaagccggccatctgattccgacgtgtccctggaagaagatagagaggcgttaagaaaagaagcagaaaggcaagctttggctcagttggagaaggcgaaaaccaaaccggtggcattcgccgtgaggaccaacgtaggctacaatcctagcccgggagatgaggttcctgttcagggtgtggcgatcacgtttgaaccaaaagatttcctacatatcaaagagaaatacaacaatgactggtggatcggccgactggtgaaggagggttgcgaagtgggcttcataccctcaccagtgaagttggatagtcttagattactacaggaacagaaactgcgacagaacagacttggaagcagcaagagcggcgataattcatcctccagtctgggcgatgtggttactggaacaagaaggccgacaccacccgcctcagcaaagcagaaacaaaagagtaccgagcatgtgcccccctatgatgtggtgccctcaatgaggccaattattcttgtggggcccagcttaaaaggatacgaagtcactgacatgatgcaaaaagccttgtttgactttctgaaacaccgctttgatggccgaattagcattacccgcgtcacagcagacatttctctcgccaagagatctgtgctcaacaacccatctaaacatattattatagaacggtcaaatacaagaagttctctggctgaagttcagagcgaaattgagaggatttttgagctggctcgcactttacagttggtggcactggatgcagacactatcaaccaccctgcccagctaagtaagacctccctggcccccatcattgtctatattaagattacctcccccaaggtcctgcagcgtctcattaagagtcgaggcaaatcccagagtaagcacttgaacgtccaaatagctgcaagcgagaagctggcacagtgccctccagagatgtttgacattatactggatgaaaatcagctcgaagatgcttgtgagcacctggctgagtatctggaagcatactggaaggcaactcaccctcctagtagcactcctcctaatcctttgctgaatcgcacgatggctaccgcagccctcgctgcctcacccgcgcccgtgagtaatctgcaaggaccctatctggcctcaggtgaccagcctctggaacgtgctactggtgagcatgcctccatgcatgagtatcccggtgaactgggccagccccccgggttgtacccttcttcccacccccctggtagagcagggactctgcgcgctctctctcgacaggacaccttcgatgctgatactcccggaagcaggaactcagcctacacagaactgggtgacagttgcgtggatatggagacagacccaagcgagggacccggacttggtgatccggcggggggaggtacgcctccggctcggcaaggatcttgggaggacgaggaggaggattatgaggaggagctgaccgataaccgaaaccgtggaaggaataaagcgcgatactgcgcggaaggaggcggccctgtccttgggcgcaacaagaacgaattggaagggtgggggaggggcgtgtatatccgctag

SEQ ID NO: 14802 - DNA, 1647 bp, Artificial Sequence
  derived and/or modified sequence
agcggcagcctgtacttccagggcagcgccgagagctacaccagcaggccgtcagactccgacgtgagtctcgaagaagatagggaagctctcagaaaagaagcggaacggcaggccctggcacagttagagaaggccaagactaagcctgtggcattcgccgtgagaaccaacgtcgggtacaacccaagccccggtgacgaagttcccgtgcaaggagtggctatcaccttcgaaccaaaagacttcctgcacatcaaggagaagtataacaacgattggtggattgggcgactggtgaaggaagggtgcgaggtaggatttatcccttctccggtgaaactagactccctgaggctcctgcaggagcagaagttacggcagaacaggctggggagctcaaagtcaggggataactctagctccagcctcggcgatgtggttacagggacacgccgtcccactccccctgccagcggcaaaagccacagacatgcgaccgaacacgtaccaccgtacgacgtggtgccatctatgaggcccattatcctcgtcggaccttctttaaaaggctacgaggtaacagatatgatgcagaaagcccttttcgactttctgaagcaccgattcgacgggcggatttccatcacaagagtgactgccgacatcagcctggcaaaaaggtctgtgctgaacaacccttcgaagcatataatcatcgagcggagcaatacgaggtcaagcctggcagaggtgcagtcggagatcgaacgcattttcgagctcgcaaggactttgcagttggtcgcgctggacgctgacaccatcaatcaccctgctcagctctctaagacttcgttagcgccaattatcgtctacataaagatcactagccccaaagtcttgcaacggctaatcaaaagtcgtgggaaatcccagtccaaacacttgaacgtgcagatcgccgcctctgagaaattggcacaatgcccacccgagatgtttgatatcatcctggacgagaatcagctggaagacgcttgcgagcacttggcagaatatttagaggcctattggaaggccacacatcctccctcttctacccccccaaaccccctcctgaacagaaccatggctaccgcggctctcgctgcttcccccgctcccgttagcaacttgcagggtccttacttagccagtggcgatcagcccttagagagagctaccggcgaacacgcttctatgcatgagtacccaggcgaactcggccagcccccggggctttatccgtcctctcatccccccggtagggctggaaccctgagggcattgtcgagacaggacacatttgatgctgacacccctggatccaggaactctgcctatactgagctcggcgattcctgtgtagacatggaaacggacccctctgagggccccgggctgggcgaccccgcaggtgggggaactcccccagcacggcagggaagctgggaggatgaagaggaagattacgaagaagaactaacagacaatcggaacagagggaggaataaagctcggtattgtgctgaggggggaggccccgttcttgggcgtaacaagaacgaactggaaggttggggccgaggcgtctacatcagatag

SEQ ID NO: 14803 - DNA, 1797 bp, Artificial Sequence
  derived and/or modified sequence
atggtgcaaaaaacatccatgtctcgcggtccctatcctccatctcaggagatcccaatggaggtgttcgatccctcaccccaggggaagtactccaaaagaaaaggcaggttcaaacggtcagatggcagcacttccagcgataccactagcaactcattcgttagacaggggtccgcagaatcatacacctcccgtccaagtgactctgacgttagcctggaagaggaccgcgaggctctccgcaaggaagccgaacggcaggccctcgcacaactcgaaaaagccaagaccaagccagttgctttcgccgtacgcactaatgtcggatataatccttcccccggtgacgaggtgcccgtgcagggtgtcgccatcacctttgaacccaaagacttcctccatatcaaggaaaagtataataatgattggtggataggcagactggttaaagagggctgcgaggtcggctttatcccaagcccggtaaaacttgacagcctcagactgttgcaggaacaaaaactacgccagaaccggctcggaagctcaaaaagtggagacaattccagctcttcattaggagacgttgtgactggaacacgaagacccacccctcctgcatcggcgaagcagaaacagaagagcactgagcacgtccccccttacgacgtggtgccctcgatgcgcccaatcatccttgtgggcccatctcttaaagggtatgaggtgactgacatgatgcaaaaggcactctttgactttttgaagcatagatttgacgggaggatttcaattacccgcgtcacagcagatatctcgttggccaagcgatctgtcctgaacaatccgtcaaagcacatcattattgagcggagtaacacacgctctagtcttgcggaggtgcaaagcgagattgagcggatcttcgagctggccagaaccctacagctcgtggccctcgacgccgacaccataaaccaccccgcacagctgtccaaaaccagtctcgccccaattatcgtgtacatcaagattacttctcccaaggtgcttcaacggctcattaagtctcggggtaagtcacagtcgaaacatcttaatgttcagatcgctgcatcagagaagctcgcccaatgcccgcctgagatgtttgacatcattcttgacgagaatcagctcgaagatgcgtgcgaacatcttgctgaatatctggaggcttactggaaagctacccatccccctagcagcactcctcctaaccccctgctgaaccggaccatggctactgcagctctcgccgctagtcctgcccctgtatccaatctccaagggccttacctggcttcaggtgaccagcccctggaaagggcaacaggcgagcacgcctctatgcatgaataccctggcgaactgggccagccacccggtctgtatccgagctctcacccaccaggtagagctggcacactgcgcgctctgtccaggcaagacacctttgacgccgacacccccggatcaagaaattccgcttatacggaactgggtgattcttgtgtcgacatggaaaccgacccttccgagggaccaggcctgggcgatccggctggcggaggtaccccgcctgcccgacagggctcttgggaggatgaagaagaggattatgaagaggagctgaccgacaatcgcaacagggggaggaataaagcacgatattgtgctgaggggggaggacctgtgctggggaggaataaaaacgaactggagggctggggaaggggtgtatacatcaggtag

SEQ ID NO: 14804 - DNA, 1647 bp, Artificial Sequence
  derived and/or modified sequence
agcgggtccctgtatttccagggaagtgctgaatcttacaccagtaggcctagcgactcggatgttagccttgaggaggatcgggaggcgctgcggaaggaggcggaaagacaggctttggcccagctggaaaaagctaagactaaacctgttgccttcgcggtgagaacaaatgtcgggtacaatccaagtcctggcgacgaagtgccggtgcaaggcgtggccattacttttgagccaaaagatttcctgcatatcaaggagaaatacaataacgattggtggatcggtagattggtgaaggaaggttgtgaagtggggtttatcccatcacctgtgaaactcgactcccttcgcttgctccaggagcagaagctgcggcagaatagattgggatccagcaaaagcggagacaatagttcctctagcttgggggatgttgtcactggtactcgccgtcctacgccccctgcttcagggaaatcccaccggcacgcaacagaacacgtcccaccctacgatgtggtccctagcatgagaccgattatcctcgtgggaccatctctcaaggggtacgaggtcacggatatgatgcaaaaggccttattcgactttttgaagcatcgattcgatgggagaatctccattaccagggtgaccgctgacatatctctggccaaaagatccgtgttgaacaatccatccaagcacattatcatagagagatccaatacaaggtcttccttggctgaggtacagagcgaaattgaacggatttttgagctggcacgcaccctccagttagttgctctggacgccgacaccattaatcaccctgcccaacttagcaaaaccagcctggctcccataattgtgtacattaaaatcacctctcctaaggtgctccagcgcttaattaaatcccggggtaagtcccaaagtaaacaccttaacgtgcaaatcgccgctagtgaaaagctcgctcagtgcccaccagagatgtttgacatcatcctggacgagaaccagctcgaagacgcatgtgaacatcttgctgagtaccttgaggcctactggaaagcaacgcacccaccgtcatcgactcccccaaatccattgctgaatcgcacaatggccactgccgcacttgccgcatcgccggcacccgtctccaacctgcaaggaccttacttggcgtcaggagatcagcccctggaacgcgcaacaggcgagcatgccagtatgcatgaataccctggtgagttagggcagcctcctggcctgtatccctccagtcatccaccaggccgtgccggaactctgcgcgcactgtccagacaggacacgtttgacgctgatacccccggttcaagaaactccgcttacaccgagttaggcgattcttgcgttgatatggagacggatccatccgaggggccaggcctgggagacccagccggtgggggaacaccccctgctcgtcaaggcagttgggaagacgaggaggaagactatgaggaggagctcaccgacaataggaatcggggacggaataaagcccgttattgtgccgaaggcggaggcccagtgctgggacggaacaaaaacgagcttgagggatggggaaggggcgtctacatccgctag

SEQ ID NO: 14805 - DNA, 3343 bp, Artificial Sequence
  derived and/or modified sequence
cgagggaaggcaggaaggaggcagccgaaggccgagctgggtggctggaccgggtgctggctgcgccgcgctgctttcggctcccacggcctctcccatgcgctgagggagcccggctgggccgggccggcggcgggaggggaggctcctctccatggtccagaagaccagcatgtcccggggcccttacccaccctcccaggagatccccatggaggtcttcgaccccagcccgcagggcaaatacagcaagaggaaagggcgattcaaacggtcagatgggagcacgtcctcggataccacatccaacagctttgtccgccagggctcagcggagtcctacaccagccgtccatcagactctgatgtatctctggaggaggaccgggaagccttaaggaaggaagcagagcgccaggcattagcgcagctcgagaaggccaagaccaagccagtggcatttgctgtgcggacaaatgttggctacaatccgtctccaggggatgaggtgcctgtgcagggagtggccatcaccttcgagcccaaagacttcctgcacatcaaggagaaatacaataatgactggtggatcgggcggctggtgaaggagggctgtgaggttggcttcattcccagccccgtcaaactggacagccttcgcctgctgcaggaacagaagctgcgccagaaccgcctcggctccagcaaatcaggcgataactccagttccagtctgggagatgtggtgactggcacccgccgccccacaccccctgccagtgccaaacagaagcagaagtcgacagagcatgtgcccccctatgacgtggtgccttccatgaggcccatcatcctggtgggaccgtcgctcaagggctacgaggttacagacatgatgcagaaagctttatttgacttcttgaagcatcggtttgatggcaggatctccatcactcgtgtgacggcagatatttccctggctaagcgctcagttctcaacaaccccagcaaacacatcatcattgagcgctccaacacacgctccagcctggctgaggtgcagagtgaaatcgagcgaatcttcgagctggcccggacccttcagttggtcgctctggatgctgacaccatcaatcacccagcccagctgtccaagacctcgctggcccccatcattgtttacatcaagatcacctctcccaaggtacttcaaaggctcatcaagtcccgaggaaagtctcagtccaaacacctcaatgtccaaatagcggcctcggaaaagctggcacagtgcccccctgaaatgtttgacatcatcctggatgagaaccaattggaggatgcctgcgagcatctggcggagtacttggaagcctattggaaggccacacacccgcccagcagcacgccacccaatccgctgctgaaccgcaccatggctaccgcagccctggctgccagccctgcccctgtctccaacctccagggaccctaccttgcttccggggaccagccactggaacgggccaccggggagcacgccagcatgcacgagtacccaggggagctgggccagcccccaggcctttaccccagcagccacccaccaggccgggcaggcacgctacgggcactgtcccgccaagacacttttgatgccgacacccccggcagccgaaactctgcctacacggagctgggagactcatgtgtggacatggagactgacccctcagaggggccagggcttggagaccctgcagggggcggcacgcccccagcccgacagggatcctgggaggacgaggaagaagactatgaggaagagctgaccgacaaccggaaccggggccggaataaggcccgctactgcgctgagggtgggggtccagttttggggcgcaacaagaatgagctggagggctggggacgaggcgtctacattcgctgagaggcaggggccacacggcgggaggaagggctctgagcccaggggaggggagggagcgaggggctcacacctgacatgtattcgcctccagggggcgctgtctccctcctttcagatgcctttgctcaaagcttggggtttctttggtgttaccatcccagctcccgggaggcccttaagccccagctgtcggtttttacctgcctgttgtggatggatgggggatacccacctttctgaagtgtcccctttctcccatcttaaggggctctcctccctcaccctcctagagaaaaggtgcacttccttaactctttctactcggggccctaagtgacggtcctaagtgggatggctctccttctcccaagctgcagtactggggaagggctgggcgcttttcctggaaagggaggccacagattctttcccatgggggctctcttccccagaccccagatccaaggtccctcaccctgcctgccccttcctcccagcttcctggcagcatcgtctggtcggtgaaagccatagcatggacaccccatggggagcttgtcttggggagggttctgggtggaagctggcaggcatacagcaccctctaccctccgtggccatggcaacgtccagggcccagaaccctgaggagtgagcggccgagacgctgctccccaccccccacctccatgcctcagcctttgcctaccccaggaatgagcttggcctccaacatcccttgcctgctgccattagtagagggggcccctctgcatctgagccccccatccctgtgccacctgggtgtggagcccatggaacactctggtccgcctcattttaaaccaaaaaactgctccttcaccctcaccctgaggccccaggggagaggacccgtgggatggtgcccaggggttgccttgggacctcggatctcctctggggggcttggctgctgctgttgctgctctgtatttgcctctcgtgattctgtttgttacccatgttcacttcccccaggagaggccttggtaccccctctcccctggggcatccctttgccttggcatccctgtagcccagcaaccctgcccctccccagcatcccagctgggccagagagagccgagtgtgccaacaaggactggggcctgcccggctgcccgcctcagggatgggcacctcatgcctgtctcgccacctcctgtgccaatgtcccaccctccacctgggggtggggtgcagcttccacttactgattagaagacaccactgccctcccttcccccctccctgtctggtgtcctgtgcccccatctgtctgtctatatttgtctgtactcccctaggagaagtattttgccatatataaaaccactgtcctgtcctttg

SEQ ID NO: 14806 - DNA, 3384 bp, Artificial Sequence
  derived and/or modified sequence
tctggctctctctattttcagggctcagcggagtcctacaccagccgtccatcagactctgatgtatctctggaggaggaccgggaagccttaaggaaggaagcagagcgccaggcattagcgcagctcgagaaggccaagaccaagccagtggcatttgctgtgcggacaaatgttggctacaatccgtctccaggggatgaggtgcctgtgcagggagtggccatcaccttcgagcccaaagacttcctgcacatcaaggagaaatacaataatgactggtggatcgggcggctggtgaaggagggctgtgaggttggcttcattcccagccccgtcaaactggacagccttcgcctgctgcaggaacagaagctgcgccagaaccgcctcggctccagcaaatcaggcgataactccagttccagtctgggagatgtggtgactggcacccgccgccccacaccccctgccagtggtaagagccatcgccatgcaacagagcatgtgcccccctatgacgtggtgccttccatgaggcccatcatcctggtgggaccgtcgctcaagggctacgaggttacagacatgatgcagaaagctttatttgacttcttgaagcatcggtttgatggcaggatctccatcactcgtgtgacggcagatatttccctggctaagcgctcagttctcaacaaccccagcaaacacatcatcattgagcgctccaacacacgctccagcctggctgaggtgcagagtgaaatcgagcgaatcttcgagctggcccggacccttcagttggtcgctctggatgctgacaccatcaatcacccagcccagctgtccaagacctcgctggcccccatcattgtttacatcaagatcacctctcccaaggtacttcaaaggctcatcaagtcccgaggaaagtctcagtccaaacacctcaatgtccaaatagcggcctcggaaaagctggcacagtgcccccctgaaatgtttgacatcatcctggatgagaaccaattggaggatgcctgcgagcatctggcggagtacttggaagcctattggaaggccacacacccgcccagcagcacgccacccaatccgctgctgaaccgcaccatggctaccgcagccctggctgccagccctgcccctgtctccaacctccagggaccctaccttgcttccggggaccagccactggaacgggccaccggggagcacgccagcatgcacgagtacccaggggagctgggccagcccccaggcctttaccccagcagccacccaccaggccgggcaggcacgctacgggcactgtcccgccaagacacttttgatgccgacacccccggcagccgaaactctgcctacacggagctgggagactcatgtgtggacatggagactgacccctcagaggggccagggcttggagaccctgcagggggcggcacgcccccagcccgacagggatcctgggaggacgaggaagaagactatgaggaagagctgaccgacaaccggaaccggggccggaataaggcccgctactgcgctgagggtgggggtccagttttggggcgcaacaagaatgagctggagggctggggacgaggcgtctacattcgctgagaggcaggggccacacggcgggaggaagggctctgagcccaggggaggggagggagcgaggggctcacacctgacatgtattcgcctccagggggcgctgtctccctcctttcagatgcctttgctcaaagcttggggtttctttggtgttaccatcccagctcccgggaggcccttaagccccagctgtcggtttttacctgcctgttgtggatggatgggggatacccacctttctgaagtgtcccctttctcccatcttaaggggctctcctccctcaccctcctagagaaaaggtgcacttccttaactctttctactcggggccctaagtgacggtcctaagtgggatggctctccttctcccaagctgcagtactggggaagggctgggcgcttttcctggaaagggaggccacagattctttcccatgggggctctcttccccagaccccagatccaaggtccctcaccctgcctgccccttcctcccagcttcctggcagcatcgtctggtcggtgaaagccatagcatggacaccccatggggagcttgtcttggggagggttctgggtggaagctggcaggcatacagcaccctctaccctccgtggccatggcaacgtccagggcccagaaccctgaggagtgagcggccgagacgctgctccccaccccccacctccatgcctcagcctttgcctaccccaggaatgagcttggcctccaacatcccttgcctgctgccattagtagagggggcccctctgcatctgagccccccatccctgtgccacctgggtgtggagcccatggaacactctggtccgcctcattttaaaccaaaaaactgctccttcaccctcaccctgaggccccaggggagaggacccgtgggatggtgcccaggggttgccttgggacctcggatctcctctggggggcttggctgctgctgttgctgctctgtatttgcctctcgtgattctgtttgttacccatgttcacttcccccaggagaggccttggtaccccctctcccctggggcatccctttgccttggcatccctgtagcccagcaaccctgcccctccccagcatcccagctgggccagagagagccgagtgtgccaacaaggactggggcctgcccggctgcccgcctcagggatgggcacctcatgcctgtctcgccacctcctgtgccaatgtcccaccctccacctgggggtggggtgcagcttccacttactgattagaagacaccactgccctcccttcccccctccctgtctggtgtcctgtgcccccatctgtctgtctatatttgtctgtactcccctaggagaagtattttgccatatataaaaccactgtcctgtcctttgtggctgcctcccaagcctgcttctttgtcctcgccacatagtcgtcagcgtaggcacctgggagctgctgatatgcacggggagttgaaagggtgggtgcctgaagatgttgtgccctgagtcattgactcaaaagaaaagatgatcctttgattttggccctctgatgtattgtgcccaagccaggagctgcttgggcagtcccagctccacactggccctgagccccttcacttacctgtctctccacaagtagagccaaaggcaatgggaagctcaatgttgctcagtgggtgagatccagacccactggtgcaatgtcttaaatacacatgactgtttttc

SEQ ID NO: 14807 - DNA, 1797 bp, Artificial Sequence
  derived and/or modified sequence
atggtgcagaagaccagcatgagcagaggcccctacccccccagccaggagatccccatggaggtgttcgaccccagcccccagggcaagtacagcaagagaaagggcagattcaagagaagcgacggcagcaccagcagcgacaccaccagcaacagcttcgtgagacagggcagcgccgagagctacaccagcagacccagcgacagcgacgtgagcctggaggaggacagagaggccctgagaaaggaggccgagagacaggccctggcccagctggagaaggccaagaccaagcccgtggccttcgccgtgagaaccaacgtgggctacaaccccagccccggcgacgaggtgcccgtgcagggcgtggccatcaccttcgagcccaaggacttcctgcacatcaaggagaagtacaacaacgactggtggatcggcagactggtgaaggagggctgcgaggtgggcttcatccccagccccgtgaagctggacagcctgagactgctgcaggagcagaagctgagacagaacagactgggcagcagcaagagcggcgacaacagcagcagcagcctgggcgacgtggtgaccggcaccagaagacccaccccccccgccagcgccaagcagaagcagaagagcaccgagcacgtgcccccctacgacgtggtgcccagcatgagacccatcatcctggtgggccccagcctgaagggctacgaggtgaccgacatgatgcagaaggccctgttcgacttcctgaagcacagattcgacggcagaatcagcatcaccagagtgaccgccgacatcagcctggccaagagaagcgtgctgaacaaccccagcaagcacatcatcatcgagagaagcaacaccagaagcagcctggccgaggtgcagagcgagatcgagagaatcttcgagctggccagaaccctgcagctggtggccctggacgccgacaccatcaaccaccccgcccagctgagcaagaccagcctggcccccatcatcgtgtacatcaagatcaccagccccaaggtgctgcagagactgatcaagagcagaggcaagagccagagcaagcacctgaacgtgcagatcgccgccagcgagaagctggcccagtgcccccccgagatgttcgacatcatcctggacgagaaccagctggaggacgcctgcgagcacctggccgagtacctggaggcctactggaaggccacccacccccccagcagcaccccccccaaccccctgctgaacagaaccatggccaccgccgccctggccgccagccccgcccccgtgagcaacctgcagggcccctacctggccagcggcgaccagcccctggagagagccaccggcgagcacgccagcatgcacgagtaccccggcgagctgggccagccccccggcctgtaccccagcagccacccccccggcagagccggcaccctgagagccctgagcagacaggacaccttcgacgccgacacccccggcagcagaaacagcgcctacaccgagctgggcgacagctgcgtggacatggagaccgaccccagcgagggccccggcctgggcgaccccgccggcggcggcaccccccccgccagacagggcagctgggaggacgaggaggaggactacgaggaggagctgaccgacaacagaaacagaggcagaaacaaggccagatactgcgccgagggcggcggccccgtgctgggcagaaacaagaacgagctggagggctggggcagaggcgtgtacatcagatag

SEQ ID NO: 14808 - DNA, 1647 bp, Artificial Sequence
  derived and/or modified sequence
agcggcagcctgtacttccagggcagcgccgagagctacaccagcagacccagcgacagcgacgtgagcctggaggaggacagagaggccctgagaaaggaggccgagagacaggccctggcccagctggagaaggccaagaccaagcccgtggccttcgccgtgagaaccaacgtgggctacaaccccagccccggcgacgaggtgcccgtgcagggcgtggccatcaccttcgagcccaaggacttcctgcacatcaaggagaagtacaacaacgactggtggatcggcagactggtgaaggagggctgcgaggtgggcttcatccccagccccgtgaagctggacagcctgagactgctgcaggagcagaagctgagacagaacagactgggcagcagcaagagcggcgacaacagcagcagcagcctgggcgacgtggtgaccggcaccagaagacccaccccccccgccagcggcaagagccacagacacgccaccgagcacgtgcccccctacgacgtggtgcccagcatgagacccatcatcctggtgggccccagcctgaagggctacgaggtgaccgacatgatgcagaaggccctgttcgacttcctgaagcacagattcgacggcagaatcagcatcaccagagtgaccgccgacatcagcctggccaagagaagcgtgctgaacaaccccagcaagcacatcatcatcgagagaagcaacaccagaagcagcctggccgaggtgcagagcgagatcgagagaatcttcgagctggccagaaccctgcagctggtggccctggacgccgacaccatcaaccaccccgcccagctgagcaagaccagcctggcccccatcatcgtgtacatcaagatcaccagccccaaggtgctgcagagactgatcaagagcagaggcaagagccagagcaagcacctgaacgtgcagatcgccgccagcgagaagctggcccagtgcccccccgagatgttcgacatcatcctggacgagaaccagctggaggacgcctgcgagcacctggccgagtacctggaggcctactggaaggccacccacccccccagcagcaccccccccaaccccctgctgaacagaaccatggccaccgccgccctggccgccagccccgcccccgtgagcaacctgcagggcccctacctggccagcggcgaccagcccctggagagagccaccggcgagcacgccagcatgcacgagtaccccggcgagctgggccagccccccggcctgtaccccagcagccacccccccggcagagccggcaccctgagagccctgagcagacaggacaccttcgacgccgacacccccggcagcagaaacagcgcctacaccgagctgggcgacagctgcgtggacatggagaccgaccccagcgagggccccggcctgggcgaccccgccggcggcggcaccccccccgccagacagggcagctgggaggacgaggaggaggactacgaggaggagctgaccgacaacagaaacagaggcagaaacaaggccagatactgcgccgagggcggcggccccgtgctgggcagaaacaagaacgagctggagggctggggcagaggcgtgtacatcagatag

SEQ ID NO: 14809 - protein, 605 aa, Artificial Sequence
  derived and/or modified sequence
MQCCGLVHRRRVRVSYGSADSYTSRPSDSDVSLEEDREAVRREAERQAQAQLEKAKTKPVAFAVRTNVSYSAAHEDDVPVPGMAISFEAKDFLHVKEKFNNDWWIGRLVKEGCEIGFIPSPVKLENMRLQHEQRAKQGKFYSSKSGGNSSSSLGDIVPSSRKSTPPSSAIDIDATGLDAEENDIPANHRSPKPSANSVTSPHSKEKRMPFFKKTEHTPPYDVVPSMRPVVLVGPSLKGYEVTDMMQKALFDFLKHRFEGRISITRVTADISLAKRSVLNNPSKHAIIERSNTRSSLAEVQSEIERIFELARTLQLVVLDADTINHPAQLSKTSLAPIIVYVKISSPKVLQRLIKSRGKSQAKHLNVQMVAADKLAQCPPELFDVILDENQLEDACEHLADYLEAYWKATHPPSSSLPNPLLSRTLATSSLPLSPTLASNSQGSQGDQRTDRSAPIRSASQAEEEPSVEPVKKSQHRSSSSAPHHNHRSGTSRGLSRQETFDSETQESRDSAYVEPKEDYSHDHVDHYASHRDHNHRDETHGSSDHRHRESRHRSRDVDREQDHNECNKQRSRHKSKDRYCEKDGEVISKKRNEAGEWNRDVYIRQ

SEQ ID NO: 14810 - DNA, 1818 bp, Artificial Sequence
  derived and/or modified sequence
atgcagtgctgtggcctggtccacaggaggagggtgagagtctcttacggctctgcggattcttacacctctagaccatccgactccgacgtcagtttagaagaagatagagaggcagtccgcagggaagcagaaagacaggcacaggcccaactggaaaaggccaagacaaaacctgtggcctttgctgtgaggaccaacgtgtcttactcagcagcacatgaggacgacgttcctgtgcccgggatggcaatctcattcgaggctaaagattttcttcatgtgaaggagaaattcaataatgattggtggatcggccggctggtgaaagaaggctgtgaaattggcttcatccctagccctgttaagctggagaacatgcgcctgcagcatgaacagcgcgccaagcagggtaagttctactcaagcaagagtggcgggaattcatctagctccctcggtgacatcgtaccaagttctagaaaaagcacacccccatcatccgccatagacatcgatgctactggcctggatgctgaggagaatgatataccagcaaaccatcgatcccctaagccttcagcaaattctgtgacgtctccccactctaaagaaaaaagaatgcctttctttaagaagaccgaacacactcctccatatgatgtggtacctagcatgcggccagtcgtcctcgtcggaccatctttaaagggatatgaagtaaccgacatgatgcaaaaagcgctcttcgatttcctcaaacaccgctttgagggcagaatctctattacacgagtgacagccgacatcagtcttgccaagagaagcgttctgaataatccatctaaacatgccataatcgaacgaagcaatactcgaagctctctggcagaggtccagtccgagatcgagcggatatttgaacttgcacgcacgctccagctggtagtgctggacgctgacacgatcaatcatcctgcacagctatcgaagacgtctcttgcacccataattgtatatgtgaagatttcatctcccaaggtgctacaacggctgatcaagtcccgcgggaagtcccaggccaaacacttgaatgtgcagatggttgccgcagacaaattggcccagtgcccacccgagctcttcgacgttatcttggacgagaaccagctagaggacgcctgcgaacacttggctgactatctagaagcctactggaaggcaacacacccaccgtctagctccctgccgaatcccctgctgtcccgcaccctagcaacaagttcgctccccttgtctcctaccctcgcgagtaattctcaggggtcccaaggagaccagcggacggaccgctccgcccctatacgctcagccagtcaagccgaagaggagccctcggtagagcctgtgaaaaagtctcagcacaggagcagctccagtgcgccacaccacaatcaccgaagtggtacatcccgcggtctgtcccgacaggagaccttcgatagtgaaacccaagagtcccgggattctgcctatgtcgagcccaaagaggactactcccatgaccacgtcgatcattatgcgagccaccgtgatcataaccaccgcgatgagacacatggcagctccgatcacagacaccgcgaaagcaggcataggtccagggatgtagaccgcgaacaggatcataatgagtgtaacaagcagcgaagtaggcacaaatcaaaggatcggtattgcgagaaggacggggaagttattagtaagaaaagaaatgaggccggagaatggaatcgggatgtatacatccggcagtag

SEQ ID NO: 14811 - DNA, 1818 bp, Artificial Sequence
  derived and/or modified sequence
atgcagtgctgcggcctggtgcacagaagaagagtgcgggtgtcctatggcagcgctgacagctacaccagccggcccagcgacagtgatgtgtccctggaggaggaccgggaggccgtgagaagagaggccgagcggcaggcccaggcccagctggagaaggccaagaccaagcctgtggcctttgctgtgaggaccaacgtgtcctacagcgctgcccatgaagatgatgtgcctgtgcccggcatggccatcagctttgaggccaaggacttcctgcacgtgaaggagaagttcaacaatgactggtggattggccgcctggtgaaggagggctgtgaaattggcttcatccccagccctgtgaagctggagaacatgaggctgcagcacgagcagagggccaagcagggcaagttctacagcagcaagagcggcggcaacagcagcagcagcctgggggacatcgtgcccagcagcaggaagagcaccccacccagcagcgccatcgacattgatgccaccggcctggatgctgaagaaaatgacatcccagccaaccacaggagccccaagcccagcgccaacagcgtgaccagcccccacagcaaggagaagaggatgcccttcttcaagaagacagagcacaccccaccctatgatgtggtgcccagcatgaggcctgtggtgctggtgggccccagcctgaagggctatgaggtgacagacatgatgcagaaggccctgtttgacttcctgaagcacagatttgagggccgcatcagcatcaccagggtgacagctgacatcagcctggccaagaggtctgtgctgaacaaccccagcaagcacgccatcatcgagaggagcaacaccaggagcagcctggccgaggtgcagagcgagattgagcgcatctttgagctggcccggaccctgcagctggtggtgctggatgctgacaccatcaaccacccagcccagctgagcaagaccagcctggcccccatcatcgtgtatgtgaagatcagcagccccaaggtgctgcagaggctcatcaagagccggggcaagagccaggccaagcacctgaatgtgcagatggtggccgctgacaagctggcccagtgccccccagagctgtttgatgtgatcctggatgagaaccagctggaggatgcctgtgagcacctggccgactacctggaggcctactggaaggccacccacccccccagcagcagcctgcccaaccccctgctgagcaggaccctggccaccagcagcctgcccctgagccccaccctggccagcaacagccagggcagccagggcgaccagaggacagacagaagtgcccccatccgcagcgccagccaggccgaggaggagcccagcgtggagcctgtgaagaagagccagcacaggagcagcagcagcgccccccaccacaaccacaggagcggcaccagccggggcctgagccggcaggagacctttgacagcgagacccaggagagccgggacagcgcctacgtggagcccaaggaggactacagccatgaccacgtggaccactacgccagccaccgggaccacaaccacagagatgagacccacggcagcagtgaccaccgccaccgggagagccgccacaggagcagagatgtggaccgggagcaggaccacaatgaatgcaacaagcagaggagccgccacaagagcaaggaccgctactgtgagaaggatggagaggtgatcagcaagaagagaaatgaggccggggagtggaacagagatgtgtacatccggcagtag

SEQ ID NO: 14812 - DNA, 1818 bp, Artificial Sequence
  derived and/or modified sequence
atgcagtgctgcggcctggtgcaccggcggcgggtgcgggtgagctacggatctgcagactcatacactagtcgtcctagcgactcagatgtatcactcgaggaggatcgcgaggccgtcagaagggaggctgagaggcaggcccaagcccagctcgaaaaggccaagactaagcccgttgcctttgcggtacgcacaaatgtctcttattccgcagcccatgaggatgacgtgccggtcccaggaatggcgatctctttcgaggctaaagactttcttcatgtgaaagagaaattcaataatgattggtggattggcaggcttgttaaggagggttgcgagattggattcattcctagcccagttaagctggaaaatatgcgtcttcaacatgaacagcgcgctaagcagggcaagttctactcctccaaatccggcggaaattctagctccagtctcggagacatagtccccagctccaggaaatcaacaccaccatcttccgctatagatatcgacgcaaccgggctcgacgctgaagaaaacgacatccccgcaaatcatcgatctcctaagcctagcgccaactccgtaactagcccccactccaaggagaagagaatgccttttttcaagaaaactgaacatacgccaccctatgatgtggttcccagtatgcgaccagtcgtgctcgtcgggcccagtctgaaggggtatgaggtgacagatatgatgcagaaggcactcttcgacttcctgaagcacaggtttgaaggtaggatttctataacaagagtcaccgccgatatctctctcgccaaaaggagtgtgttgaacaacccctcaaaacacgcaattattgagcgttctaacacccggtcttcactggccgaggtgcagtccgagattgagagaatctttgagctagcaaggactttacagctggtggttctggacgccgataccataaatcatcctgctcagctaagtaagacatccctggcccccatcatcgtgtacgtaaagatctcttctcctaaggtcctgcagaggctgattaaatcccgcggaaaatcgcaagcaaagcaccttaacgtgcagatggtcgccgcggataaattggcccagtgtccccctgaactatttgacgtaatacttgatgagaatcagttagaggacgcatgtgagcatttagctgactatctcgaagcgtactggaaagctacacatcctcccagctctagcttaccaaaccctctactctccagaacactcgcaacctcttctctgcccttatctccaacactggcctcaaactcacaaggaagtcagggggatcagagaaccgaccgcagcgccccgatacgctccgcctcgcaggcagaagaagaaccctccgtggagcccgtcaaaaagagccaacacaggagcagctcatcagcaccccatcacaaccatcgcagcggtacttcccggggcctctcccggcaggagacttttgattctgaaactcaggagtccagagacagtgcctacgttgaaccaaaggaggactacagtcacgatcatgtggatcattatgcctcccacagagatcataaccatagggacgaaacacatggctcttctgaccatcggcaccgggagagccggcacagaagccgggacgttgatcgcgagcaagaccataatgaatgcaacaaacagaggtctcgccacaaatctaaagaccgttattgcgaaaaggatggtgaagtcatttctaagaagagaaacgaagccggcgagtggaatagggacgtgtatattagacagtag

SEQ ID NO: 14813 - DNA, 1818 bp, Artificial Sequence
  derived and/or modified sequence
atgcagtgttgtggcttagtccataggagaagggttcgagtgtcctatggatccgctgattcatacacctctagaccatccgacagcgacgtgtcgctggaagaggaccgagaggctgttcggagagaagcggaacgccaggcccaggcccaactcgaaaaggctaagacaaagcccgtggcattcgccgtcagaactaatgtgtcctactccgccgctcacgaagacgacgtgcctgtccccggaatggcgatcagcttcgaagcaaaagactttttgcatgtaaaggagaaatttaataacgattggtggattgggcgtcttgtgaaagagggctgtgagatcggattcatccctagcccggttaaactggaaaatatgaggttgcagcatgagcagcgtgcgaagcagggtaagttctattcctctaagagtggtggaaactcctccagcagtctgggggatattgtgccgagttcacgcaaatctaccccaccaagctccgcaatagatattgatgccaccgggctcgacgccgaagaaaatgacatacctgcgaatcaccggtcgccaaagcctagcgccaactctgtgacatccccccatagtaaagagaagaggatgcccttcttcaagaaaacagaacacacccccccatacgatgtcgtgcccagcatgagaccagttgtgctagtgggaccttcactcaaggggtacgaggtgaccgacatgatgcagaaagcactcttcgatttccttaaacatcgattcgaaggacggatatccatcactagagtcaccgccgatatcagtttagcaaagagatccgtgcttaacaacccaagtaagcatgctattatcgaaagatcaaacacacgctcatccctggctgaggtgcaatccgagattgaacgtatatttgagctggcccgaacactgcagctggtcgtgctggacgcggataccattaaccatcccgcacagttatccaaaacgagcttggcgcctatcatcgtatacgtaaagatctcctccccgaaggttctgcagcgtctgatcaaatctcggggaaagtctcaggccaagcatttgaacgtccagatggtggctgccgataagctggctcagtgccccccagagctgtttgatgtgatactggacgaaaaccagctcgaggatgcatgcgagcacctcgctgattaccttgaagcgtattggaaggccacccatcctccctcttcatcgttgcccaacccattactgagtaggaccctggctacgagttccttgcccctgtctccaacactggcatccaatagccaaggatcccagggtgaccaacggacagaccgatccgcccctattagaagcgcctctcaagctgaggaggagccgagcgtggagcctgttaagaaatcacaacacaggtcttccagcagcgctcctcaccacaaccacaggagcggaacctcacggggtttatcccgccaggagacctttgattccgagactcaggagtcaagggactctgcttacgtggagccaaaggaagattacagccatgaccacgtcgatcactacgcttcccatagagatcataaccaccgagatgaaacccatgggtcgagtgatcatcggcatcgtgaaagtcggcaccgcagcagagacgtggaccgagaacaggatcataatgaatgtaataagcaacgctcgcgccataaaagtaaggaccggtactgtgagaaagacggcgaagtgatttcaaaaaagcggaacgaagccggtgagtggaatcgagatgtatatattcggcagtag

SEQ ID NO: 14814 - DNA, 4464 bp, Artificial Sequence
  derived and/or modified sequence
cagcagcgtgctaagaagcagtcacataaacagcagcaggagtaggcctcctgcttttcaaaagcagagtactgcagggtcgcgaaatgcaagacactcagatgtttgaaaatctcccgagttgagaatggctactgtaaaagcgtcaccaagaaactctgacgatctggacagtcctaactctgtgttagcaatacttacttccggaaaattaatgctacttcttgtagatttttgcaaataggaaacccccttgaagaagatctcaaattacgccccccacccccaaaaaaagacaaacaggggagaacaaagttttggcatgcctgcaggaacggtggcttttttagaaactacctaggaggcagaagctaagtgatttgctcatgcctcttacctgggagtagaaggtgggaagaaatggaccgaggctgtgacgagaagacaaggcacagtgcagcttggtgaagccacacgctgactgcgttctgccccctcttcatgcagtgctgcgggctggtgcatcgccggcgagtacgggtgtcctatggttcggcagactcctacactagccgtccatccgattccgatgtatctctggaggaggaccgggaggcagtgcgcagagaagcggagcggcaggcccaggcacagttggaaaaagcaaagacaaagcccgttgcatttgcggttcggacaaatgtcagctacagtgcggcccatgaagatgatgttccagtgcctggcatggccatctcattcgaagcaaaagattttctgcatgttaaggaaaaatttaacaatgactggtggatagggcgattggtaaaagaaggctgtgaaatcggattcattccaagcccagtcaaactagaaaacatgaggctgcagcatgaacagagagccaagcaagggaaattctactccagtaaatcaggaggaaattcatcatccagtttgggtgacatagtacctagttccagaaaatcaacacctccatcatctgctatagacatagatgctactggcttagatgcagaagaaaatgatattccagcaaaccaccgctcccctaaacccagtgcaaacagtgtaacgtcaccccactccaaagagaaaagaatgcccttctttaagaagacagagcacactcctccgtatgatgtggtaccttccatgcgaccagtggtcctagtgggcccttctctgaagggctacgaggtcacagatatgatgcaaaaagcgctgtttgattttttaaaacacagatttgaagggcggatatccatcacaagggtcaccgctgacatctcgcttgccaaacgctcggtattaaacaatcccagtaagcacgcaataatagaaagatccaacacaaggtcaagcttagcggaagttcagagtgaaatcgaaaggatttttgaacttgcaagaacattgcagttggtggtccttgacgcggatacaattaatcatccagctcaactcagtaaaacctccttggcccctattatagtatatgtaaagatttcttctcctaaggttttacaaaggttaataaaatctcgagggaaatctcaagctaaacacctcaacgtccagatggtagcagctgataaactggctcagtgtcctccagagctgttcgatgtgatcttggatgagaaccagcttgaggatgcctgtgagcaccttgccgactatctggaggcctactggaaggccacccatcctcccagcagtagcctccccaaccctctccttagccgtacattagccacttcaagtctgcctcttagccccaccctagcctctaattcacagggttctcaaggtgatcagaggactgatcgctccgctcctatccgttctgcttcccaagctgaagaagaacctagtgtggaaccagtcaagaaatcccagcaccgctcttcctcctcagccccacaccacaaccatcgcagtgggacaagtcgcggcctctccaggcaagagacatttgactcggaaacccaggagagtcgagactctgcctacgtagagccaaaggaagattattcccatgaccacgtggaccactatgcctcacaccgtgaccacaaccacagagacgagacccacgggagcagtgaccacagacacagggagtcccggcaccgttcccgggacgtggatcgagagcaggaccacaacgagtgcaacaagcagcgcagccgtcataaatccaaggatcgctactgtgaaaaggatggagaagtgatatcaaaaaaacggaatgaggctggggagtggaacagggatgtttacatccgccaatgagttttgcccgtttgtgtttttttttttttttttttgaagtcttgtataactaacagcatccccaaaacaaagtctttggggtctacactgcaatcatatgtgatctgtcttgtaatattttgtattattgctgttgcttgaatagcaatagcatggatagagtattgagatactttttcttttgtaagtgctacataaattggcctggtatggctgcagtcctccggttgcatactggactcttcaaaaactgttttgggtagctgccacttgaacaaaatctgttgccacccaggtgatgttagtgttttaagaaatgtagttgatgtatccaacaagccagaatcagcacagataaaaagtggaatttcttgtttctccagatttttaatacgttaatacgcaggcatctgatttgcatattcattcatggaccactgtttcttgcttgtacctctggctgactaaatttggggacagattcagtcttgccttacacaaaggggatcataaagttagaatctattttctatgtactagtactgtgtactgtatagacagtttgtaaatgttatttctgcaaacaaacaccttcttattatatatataatatatatatatatcagtttgatcacactattttagagtcttaatgccaagtcagcagatttgctttatgaattacagggactagaaatgcccacattcaggaaatttgtaataacattgtctagacacctatcctcattctagtagaaagtgtgtacatactgtaaatatgtgtgattgcttgacttgaaaaggtttgaattctgaatgttataccatccttgtaagtaagtttgtaatttccaccataaattatggtaaatataaaactccagaggttgttctactccatacagttcacactgattgtgacacattcttagtagctagtgtctgttctagtcactgcactggagtctacgagccggaactcgctatatgcacgtgtgtgtgtccgtatgtaagaaagtgtgcaccgagtgactgaatggttgagatgaattggaatgctgaagactaacgaagaaactagagactgatatcgagcattctgcccacctcgctctgtatttaattaattgtgctatatgttgctttaacaacccattgagcagtcagggaatgtgagtaagcttgctgccaaaggtaactaggaaagcattcatctgctgcctccttgtttttgctcctagagagtgaaaatacaggcaattttactgtgagtgtttcactggaaatgtacaatctttgtgtgttagagtatttgttttagtaagaaatgtttacacagcttgtggaattatttcgtgggaaaataaatttttataacttctcccacttcaatttctaaccttgcctattgttcctgttgtttgtttacctcccagttacctaccattcctccccaccaccgactccagcaggttcactgtctgtcagaacccagaagtgcttcttataaccaaagtttctgttcttcagaagaaatcagggcaaaatggggtgacttgaagtgaataaaatgttaagaatattatcctacataagacatgtacacagaaggggaaccttgaagacattatctccatgcctcaattacactgctgtaagaagcttacaatgtcatcatgtttaaggctaagaccttttccgtgtctcaagtgtatattttgtccagttataactggatggtaagacagtattaagagtgcaagtacctggcacttgaagtttgtcccaggaaaatgcctgtgtataattacctaacttcagatctgcacattaacttatttaacaaaataaatcagccgggcgcagtggctcatgcctgtaatcccagcaatttgggaggctgaggagggtggatcacctgaggtcaggagttcaagaccagcctggccaacgtggcgaaaccccgtctctactaaaaagataaaaaattagccaggtgtggtggtgcacacctgtaatcccagctacttgggaggctgaggcaggagaattgcttgaacccaggaggtggagcctgcagtaagccaagatcacaccactgtactccagcctgggtgacagagtgagactccatctccaaaaaag

SEQ ID NO: 14815 - DNA, 1818 bp, Artificial Sequence
  derived and/or modified sequence
atgcagtgctgcggcctggtgcacagaagaagagtgagagtgagctacggcagcgccgacagctacaccagcagacccagcgacagcgacgtgagcctggaggaggacagagaggccgtgagaagagaggccgagagacaggcccaggcccagctggagaaggccaagaccaagcccgtggccttcgccgtgagaaccaacgtgagctacagcgccgcccacgaggacgacgtgcccgtgcccggcatggccatcagcttcgaggccaaggacttcctgcacgtgaaggagaagttcaacaacgactggtggatcggcagactggtgaaggagggctgcgagatcggcttcatccccagccccgtgaagctggagaacatgagactgcagcacgagcagagagccaagcagggcaagttctacagcagcaagagcggcggcaacagcagcagcagcctgggcgacatcgtgcccagcagcagaaagagcaccccccccagcagcgccatcgacatcgacgccaccggcctggacgccgaggagaacgacatccccgccaaccacagaagccccaagcccagcgccaacagcgtgaccagcccccacagcaaggagaagagaatgcccttcttcaagaagaccgagcacacccccccctacgacgtggtgcccagcatgagacccgtggtgctggtgggccccagcctgaagggctacgaggtgaccgacatgatgcagaaggccctgttcgacttcctgaagcacagattcgagggcagaatcagcatcaccagagtgaccgccgacatcagcctggccaagagaagcgtgctgaacaaccccagcaagcacgccatcatcgagagaagcaacaccagaagcagcctggccgaggtgcagagcgagatcgagagaatcttcgagctggccagaaccctgcagctggtggtgctggacgccgacaccatcaaccaccccgcccagctgagcaagaccagcctggcccccatcatcgtgtacgtgaagatcagcagccccaaggtgctgcagagactgatcaagagcagaggcaagagccaggccaagcacctgaacgtgcagatggtggccgccgacaagctggcccagtgcccccccgagctgttcgacgtgatcctggacgagaaccagctggaggacgcctgcgagcacctggccgactacctggaggcctactggaaggccacccacccccccagcagcagcctgcccaaccccctgctgagcagaaccctggccaccagcagcctgcccctgagccccaccctggccagcaacagccagggcagccagggcgaccagagaaccgacagaagcgcccccatcagaagcgccagccaggccgaggaggagcccagcgtggagcccgtgaagaagagccagcacagaagcagcagcagcgccccccaccacaaccacagaagcggcaccagcagaggcctgagcagacaggagaccttcgacagcgagacccaggagagcagagacagcgcctacgtggagcccaaggaggactacagccacgaccacgtggaccactacgccagccacagagaccacaaccacagagacgagacccacggcagcagcgaccacagacacagagagagcagacacagaagcagagacgtggacagagagcaggaccacaacgagtgcaacaagcagagaagcagacacaagagcaaggacagatactgcgagaaggacggcgaggtgatcagcaagaagagaaacgaggccggcgagtggaacagagacgtgtacatcagacagtag

SEQ ID NO: 14816 - protein, 484 aa, Artificial Sequence
  derived and/or modified sequence
MYDDSYVPGFEDSEAGSADSYTSRPSLDSDVSLEEDRESARREVESQAQQQLERAKHKPVAFAVRTNVSYCGVLDEECPVQGSGVNFEAKDFLHIKEKYSNDWWIGRLVKEGGDIAFIPSPQRLESIRLKQEQKARRSGNPSSLSDIGNRRSPPPSLAKQKQKQAEHVPPYDVVPSMRPVVLVGPSLKGYEVTDMMQKALFDFLKHRFDGRISITRVTADLSLAKRSVLNNPGKRTIIERSSARSSIAEVQSEIERIFELAKSLQLVVLDADTINHPAQLAKTSLAPIIVFVKVSSPKVLQRLIRSRGKSQMKHLTVQMMAYDKLVQCPPESFDVILDENQLEDACEHLAEYLEVYWRATHHPAPGPGLLGPPSAIPGLQNQQLLGERGEEHSPLERDSLMPSDEASESSRQAWTGSSQRSSRHLEEDYADAYQDLYQPHRQHTSGLPSANGHDPQDRLLAQDSEHNHSDRNWQRNRPWPKDSY

SEQ ID NO: 14817 - DNA, 1455 bp, Artificial Sequence
  derived and/or modified sequence
atgtatgacgacagttatgtgcccggattcgaggacagtgaggcgggaagtgctgactcatacaccagccgcccaagtctcgattctgacgtgtccctggaggaggacagggagtcagccagacgtgaagttgaatcccaagcgcagcaacagctcgagcgagctaagcacaaacctgtagcctttgcggtcagaacaaatgtaagttactgcggagtcctcgacgaagagtgccccgttcaaggcagcggcgtgaactttgaagcaaaagacttcctccacattaaagagaagtattccaacgattggtggattggacgcctggtgaaggagggcggggatatcgccttcattcccagccctcagcgcctcgaaagcatccgcttaaaacaggagcaaaaagcaagaaggtccggtaaccctagctctctttcggacataggaaataggcggtcacccccacccagcctcgctaagcagaagcagaaacaggccgagcacgttcctccatacgatgttgttccttctatgcgcccagtggttctagtcggtcctagtctgaaggggtatgaggttacagatatgatgcagaaggccttattcgacttcctgaaacaccggtttgacggcagaataagtataacacgcgtaacagctgacttatctctggctaagagatccgtccttaataatccaggaaaaagaactatcatcgaacgctcttcagctcggtcttccattgcagaagtccagtcagagattgaaaggatcttcgagctagcaaaaagccttcagctggttgtgttagacgccgatactattaaccatccagctcaactggcaaagacatcactcgctccaataatagtcttcgtcaaggtgtcatcacccaaggtgctgcagcgcctgattcgatctaggggaaaatcccagatgaaacatctcaccgtccaaatgatggcttacgataaactcgttcagtgcccacctgaatcatttgacgtcattctcgacgaaaatcagttggaggacgcatgcgagcacctcgccgagtacttagaggtgtattggcgcgcgactcatcatcccgccccggggcccgggctgctcggccctccttcagctatacccggtttgcaaaaccagcagctattgggggaacggggagaggagcatagtcccttggagcgggacagcctaatgccaagcgacgaggcctctgaaagtagccgacaggcttggaccggatcgagccaacggtcctcaaggcatttggaagaggactacgccgatgcttatcaggatctgtaccagcctcacagacaacacaccagcggcttaccgtctgcaaatggccacgatcctcaggacagacttctagcacaggatagcgagcacaatcacagcgatcggaactggcagcgaaatcgaccctggcctaaggacagctattag

SEQ ID NO: 14818 - DNA, 1455 bp, Artificial Sequence
  derived and/or modified sequence
atgtatgatgacagctatgtgcccggctttgaagattctgaggccggcagcgctgacagctacaccagccggcccagcctggacagtgatgtgtccctggaggaggaccgggagagcgcccggcgggaggtggagagccaggcccagcagcagctggagcgggccaagcacaagcctgtggcctttgctgtgaggaccaacgtgtcctactgcggcgtgctggatgaagaatgtcctgtgcagggcagcggcgtgaactttgaggccaaggacttcctgcacatcaaggagaagtacagcaatgactggtggattggccgcctggtgaaggagggcggggacatcgccttcatccccagcccccagaggctggagagcatccggctgaagcaggagcagaaggcccggcgcagcggcaaccccagcagcctgagtgacatcggcaacagaagaagccccccacccagcctggccaagcagaagcagaagcaggccgagcacgtgcccccctatgatgtggtgcccagcatgaggcctgtggtgctggtgggccccagcctgaagggctatgaggtgacagacatgatgcagaaggccctgtttgacttcctgaagcacagatttgatggccgcatcagcatcaccagggtgacagctgacctgagcctggccaagaggtctgtgctgaacaaccctgggaagaggaccatcatcgagaggagcagcgcccggagcagcattgctgaggtgcagagcgagattgaaagaatttttgagctggccaagagcctgcagctggtggtgctggatgctgacaccatcaaccacccagcccagctggccaagaccagcctggcccccatcatcgtgtttgtgaaggtgagcagccccaaggtgctgcagaggctcatccgcagccggggcaagagccagatgaagcacctgactgtgcagatgatggcctatgacaagctggtgcagtgccccccagagagctttgatgtgatcctggatgagaaccagctggaggatgcctgtgagcacctggccgagtacctggaggtgtactggagggccacccaccacccagcccctggccctggcctgctgggcccccccagcgccatccctggcctgcagaaccagcagctgctgggggagcggggggaggagcacagccccctggagcgggacagcctgatgcccagtgatgaggccagcgagagcagccggcaggcctggacaggcagcagccagaggagcagccgccacctggaggaggactatgcagatgcctaccaggacctgtaccagccccaccggcagcacaccagcggcctgcccagcgccaatggacatgacccccaggaccggctgctggcccaggacagcgagcacaaccacagcgacaggaactggcagaggaaccggccctggcccaaggacagctactag

SEQ ID NO: 14819 - DNA, 1455 bp, Artificial Sequence
  derived and/or modified sequence
atgtacgacgacagctacgtgcccggcttcgaggacagcgaggccggtagtgccgactcgtatacatcccgcccaagcctggatagcgatgtatctcttgaggaggacagagaatcagctcgacgggaggtagagtcacaggcccagcagcaattagagcgggcaaaacacaagcccgtagctttcgctgttaggaccaatgtgtcctactgcggcgtgttggacgaggagtgccccgttcagggatccggagtgaactttgaagcgaaagacttcctgcatatcaaggaaaagtatagcaatgattggtggatcgggaggttggtgaaggaaggcggcgatattgccttcatcccatcgccccagaggctggagagtatcaggttaaaacaggagcagaaagccagaagaagtggcaacccctcttctctgagcgatataggcaaccggaggtccccccctccatcacttgctaaacagaagcaaaaacaagccgaacacgtgccgccatacgacgttgttccctctatgaggccggtcgttctggtcggccccagtctcaaaggctatgaggtaacagatatgatgcaaaaggctctgttcgattttttaaaacatcgcttcgacggtcgcatcagcattacacgcgtcacggccgacttaagccttgcaaagagaagtgtccttaacaaccctggaaaacggacaataattgaacgatctagtgctaggagtagcatagctgaggtccagtccgagattgagcggatttttgagctggcaaaaagtctccagttggttgtgctcgatgcagacaccatcaaccatccggcacagctggcaaaaacgagtttggcccctattatcgtgtttgtcaaagtttccagtcctaaagtgctgcagcgcctcattagaagtagaggaaagagccagatgaaacacttaacagttcaaatgatggcttatgataagcttgtgcagtgtccacccgaatcattcgacgttatacttgacgagaaccaacttgaagacgcctgcgagcaccttgcagagtatctcgaagtctactggagggctactcaccacccggcaccagggccaggacttctcggaccgccgtctgccatccccggcctacagaaccagcagctgttgggagaacgaggggaggagcatagtccattggagcgcgactccctgatgcctagcgacgaggcctccgaatcctccagacaggcatggactggctccagccagagaagttcgcggcaccttgaggaagactacgcggatgcataccaggatctgtaccagccacatcgacaacacaccagtggtttgccatccgccaacggccatgacccgcaggacaggttactagcacaggactctgagcacaaccactctgacaggaattggcagcgcaacaggccatggcctaaggactcgtactag

SEQ ID NO: 14820 - DNA, 1455 bp, Artificial Sequence
  derived and/or modified sequence
atgtatgacgactcctatgtgcccggatttgaggactcagaagctggcagcgcagatagttatacgagcaggccttctcttgatagtgacgttagcctcgaagaggaccgggaatccgccagacgtgaagtggaaagccaggcacaacaacagttagagcgagctaaacacaagcccgtagccttcgccgtacgcacaaatgtgtcgtattgtggtgtactcgacgaagagtgccctgtacagggcagcggcgtcaactttgaggcaaaggacttcctacacatcaaggagaagtatagtaatgactggtggatcggcagattggttaaggagggaggcgatattgcctttatcccttcgccacagcgcctggagtctatccggctaaagcaagagcaaaaggctaggagaagtggtaacccgagttcactgtccgacatagggaaccgcaggagcccccctccgagtttggccaagcaaaagcagaagcaggcggagcatgtgccgccatacgatgtggtgcccagtatgcgtccagtggtcctggtgggcccatcactgaagggttacgaagtcacggacatgatgcagaaagccctgttcgatttcttaaaacatcgcttcgacggcagaatttcaatcactagggtcacagctgacctgtccctggcaaagcgcagcgtgttgaacaatccgggtaaaagaacaatcattgagcgctccagtgcacggtcctcaatcgccgaggtgcagagcgagatagagcgcattttcgagttagccaagtctctgcagttggtcgttctggacgctgacaccatcaatcatccggcacagctggccaagaccagcctagcgcctattattgtgttcgtcaaggtctcttcccctaaggttctccagcggttaattaggagtcgtggaaaaagtcagatgaaacacctgactgtgcagatgatggcatacgataagctggtccagtgcccccctgagagcttcgacgtgattcttgacgagaatcaattggaagatgcctgcgagcacctggctgagtatctggaggtgtactggcgggcaacgcatcaccctgccccaggcccaggcttgctaggcccaccatcagccatccctggcttacaaaatcagcagctgttgggtgaaaggggcgaggagcacagccctctggagcgtgactcgttgatgccgtcggacgaggcatcagaatccagcaggcaggcgtggacgggcagcagtcagcgcagtagtcgacacctcgaggaggattatgcggacgcttaccaggatctctaccaaccacataggcagcacacgtcgggcctgccatctgcaaacgggcacgacccccaggatcggctcctggcgcaggacagcgagcacaaccattccgacagaaactggcagcgcaatcgcccttggcccaaggactcgtactag

SEQ ID NO: 14821 - DNA, 2696 bp, Artificial Sequence
  derived and/or modified sequence
gtggggggagcggtgatctgagctccgagcagctggtcttcgcggctcgctccctccttcgcgctctctcgctccctgccgccgcccgcagggctgcggggctcggtggcatctcccgggcgcggcccgcagtccttgcccctgcctccgggccgctcccgcccccggcgccgctcgctcccccgacccggactcccccatgtatgacgactcctacgtgcccgggtttgaggactcggaggcgggttcagccgactcctacaccagccgcccatctctggactcagacgtctccctggaggaggaccgggagagtgcccggcgtgaagtagagagccaggctcagcagcagctcgaaagggccaagcacaaacctgtggcatttgcggtgaggaccaatgtcagctactgtggcgtactggatgaggagtgcccagtccagggctctggagtcaactttgaggccaaagattttctgcacattaaagagaagtacagcaatgactggtggatcgggcggctagtgaaagagggcggggacatcgccttcatccccagcccccagcgcctggagagcatccggctcaaacaggagcagaaggccaggagatctgggaacccttccagcctgagtgacattggcaaccgacgctcccctccgccatctctagccaagcagaagcaaaagcaggcggaacatgttcccccatatgacgtggtgccctccatgcggcctgtggtgctggtgggaccctctctgaaaggttatgaggtcacagacatgatgcagaaggctctcttcgacttcctcaaacacagatttgatggcaggatctccatcacccgagtcacagccgacctctccctggcaaagcgatctgtgctcaacaatccgggcaagaggaccatcattgagcgctcctctgcccgctccagcattgcggaagtgcagagtgagatcgagcgcatatttgagctggccaaatccctgcagctagtagtgttggacgctgacaccatcaaccacccagcacagctggccaagacctcgctggcccccatcatcgtctttgtcaaagtgtcctcaccaaaggtactccagcgtctcattcgctcccgggggaagtcacagatgaagcacctgaccgtacagatgatggcatatgataagctggttcagtgcccaccggagtcatttgatgtgattctggatgagaaccagctggaggatgcctgtgagcacctggctgagtacctggaggtttactggcgggccacgcaccacccagcccctggccccggacttctgggtcctcccagtgccatccccggacttcagaaccagcagctgctgggggagcgtggcgaggagcactccccccttgagcgggacagcttgatgccctctgatgaggccagcgagagctcccgccaagcctggacaggatcttcacagcgtagctcccgccacctggaggaggactatgcagatgcctaccaggacctgtaccagcctcaccgccaacacacctcggggctgcctagtgctaacgggcatgacccccaagaccggcttctagcccaggactcagagcacaaccacagtgaccggaactggcagcgcaaccggccttggcccaaggatagctactgacagcctcctgctgccctaccctggcaggcacaggcgcagctggctggggggcccactccaggcagggtggcgttagactggcatcaggctggcactaggctcagcccccaaaaccccctgcccagccccagcttcagggctgcctgtggtcccaaggttctgggagaaacaggggaccccctcacctcctgggcagtgacccctactaggctcccattccaggtactagctgtgtgttctgcacccctggcaccttcctctcctcccacacaggaagctgccccactgggcagtgccctcaggccaggatccccttagcagggtccttcccaccagactcagggaagggatgccccattaaagtgacaaaagggtggggtgtgggcaccatggcatgaggaagaaacaaggtccctgagcaggcacaagtcctgacagtcaagggactgctttggcatccagggcctccagtcacctcactgccatacattagaaatgagacaatcaaagcccccccagggtggcacacccatctgtttgctggggtgtggcagccacatccaagactggagcagcaggctggccacgctcgggccagagagagctcacagctgaagctcttggagggaagggctctcctcaccctgccaggaagcttcttaacatgtgacaggaccagggaccaggagcatggtgaagccaagtggcagatgggagccaacctggatgggggtttggggaaggagggcatgtgtagcagagaacttaggggggcctccttgcctttctcattcttttgccctgcatcctgtcatttctgttcttgtccctcatacatctttggagaaccgggctccagactttgttccctgactcatagctgccgcttgttaggttagggttagatggggagagacagggcacagaggacctgtctccccggctactcttgccttatggctctagtgtgtgacctacagagcatgctccacaagcccctgcctcacctcactgtcatcactaataaacatcatgcacagtc

SEQ ID NO: 14822 - DNA, 1455 bp, Artificial Sequence
  derived and/or modified sequence
atgtacgacgacagctacgtgcccggcttcgaggacagcgaggccggcagcgccgacagctacaccagcagacccagcctggacagcgacgtgagcctggaggaggacagagagagcgccagaagagaggtggagagccaggcccagcagcagctggagagagccaagcacaagcccgtggccttcgccgtgagaaccaacgtgagctactgcggcgtgctggacgaggagtgccccgtgcagggcagcggcgtgaacttcgaggccaaggacttcctgcacatcaaggagaagtacagcaacgactggtggatcggcagactggtgaaggagggcggcgacatcgccttcatccccagcccccagagactggagagcatcagactgaagcaggagcagaaggccagaagaagcggcaaccccagcagcctgagcgacatcggcaacagaagaagccccccccccagcctggccaagcagaagcagaagcaggccgagcacgtgcccccctacgacgtggtgcccagcatgagacccgtggtgctggtgggccccagcctgaagggctacgaggtgaccgacatgatgcagaaggccctgttcgacttcctgaagcacagattcgacggcagaatcagcatcaccagagtgaccgccgacctgagcctggccaagagaagcgtgctgaacaaccccggcaagagaaccatcatcgagagaagcagcgccagaagcagcatcgccgaggtgcagagcgagatcgagagaatcttcgagctggccaagagcctgcagctggtggtgctggacgccgacaccatcaaccaccccgcccagctggccaagaccagcctggcccccatcatcgtgttcgtgaaggtgagcagccccaaggtgctgcagagactgatcagaagcagaggcaagagccagatgaagcacctgaccgtgcagatgatggcctacgacaagctggtgcagtgcccccccgagagcttcgacgtgatcctggacgagaaccagctggaggacgcctgcgagcacctggccgagtacctggaggtgtactggagagccacccaccaccccgcccccggccccggcctgctgggcccccccagcgccatccccggcctgcagaaccagcagctgctgggcgagagaggcgaggagcacagccccctggagagagacagcctgatgcccagcgacgaggccagcgagagcagcagacaggcctggaccggcagcagccagagaagcagcagacacctggaggaggactacgccgacgcctaccaggacctgtaccagccccacagacagcacaccagcggcctgcccagcgccaacggccacgacccccaggacagactgctggcccaggacagcgagcacaaccacagcgacagaaactggcagagaaacagaccctggcccaaggacagctactag

SEQ ID NO: 14823 - protein, 521 aa, Artificial Sequence
  derived and/or modified sequence
MSSSSYAKNGTADGPHSPTSQVARGTTTRRSRLKRSDGSTTSTSFILRQGSADSYTSRPSDSDVSLEEDREAIRQEREQQAAIQLERAKSKPVAFAVKTNVSYCGALDEDVPVPSTAISFDAKDFLHIKEKYNNDWWIGRLVKEGCEIGFIPSPLRLENIRIQQEQKRGRFHGGKSSGNSSSSLGEMVSGTFRATPTSTVKMVLKIHTEHIPPYDVVPSMRPVVLVGPSLKGYEVTDMMQKALFDFLKHRFDGRISITRVTADISLAKRSVLNNPSKRAIIERSNTRSSLAEVQSEIERIFELARSLQLVVLDADTINHPAQLIKTSLAPIIVHVKVSSPKVLQRLIKSRGKSQSKHLNVQLVAADKLAQCPPEMFDVILDENQLEDACEHLGEYLEAYWRATHTTSSTPMTPLLGRNLGSTALSPYPTAISGLQSQRMRHSNHSTENSPIERRSLMTSDENYHNERARKSRNRLSSSSQHSRDHYPLVEEDYPDSYQDTYKPHRNRGSPGGYSHDSRHRL

SEQ ID NO: 14824 - protein, 520 aa, Artificial Sequence
  derived and/or modified sequence
MSSSSYAKNGTADGPHSPTSQVARGTTTRRSRLKRSDGSTTSTSFILRQGSADSYTSRPSDSDVSLEEDREAIRQEREQQAAIQLERAKSKPVAFAVKTNVSYCGALDEDVPVPSTAISFDAKDFLHIKEKYNNDWWIGRLVKEGCEIGFIPSPLRLENIRIQQEQKRGRFHGGKSSGNSSSSLGEMVSGTFRATPTSTAKQKQKVTEHIPPYDVVPSMRPVVLVGPSLKGYEVTDMMQKALFDFLKHRFDGRISITRVTADISLAKRSVLNNPSKRAIIERSNTRSSLAEVQSEIERIFELARSLQLVVLDADTINHPAQLIKTSLAPIIVHVKVSSPKVLQRLIKSRGKSQSKHLNVQLVAADKLAQCPPEMFDVILDENQLEDACEHLGEYLEAYWRATHTTSSTPMTPLLGRNLGSTALSPYPTAISGLQSQRMRHSNHSTENSPIERRSLMTSDENYHNERARKSRNRLSSSSQHSRDHYPLVEEDYPDSYQDTYKPHRNRGSPGGYSHDSRHRL

SEQ ID NO: 14825 - DNA, 1566 bp, Artificial Sequence
  derived and/or modified sequence
atgagttctagcagctacgccaagaatggcacggccgacgggccccactccccaacttcacaggtggcacgcgggactaccactcgacggtcccgcctcaaacgctcagatggttctaccacttccacaagctttattctccggcaggggtctgccgactcctatacctccaggcccagtgactccgatgtgtctttagaagaagatcgggaagccatccgacaggagcgtgaacagcaagccgctattcagctggagagggctaaatctaagcccgtggcctttgcggtgaagactaatgtatcatattgtggagccctggatgaagacgtgcctgttcccagcacagccatctccttcgacgccaaggatttcctgcatatcaaagagaaatataataatgattggtggatagggcgcctggttaaagaaggctgtgagatcggttttattccatcaccacttcggctcgagaacattagaattcaacaggaacagaagagaggccgttttcacggcggcaaaagtagcggcaactcgagttccagtctgggcgagatggtgtcgggaacatttcgagccacccctacctcgacagtcaagatggtacttaagatccacaccgaacacattcctccttacgatgtcgtcccctcgatgcgtcctgtcgtcttggtagggccaagtttgaagggctatgaggtgacggatatgatgcaaaaagctctttttgacttcctgaaacacagattcgacgggagaatatcaatcacccgggtaacagcagatataagccttgctaaaagatccgtcctcaacaacccgagtaagcgcgccattattgaacgaagcaatactcgaagcagcctcgctgaagtgcagtcagaaattgagaggattttcgaactggccaggtccctgcaactggtggtactcgatgctgatacgattaatcaccccgctcagctgatcaaaaccagcctggcaccaatcatcgtgcatgttaaagtctctagtcccaaagtactgcagcggctcattaaatcccgaggcaaaagccagtccaagcacctcaacgttcaactggtggccgccgataaactggctcagtgcccccctgaaatgtttgatgtgatacttgatgagaaccaactcgaagatgcatgcgagcatctaggtgagtatctcgaggcttattggcgggccacgcataccacctcttctactccaatgactccgctgctagggcggaacttggggagcacagcactgtctccatatcccacagccattagcgggctgcagagccagaggatgcgtcactccaaccacagcactgaaaactctcccatagagaggagatcactgatgacctccgatgagaactatcataacgagagggctaggaaatcccgcaacagactgtcatcgtcaagtcagcacagccgggatcactatccattagtggaagaggattaccctgatagctaccaagacacctacaagccccaccgcaaccgggggagccccggcggctatagccacgacagcagacaccgtctatag

SEQ ID NO: 14826 - DNA, 1563 bp, Artificial Sequence
  derived and/or modified sequence
atgtcttcttcttcctatgccaagaacggtaccgctgacggaccccacagccctacgtcccaagtggctagaggaactaccacccggcggagccgcctgaagcggagtgatgggtccactacgagcacttcctttattctgagacaaggatctgcagattcgtacacgtcccggccatctgactcagacgtcagcttggaggaagatagagaagccatcagacaagagagggagcagcaagccgcaatccaactggagcgcgcaaagtccaaacccgtcgcctttgcagtcaaaaccaacgtttcatattgcggggctttggatgaggatgtaccagtaccatccacagcgatctccttcgatgccaaggacttcctgcacataaaggagaaatacaacaatgattggtggattggtcgcttggttaaggaaggttgcgagatcgggtttattccttcacccttaagattagagaatattcgtatccagcaagagcagaagcgcggacgctttcacggcggtaaaagcagtggcaattcctcaagctccctgggtgagatggtctctgggacctttcgagccactcccaccagcacggccaagcaaaagcaaaaggtcaccgaacatattccgccgtatgacgtggtgccaagtatgaggcctgtcgtcctggtgggtccttctctgaaaggttacgaagtcactgatatgatgcagaaggcccttttcgacttcctaaagcacaggtttgacgggaggatctcaataacccgagtgaccgcagacatctccctggctaagagaagtgtgctgaacaatccatccaagcgggctattatcgagaggtcaaacacccgatcgagcctggccgaggtccaatccgaaatcgagaggatttttgaattagcaagatcccttcagctggtggttttagacgcagatacaatcaatcatcccgcacagcttatcaagacatcacttgccccaattatagtacacgtgaaggttagctcccctaaggtgctgcagcggctaatcaagagcagaggtaagtcccagagtaaacaccttaacgtgcagttggtggccgcagataagctggctcagtgccctcccgagatgttcgacgtcatcttggatgaaaaccaattggaggatgcctgcgagcacctgggtgaataccttgaagcatactggagggctactcacaccacttcatcaactccaatgaccccccttctgggtcgtaatttgggctccacagcccttagtccgtacccaactgcaatttcaggactccagtcacagagaatgcgccatagtaaccactctactgagaattctcctatcgagcgccgcagtctaatgaccagcgacgaaaactaccacaacgagcgggctcggaagtctagaaatcgactgagtagcagcagtcagcatagtcgagaccattacccattagtcgaggaggattatcctgatagctatcaggacacttataaaccccatcggaaccgtgggtctccaggaggctattcccacgactctcgccaccgtctatag

SEQ ID NO: 14827 - DNA, 1566 bp, Artificial Sequence
  derived and/or modified sequence
atgagcagcagcagctatgccaagaatggaacagcagatggcccccacagccccaccagccaggtggcccggggcaccaccaccaggaggagccggctgaagagaagtgatggcagcaccaccagcaccagcttcatcctgcggcagggcagcgctgacagctacaccagccggcccagcgacagtgatgtgtccctggaggaggaccgggaggccatccggcaggagcgggagcagcaggccgccatccagctggagcgggccaagagcaagcctgtggcctttgctgtgaagaccaacgtgtcctactgtggggccctggatgaagatgtgcctgtgcccagcacagccatcagctttgatgccaaggacttcctgcacatcaaggagaagtacaacaatgactggtggattggccgcctggtgaaggagggctgtgagatcggcttcatccccagccccctgcggctggagaacatccgcatccagcaggagcagaagaggggccgcttccacggcggcaagagcagcggcaacagcagcagcagcctgggggagatggtgtctggcaccttccgggccacccccaccagcacagtgaagatggtgctgaagatccacacagagcacatccccccctatgatgtggtgcccagcatgaggcctgtggtgctggtgggccccagcctgaagggctatgaggtgacagacatgatgcagaaggccctgtttgacttcctgaagcacagatttgatggccgcatcagcatcaccagggtgacagctgacatcagcctggccaagaggtctgtgctgaacaaccccagcaagagggccatcatcgagaggagcaacaccaggagcagcctggccgaggtgcagagcgagattgagcgcatctttgagctggcccggagcctgcagctggtggtgctggatgctgacaccatcaaccacccagcccagctgatcaagaccagcctggcccccatcatcgtgcacgtgaaggtgagcagccccaaggtgctgcagaggctcatcaagagccggggcaagagccagagcaagcacctgaatgtgcagctggtggccgctgacaagctggcccagtgccccccagagatgtttgatgtgatcctggatgagaaccagctggaggatgcctgtgagcacctgggggagtacctggaggcctactggagggccacccacaccaccagcagcacccccatgacccccctgctgggcaggaacctgggcagcacagccctgagcccctaccccacagccatcagcggcctgcagagccagaggatgaggcacagcaaccacagcacagagaacagccccattgaaagaagaagcctgatgaccagtgatgagaactaccacaatgaaagagccaggaagagcaggaaccggctgagcagcagcagccagcacagccgggaccactaccccctggtggaggaggactacccagacagctaccaggacacctacaagccccacaggaacagaggcagccctgggggctacagccatgacagccgccaccggctgtag

SEQ ID NO: 14828 - DNA, 1563 bp, Artificial Sequence
  derived and/or modified sequence
atgagcagcagcagctatgccaagaatggaacagcagatggcccccacagccccaccagccaggtggcccggggcaccaccaccaggaggagccggctgaagagaagtgatggcagcaccaccagcaccagcttcatcctgcggcagggcagcgctgacagctacaccagccggcccagcgacagtgatgtgtccctggaggaggaccgggaggccatccggcaggagcgggagcagcaggccgccatccagctggagcgggccaagagcaagcctgtggcctttgctgtgaagaccaacgtgtcctactgtggggccctggatgaagatgtgcctgtgcccagcacagccatcagctttgatgccaaggacttcctgcacatcaaggagaagtacaacaatgactggtggattggccgcctggtgaaggagggctgtgagatcggcttcatccccagccccctgcggctggagaacatccgcatccagcaggagcagaagaggggccgcttccacggcggcaagagcagcggcaacagcagcagcagcctgggggagatggtgtctggcaccttccgggccacccccaccagcacagccaagcagaagcagaaggtgacagagcacatccccccctatgatgtggtgcccagcatgaggcctgtggtgctggtgggccccagcctgaagggctatgaggtgacagacatgatgcagaaggccctgtttgacttcctgaagcacagatttgatggccgcatcagcatcaccagggtgacagctgacatcagcctggccaagaggtctgtgctgaacaaccccagcaagagggccatcatcgagaggagcaacaccaggagcagcctggccgaggtgcagagcgagattgaaagaatttttgagctggcccggagcctgcagctggtggtgctggatgctgacaccatcaaccacccagcccagctgatcaagaccagcctggcccccatcatcgtgcacgtgaaggtgagcagccccaaggtgctgcagaggctcatcaagagccggggcaagagccagagcaagcacctgaatgtgcagctggtggccgctgacaagctggcccagtgccccccagagatgtttgatgtgatcctggatgagaaccagctggaggatgcctgtgagcacctgggggagtacctggaggcctactggagggccacccacaccaccagcagcacccccatgacccccctgctgggcaggaacctgggcagcacagccctgagcccctaccccacagccatcagcggcctgcagagccagaggatgaggcacagcaaccacagcacagagaacagccccatcgagcggcgcagcctgatgaccagtgatgagaactaccacaatgaaagagccaggaagagcaggaaccggctgagcagcagcagccagcacagccgggaccactaccccctggtggaggaggactacccagacagctaccaggacacctacaagccccacaggaacagaggcagccctgggggctacagccatgacagccgccaccggctgtag

SEQ ID NO: 14829 - DNA, 1566 bp, Artificial Sequence
  derived and/or modified sequence
atgagcagcagcagctacgccaagaacggcaccgccgacggcccccacagtccgacatctcaggtggcgcgcggaacaacaacccgccggtcgcgcctgaagagatcggatgggtcaaccacgagtacatccttcatcttgagacaggggtcagccgactcatacacttcaaggcccagcgacagtgacgtgtcgctcgaggaagacagggaggccatcagacaggagcgggagcagcaggccgccatccagttagagcgtgccaaaagcaagcccgtggccttcgccgtgaagactaatgtcagttattgtggtgctctggacgaggacgtgcccgttccaagcacagcaattagctttgatgccaaggacttcctccacataaaggaaaagtataataatgactggtggataggtcggttggttaaagaggggtgtgaaataggcttcatcccatctccgctcaggctagaaaacataagaatccagcaagagcagaagcgcggccggttccacggcggtaagagttcagggaattcgtcgtcatcactgggagagatggtgagcggtactttcagagctacccctacgtctaccgtaaagatggtactgaaaatccataccgagcatatacctccatacgatgtcgtgccatccatgcggcctgtagtgctggtgggccctagcctcaagggctatgaggtgactgacatgatgcaaaaagcgctgtttgacttccttaagcatcgtttcgacggcagaatcagtattaccagggtgacagctgacattagcctcgcgaagagatcagtcctgaacaacccatcaaagcgcgcaatcatcgaacgaagcaatacccggtcctcccttgccgaagtgcagtcagaaatagaacggatatttgagctggcacgttcactacagctggtggtactggatgcagatacaatcaaccacccagcccagctgataaagaccagcctcgcccccatcattgttcatgtcaaggtatcttctcctaaggtcctgcagaggcttatcaagagccgaggtaagagccagtctaagcaccttaacgtccagttagtggcagcggacaagctcgctcagtgccccccggaaatgttcgacgtaatcttagatgagaaccaattggaggacgcctgcgagcatcttggcgaataccttgaggcctattggagagccacccacaccacctcttctaccccgatgacaccacttctaggtagaaatcttggttcaaccgctctcagcccctaccccacagccatcagtggcctgcagagtcaacgcatgaggcacagcaaccatagtaccgagaattcgccaatcgagaggcggtccctgatgaccagcgatgaaaactaccacaatgagcgggcccgcaaaagccgtaatcgtctgtcctccagctcccagcatagccgcgatcattatcctctcgtcgaagaagattatcccgatagctatcaggacacttacaaacctcatcggaatcgaggttccccaggcggctacagccatgattcccgacatagactgtag

SEQ ID NO: 14830 - DNA, 1563 bp, Artificial Sequence
  derived and/or modified sequence
atgagcagcagcagctacgccaagaacggcaccgccgacggcccccacagcccaacaagccaagtggcacgagggaccactacacgacggtccagattaaagcgttccgacggaagtacaaccagcaccagctttatattacggcaagggagcgcggattcatatacctcacgaccaagcgattccgacgtgagcctggaagaagaccgggaagccattaggcaggagcgggagcagcaagccgccatacagcttgaacgggctaagtccaaaccagtggccttcgctgttaagacaaacgtgagttactgtggggcccttgatgaggacgttcccgtccctagcactgcgatttcattcgacgccaaagattttcttcatattaaggagaagtataacaatgattggtggataggaagactggtgaaggagggttgcgaaatcggctttattccctcacccctgcgccttgaaaatattcggatccagcaggagcagaagcgggggaggtttcacggggggaagagctctggaaacagttctagcagcctaggcgagatggtgagcggaactttcagggctacaccaacctcgactgccaagcagaaacagaaggtcacagagcatattcctccctatgatgtggtgccgtctatgaggccagtggttctcgtgggaccttccctgaagggatacgaggtgacagacatgatgcaaaaggctctgtttgactttctgaagcaccggtttgacggacgcatcagcatcaccagagtgacggctgacatcagtctggcgaagagatctgttctgaacaatcccagcaagagggccatcatcgagaggtccaatacgcgcagttccctggcagaggtgcaatcagagatcgagcgcatttttgaactagctcggtctctgcagctggtggtactcgacgccgacacaattaatcatcccgcccagttgattaaaaccagcttggcgccaattatcgtccatgtcaaagtgtcctcaccaaaggtgctccagcggctaatcaagtctcgtggtaagtcgcaaagcaaacacctcaatgtccaactagttgctgccgataagttggcgcagtgcccccctgagatgttcgacgtcatcttagatgaaaaccagctcgaggatgcctgcgagcacctcggcgagtacctagaggcttactggcgtgccacacacactacttccagcacacccatgacccctctgctcgggagaaatctcgggagcaccgcactgtcgccctatcctacggccatttcaggcttacagagccaacggatgcgtcattccaaccattctactgagaacagcccgatcgaacggaggagcttgatgacaagcgacgagaactatcataatgaacgggctcgtaaatccaggaacaggttaagttctagcagccagcactcccgggaccattaccctctggtagaagaagattacccagactcttatcaggacacatacaagccacataggaaccgtggatcccctggcggctacagccacgatagcagacatagattatag

SEQ ID NO: 14831 - DNA, 1566 bp, Artificial Sequence
  derived and/or modified sequence
atgtcttctagtagctatgctaagaatggcaccgccgacggtcctcattccccgacttcacaggttgctcggggaacaacgaccagacggagcagacttaagcgctccgatggtagcactaccagcacctccttcatcttgagacagggaagtgcagatagctacacgtctcgtccgtcagatagtgatgtgtctctcgaagaggatcgggaggccattagacaggaacgtgaacagcaggcagccatacagctggagagagcaaaatctaaaccagtagcattcgcagtaaagaccaatgtgtcttactgtggggctcttgatgaggacgtgcccgtcccctccacagcaatcagtttcgatgccaaggatttcctccatattaaagaaaaatacaataacgattggtggatagggagactggtgaaggagggatgcgagatcggatttatcccatctcctctcagactcgaaaatatccgcatccagcaggagcagaaaagaggcagatttcacgggggaaaaagcagcgggaattcctcttctagtctgggggagatggtgtctggcactttccgcgcaacccccacctcaacggtcaagatggtgttgaaaatccacaccgagcacatccctccatacgacgttgtgccatctatgcggcctgtggtgctcgtgggcccttccctcaaaggctatgaagtaactgacatgatgcagaaggccttgttcgattttctaaagcaccgcttcgatggccgaatctcgatcacacgcgtcaccgccgacatctcgttagcgaagaggagcgtcctgaataacccctccaagagggctatcatcgagaggtccaatacaagatctagcctggcagaggttcagtccgaaattgaaagaatctttgaactcgccaggtcccttcagctggtagtgcttgatgcagacacaatcaaccatccagcccagctgattaaaacttcgctggctccaattatcgtgcacgttaaagtgagctccccaaaagtgctccagaggctcattaaatccaggggaaagagccaaagtaaacaccttaatgtgcagctggtggccgcagataaattggcccagtgccccccagagatgttcgacgtcatacttgacgaaaatcaattggaggacgcatgtgaacacctgggagaatacctcgaagcatactggagagccactcatacaacctcaagcaccccaatgacccctttactgggcagaaatcttggatctaccgccctgtccccatatcctactgccatttctgggctgcagtctcagcgcatgagacacagtaatcactctacagaaaattccccaatcgagaggcgctcactgatgactagtgacgagaattaccataatgagcgtgcacggaaatctcgcaaccgcctgagtagtagctcacagcactcaagagaccactatccactcgtagaggaggactatccggactcttaccaggatacttataaacctcaccgcaatcgtgggagccccggtgggtactcacatgactcacgtcatcgcctctag

SEQ ID NO: 14832 - DNA, 1563 bp, Artificial Sequence
  derived and/or modified sequence
atgtcctctagttcctatgcaaaaaacggcactgcagacggtccccactcccctacatctcaggtggccagaggcacgacaacacgcagaagtcggctaaagagaagtgacggctcgaccacatccacttcttttatcctgcgtcaaggctccgctgactcttacacttctcggccatccgactctgacgtttccttggaggaagaccgggaagcgattagacaggagcgtgagcagcaggctgccattcagttggagcgggcaaaatctaagcctgtggcttttgccgtgaaaaccaatgtcagttactgtggcgctctcgatgaggatgtgcctgttccatctaccgccatttccttcgacgcgaaggacttcctgcatattaaggagaaatataataacgactggtggatcgggcgattagtgaaggaagggtgcgagattgggttcataccaagcccacttcggctcgagaacattcggatacaacaggagcaaaagcggggtagattccacgggggtaagtcaagtgggaacagttcatcgtcactgggtgaaatggtaagcggtactttccgggctacgcccaccagcaccgctaagcagaagcagaaggtgacagaacatattccgccttatgatgtggtaccgagtatgcgtccagttgtgctggtcggcccttccctgaaaggatacgaggtcacggatatgatgcagaaggccctctttgactttctcaaacatagattcgatggtaggataagcatcaccagggtaaccgccgacattagtttggctaagagatccgttttaaataatccctccaagcgggctatcatagagcgatcaaatactcggtcctccctcgctgaagtccagagcgagattgagagaatctttgagctggcccgtagtttacagttggtcgtgctggacgcagacacgatcaaccaccctgcccagcttataaaaacaagcttggcccctataattgtgcacgtaaaagtgagtagtcctaaggtgctgcagcggctcattaaatctagggggaagagccagtctaagcatctcaacgttcagcttgtcgcagctgacaagcttgctcagtgccctcccgagatgtttgatgtgattctcgatgagaaccagttagaggacgcctgtgagcacctgggcgaatatcttgaagcctactggagggcaacccatacaactagctcaactcccatgactccactccttggacgaaatctgggatctactgctctgtcaccttatcccaccgccatttccgggctccaatcacaaagaatgagacactcgaatcactctacagagaattcgccaatcgagagaaggagcctgatgacatccgacgaaaactatcacaatgaacgagctcggaagtcccggaaccgcctatcctcttcatcccagcacagtcgggaccactaccctcttgtggaggaagattatcccgactcctaccaggatacctacaaacctcataggaatagaggtagccccggtgggtattcccacgattctagacaccggctgtag

SEQ ID NO: 14833 - DNA, 1566 bp, Artificial Sequence
  derived and/or modified sequence
atgtcctcctcctcctacgccaagaacgggaccgcggacgggccgcactcccccacctcgcaggtggcccgaggcaccacaacccggaggagcaggttgaaaagatccgatggcagcaccacttcgaccagcttcatcctcagacagggttcagcggattcctacacaagcaggccgtctgactccgatgtctctttggaagaggaccgggaagcaattcgacaggagagagaacagcaagcagctatccagcttgagagagcaaagtccaaacctgtagcatttgccgtgaagacaaatgtgagctactgcggcgccctggacgaggatgtgcctgttccaagcacagctatctcctttgatgctaaagactttctacatattaaagagaaatataacaatgattggtggataggaaggctggtgaaagagggctgtgaaattggcttcattccaagtccactcagattggagaacatacggatccagcaagaacaaaaaagaggacgttttcacggagggaaatcaagtggaaattcttcttcaagtcttggagaaatggtatctgggacattccgagcaactcccacatcaacagttaaaatggtattaaaaattcatacggagcacattcctccttacgatgttgtaccgtcaatgcgtccggtggtgttagtggggccgtcactgaaaggttacgaggtaacagacatgatgcagaaagccctctttgatttcctgaagcacaggtttgatgggaggatttcaataacgagagtgacagctgacatttctcttgctaagaggtctgtcctaaataatcccagcaagagagcaataattgaacgttcgaacacccggtccagcttagcggaagtacaaagtgaaattgaaagaatctttgagttggcaagatctttgcaactggttgttcttgatgcagacaccatcaatcacccagcacaacttataaagacttccttagcaccaattattgttcatgtaaaagtctcatctccaaaggttttacagcggttgattaaatctagaggaaagtcacaaagtaaacacttgaatgttcaactggtggcagctgataaacttgcacaatgccccccagaaatgtttgatgttatattggatgaaaatcagcttgaggatgcatgtgaacatctaggggagtacctggaggcgtactggcgtgccacccacacaaccagtagcacacccatgaccccgctgctgggaaggaatttgggctccacggcactctcaccatatcccacagcaatttctgggttacagagtcagcgaatgaggcacagcaaccactccacagagaactctccaattgaaagacgaagtctaatgacctctgatgaaaattatcacaatgaaagggctcggaagagtaggaaccgcttgtcttccagttctcagcatagccgagatcattaccctcttgtggaagaagattaccctgactcataccaggacacttacaaaccccataggaaccgaggatcacctgggggatatagccatgactcccgacataggctttga

SEQ ID NO: 14834 - DNA, 7974 bp, Artificial Sequence
  derived and/or modified sequence
agcccagcctcgggggccagccccctccgcccaccgcacacgggctggccatgcggcggctctgaacgatgtcctcctcctcctacgccaagaacgggaccgcggacgggccgcactcccccacctcgcaggtggcccgaggcaccacaacccggaggagcaggttgaaaagatccgatggcagcaccacttcgaccagcttcatcctcagacagggttcagcggattcctacacaagcaggccgtctgactccgatgtctctttggaagaggaccgggaagcaattcgacaggagagagaacagcaagcagctatccagcttgagagagcaaagtccaaacctgtagcatttgccgtgaagacaaatgtgagctactgcggcgccctggacgaggatgtgcctgttccaagcacagctatctcctttgatgctaaagactttctacatattaaagagaaatataacaatgattggtggataggaaggctggtgaaagagggctgtgaaattggcttcattccaagtccactcagattggagaacatacggatccagcaagaacaaaaaagaggacgttttcacggagggaaatcaagtggaaattcttcttcaagtcttggagaaatggtatctgggacattccgagcaactcccacatcaacagcaaaacagaagcaaaaagtgacggagcacattcctccttacgatgttgtaccgtcaatgcgtccggtggtgttagtggggccgtcactgaaaggttacgaggtaacagacatgatgcagaaagccctctttgatttcctgaagcacaggtttgatgggaggatttcaataacgagagtgacagctgacatttctcttgctaagaggtctgtcctaaataatcccagcaagagagcaataattgaacgttcgaacacccggtccagcttagcggaagtacaaagtgaaattgaaagaatctttgagttggcaagatctttgcaactggttgttcttgatgcagacaccatcaatcacccagcacaacttataaagacttccttagcaccaattattgttcatgtaaaagtctcatctccaaaggttttacagcggttgattaaatctagaggaaagtcacaaagtaaacacttgaatgttcaactggtggcagctgataaacttgcacaatgccccccagaaatgtttgatgttatattggatgaaaatcagcttgaggatgcatgtgaacatctaggggagtacctggaggcgtactggcgtgccacccacacaaccagtagcacacccatgaccccgctgctgggaaggaatttgggctccacggcactctcaccatatcccacagcaatttctgggttacagagtcagcgaatgaggcacagcaaccactccacagagaactctccaattgaaagacgaagtctaatgacctctgatgaaaattatcacaatgaaagggctcggaagagtaggaaccgcttgtcttccagttctcagcatagccgagatcattaccctcttgtggaagaagattaccctgactcataccaggacacttacaaaccccataggaaccgaggatcacctgggggatatagccatgactcccgacataggctttgagtctaatgaaacaaaaaatattcatctgttgacaatttgccatagcagtgctaggataaaccaatcatcttaacttggctaacatagcacagtatttactgtgctaatgggctgctgtcattttatgctaagtaaggggcaaaaaaaaaaattacattatgcccttgagtctagatggatattagatgcccgatcatatagatatttttaagtgcaacatttacatgataacagtacattttgttttcttcatagatttagacacatcaatttgtaatttagggtacttacaaggcacatataaaataatttcccatgctggaaattccaaatgaccagttccagttggaaccaatttataaaccaattcctgttggaatttgggtgaattgactagaaagtctacttgagcatgttgtaatcaactgaaaaatctggggggaaaaaaaaaaaactaataagaaaatcgaaataccaatagaagccaaatccagctttggtatttatttgctggaagctaaatttacacttaaagttggagtgtataaacattttaatatatgttaatgttgccagaatgacttttcagacttaccaaatgtattgatagtgccaaaaaaaaaatctcagaaatcttaatgcagaaattatatagtctcctcagattttaatatttttatttctttcctggcacagctgttgtattcaaagtgttttgctttttgtttggtcagtactgttagctcatttgaagttggcaaaaacaaatacaaacaagcaaaaaacctcaaatttttttcagcagtgagagagaatagtaaagagaggcccaagcatagctggttatgtgaaatataaaatggggtgttgttctccctttaatcaatctgagcacaactacatacatccaggaatctgaagtcagatagtaaggatgtggtaccaatcctcccgagtgcaatgctaaacacttccaggtgggaattcatctatttcacttaacacaaacgcagggtctgtatttcctgccaacaagattgagtatctttccattgcttctctcagtctctgtctttgaatatctgaatgttctggcccttcaacaaattctttaaatcatgctaaggaatttcgttttatgtggacacactcaactttgatattcaggagatgtttttacaaaatgactaattgaaaaaagttgaaacaaatgattttaaaagcttgcagtaaaaaataaactcatagattcagcaaatatttgttgactaaaattatagcatttttaatgcagaaaattataaagaatttggagattgagctgccttatttctaatgaacactcctcttcatcttattaagtcttcacagtttttccagtggctataattatggaattggtgacctatgttttatattatcaaggaagccttagattcactctgatctaagaaattattgaaattgaccctttttacacaaatgtctttaaaaaaaaaaacttatttctaaatgtccatagtgcatgcattttctaaaaccccaataagtccagccataaaagttcttttctgctagtacatgtcatgaagcctatttttgaaaataatgataattaattttatagtatcttcttttctccccaagcctttcagtattcaggcactcaaagcatgcaccagttcagtaatcttcttgaccatggaaataagttccacattactgatgagttatatatatatcttgaaccccattacaacctcaccacatccccctgcatttatgttcagtgtttgtaccccattatgaacctgtttagctgataatgaggatacctataattctgtaagtcatttcaaatatttgatacaattaaaaaatatgggcttagtaaattttaaaagttaacatgtgatactggcttgtgagattcttctgtcatctagtgaagcttataaaactttcagttaagacattttaaaagagttatatccattaggcactttaataaacatataacctgccattactgaatactttgttagaacacagaagagcatcttccagcaaacaaaaatatatttattacatgtacagcacatacttgcatgagaaagaaaacattagccaaaacatttttctatatgctttactggtttcttgtttatgcgcattaaagtatttaattgcaaagagtgcaccaaggtgtacaaatttagactagacagctgttcagctttttctgtagtagcattagcagtttggtcatttaactactttaagatacttacattttatggcaggtagctgtaacagcatttaaatatatttcctagtcatcaagattaccatcttctttcaactttttaaaagtcacttgtttttaaaggtttttcaaagccttgtttttagtcttccatgtcatgccgataaagagagtctcattcaatatctgtgcacaaaaccaatctatcaattaccatcagatgtccatacctgttttgctttgcattcttattcaaaagctgacaatcttggaaagggtataatgtatattttattgatggatatatttaaatgtttactttaatttggaatattctttccccttctttctgtaataagtttatcttcctcaaataaggggatatacatcttattttttttaaagacttaagagtttattgtgtaaatgatacttaaaatctagatatatactaaatgaaaagttttatttttgccaagcacaccaagcacctttgaaaaatacatactccatactttgtttttaattaatttcatttaaagatagcaaatgattataagcaagagaaacaagtcttttactgttttgaggctgttttaacttacagtataagccacatactagaattctgtaatttcagtcacagacatataataatgtggactcatgtgacaatgtggaaatgtagttctggaaaaaaacgaatgcaatttgtcaatcctgatgttaattctcaagggtataatgtcactctaatattataaccaacaacattatcttgtttaatatttaaagcaacacttagaaatgtttataaatgatgattctctcttatctttatacagttctattggagagaaggttgaaattgttcacaatttagatgatggtctttcctaataagagtcttaattttgtgactatataagtcattgcagttagtctttaatgaaatgaattttattaatgtaaaacaaattctgagacaattatttgtttcctttaaataatctgctatttaattattattgtcgttgtttgcaaaatgtatttttggaatgttaacctcttttcatacctgcatacttgaacttgtcttttgtgtgggggccttaaaattcataataggaagtggaggcagtgaaaggaagtaagaaaaggaaattatgctaaaagatggtttgcaaatttaaattctttaaatgaacatatcacaaaatgttgttaagacccaggatgtccgttaagaatgtgtcttggcaaccttaatttgcatgttagtatatattttcttagttacacagttttattttggtatttgcttaaaaaatgtaataccattgtagaaattaccctatgtactgatatatttactacctcttctctagagaagacaatctgtctttaaagggaaaaacactggtcaataagtagtgatcaaaattatcactattctggctaaccttgctgcaaagctaaatacatagattattaaaatatgccttccctttagattttaaactgtttccaaaatgctgtttggcaccctttcatttcttccacgttagtgaagttttctttgaattggttcacagtttatcatgaggcaaggttaatttaacaaataagtcatcatagggaacaaaacaaactgcaagggaattgcctttgtgtgcaacttgttataatatctagttctaagtctaaaggagtaaaagtccaaagactttatgtttaagagcagctggtttgcaaattcacattttgttggtccttgacttccacagagcatgacttagccatttactgggtaaggatatgcataatcttggactcccatgtaattggaataaacttcatatcaatgtttcaaataaatgctatgtaccccttattccttttacatttctgcctttgtcttttatgacaatgttgcatgttgtgtttttttaaattatataaaactcatccttgaatgactgtatgaatgaaaaatttataggaaattatgtaataaaatctgttttattagtttctcatacctttaaatactgtcaatactataactgttagtaagttacttactcaagctgtgtctatggggcagagaacagtcctcttctttaaaataatcatgatcaaaccagtcaagtcaatccaattagctgttagacagacaataaggataaccttctttttgacttaagcagtcaagttagtcaaaatagaaaaattggcttatatgggcacccagaactacagcattcaaaaattacttttaaaagtttcttcttttattaaaatggactttcttaaataaaatacatcctctgatagcagctatctctttttacttgtaatgattaattctaaatgcttcatgtaattgagggacattatgagaagactagaaagtatctcatcagataatcctaagggctgtaacttctacttgccataaacaaagtataattaagagtgagtagcaattggtttggggagtcgtagttatatatgaaactttcttttgtttctcatgatgtatgtaaaatgtttgcagaaggatggtagaaaatgttactaatgaatttagagtggtttgggagaatacactgatacttcctcatttgaaaattataaggagttacaaggggaactaagaaccagaagtggctggcctctagcttttcaatacctgataagtgttcttggttatgttttgaacacttaaatttctcaacaaatggctatgtctatatttatgtaggggccacccttgccctacttgcatgccactttgacttttaactgaaatcagtgtgaattctgtatgcataagggatgtaataaagaggcgggatcattaacgctatatcgttgcatactatttttcatatgccttacaatattttctgggatgttattaaaatgaaagcattttattgccaaaataaatctatgttgttacttataatctgcattagcagtagaaaaataatgtagcaaaaacatattgtacagtacaaaattataaaatatatattttgccaataatataaaaatagattgaggagaaagaagcacatttgttatagcacaaacttataacaaaatccaccgttaaatttggcagtcatattttttaaaagtatgtcgatttagttctaagttttgtcagatttacttcatctaccatctttttaacttgctgcttgatacttttccagcaatttatttcatagccttgcaatctgtggatgtaatttcttttgttttattcccttccataaaatttattaaattttattttgtgataacactcataccatattttctcctcttatttcttctctttcaataacaacagcagaaagtcacagcaagtgagctcatagggctcctctgaattttggacatgtgtgagatttttgtatttttcacagcctcgagtcagaatgatcaataaagatgtcccaaccacaaaaaattatattagttagggattctttaatttgttttgtactgaatactactttgaaacataagttaaagccattagctgtgtttttgtagggatggtgggaaggaataaaaaataaatgtattaacataaaacatactaaaacagaaatatggcaaaatgatgtaaaaagatttttcctactattctgagggctgttgaaatcccaggctattgctatatctccattgacaaagtgggataaaaaatgcctttgtcaaataattttttttctttctttaaattttagttatttattttaataatttgtccccttttatttttcttatctaggtatgtgtagcattctacaaggcatgctgggtaaaatatactatgcaaatgtgtacagtgctgcatgttttgttctccctctgctttagtggctttaaagaaaaaaacgtggtgttatttttgtgaataaaaacattaacaaagaaaatgcagagtgcatgcatagagtatcctcatttctatggatttgttttatggaatttaaatgtgtacaaaacaactgcattactttttttcttttatataataaatgaaaaaaacac

SEQ ID NO: 14835 - DNA, 1566 bp, Artificial Sequence
  derived and/or modified sequence
atgagcagcagcagctacgccaagaacggcaccgccgacggcccccacagccccaccagccaggtggccagaggcaccaccaccagaagaagcagactgaagagaagcgacggcagcaccaccagcaccagcttcatcctgagacagggcagcgccgacagctacaccagcagacccagcgacagcgacgtgagcctggaggaggacagagaggccatcagacaggagagagagcagcaggccgccatccagctggagagagccaagagcaagcccgtggccttcgccgtgaagaccaacgtgagctactgcggcgccctggacgaggacgtgcccgtgcccagcaccgccatcagcttcgacgccaaggacttcctgcacatcaaggagaagtacaacaacgactggtggatcggcagactggtgaaggagggctgcgagatcggcttcatccccagccccctgagactggagaacatcagaatccagcaggagcagaagagaggcagattccacggcggcaagagcagcggcaacagcagcagcagcctgggcgagatggtgagcggcaccttcagagccacccccaccagcaccgtgaagatggtgctgaagatccacaccgagcacatccccccctacgacgtggtgcccagcatgagacccgtggtgctggtgggccccagcctgaagggctacgaggtgaccgacatgatgcagaaggccctgttcgacttcctgaagcacagattcgacggcagaatcagcatcaccagagtgaccgccgacatcagcctggccaagagaagcgtgctgaacaaccccagcaagagagccatcatcgagagaagcaacaccagaagcagcctggccgaggtgcagagcgagatcgagagaatcttcgagctggccagaagcctgcagctggtggtgctggacgccgacaccatcaaccaccccgcccagctgatcaagaccagcctggcccccatcatcgtgcacgtgaaggtgagcagccccaaggtgctgcagagactgatcaagagcagaggcaagagccagagcaagcacctgaacgtgcagctggtggccgccgacaagctggcccagtgcccccccgagatgttcgacgtgatcctggacgagaaccagctggaggacgcctgcgagcacctgggcgagtacctggaggcctactggagagccacccacaccaccagcagcacccccatgacccccctgctgggcagaaacctgggcagcaccgccctgagcccctaccccaccgccatcagcggcctgcagagccagagaatgagacacagcaaccacagcaccgagaacagccccatcgagagaagaagcctgatgaccagcgacgagaactaccacaacgagagagccagaaagagcagaaacagactgagcagcagcagccagcacagcagagaccactaccccctggtggaggaggactaccccgacagctaccaggacacctacaagccccacagaaacagaggcagccccggcggctacagccacgacagcagacacagactgtag

SEQ ID NO: 14836 - DNA, 1563 bp, Artificial Sequence
  derived and/or modified sequence
atgagcagcagcagctacgccaagaacggcaccgccgacggcccccacagccccaccagccaggtggccagaggcaccaccaccagaagaagcagactgaagagaagcgacggcagcaccaccagcaccagcttcatcctgagacagggcagcgccgacagctacaccagcagacccagcgacagcgacgtgagcctggaggaggacagagaggccatcagacaggagagagagcagcaggccgccatccagctggagagagccaagagcaagcccgtggccttcgccgtgaagaccaacgtgagctactgcggcgccctggacgaggacgtgcccgtgcccagcaccgccatcagcttcgacgccaaggacttcctgcacatcaaggagaagtacaacaacgactggtggatcggcagactggtgaaggagggctgcgagatcggcttcatccccagccccctgagactggagaacatcagaatccagcaggagcagaagagaggcagattccacggcggcaagagcagcggcaacagcagcagcagcctgggcgagatggtgagcggcaccttcagagccacccccaccagcaccgccaagcagaagcagaaggtgaccgagcacatccccccctacgacgtggtgcccagcatgagacccgtggtgctggtgggccccagcctgaagggctacgaggtgaccgacatgatgcagaaggccctgttcgacttcctgaagcacagattcgacggcagaatcagcatcaccagagtgaccgccgacatcagcctggccaagagaagcgtgctgaacaaccccagcaagagagccatcatcgagagaagcaacaccagaagcagcctggccgaggtgcagagcgagatcgagagaatcttcgagctggccagaagcctgcagctggtggtgctggacgccgacaccatcaaccaccccgcccagctgatcaagaccagcctggcccccatcatcgtgcacgtgaaggtgagcagccccaaggtgctgcagagactgatcaagagcagaggcaagagccagagcaagcacctgaacgtgcagctggtggccgccgacaagctggcccagtgcccccccgagatgttcgacgtgatcctggacgagaaccagctggaggacgcctgcgagcacctgggcgagtacctggaggcctactggagagccacccacaccaccagcagcacccccatgacccccctgctgggcagaaacctgggcagcaccgccctgagcccctaccccaccgccatcagcggcctgcagagccagagaatgagacacagcaaccacagcaccgagaacagccccatcgagagaagaagcctgatgaccagcgacgagaactaccacaacgagagagccagaaagagcagaaacagactgagcagcagcagccagcacagcagagaccactaccccctggtggaggaggactaccccgacagctaccaggacacctacaagccccacagaaacagaggcagccccggcggctacagccacgacagcagacacagactgtag

SEQ ID NO: 14837 - protein, 127 aa, Artificial Sequence
  derived and/or modified sequence
MGFRKFSPFLALSILVLYQAGSLQAAPFRSALESSPDPATLSKEDARLLLAALVQDYVQMKASELKQEQETQGSSSAAQKRACNTATCVTHRLAGLLSRSGGMVKSNFVPTNVGSKAFGRRRRDLQA

SEQ ID NO: 14838 - protein, 138 aa, Artificial Sequence
  derived and/or modified sequence
MKKEANLQRGGMGFRKFSPFLALSILVLYQAGSLQAAPFRSALESSPDPATLSKEDARLLLAALVQDYVQMKASELKQEQETQGSSSAAQKRACNTATCVTHRLAGLLSRSGGMVKSNFVPTNVGSKAFGRRRRDLQA

SEQ ID NO: 14839 - DNA, 384 bp, Artificial Sequence
  derived and/or modified sequence
atgggctttcgaaagttttcccccttcctggctctgagtatcctggttctctaccaggctgggagcctccaggcggctccctttagaagcgcgctggagagcagccctgatcctgcgacactgagtaaggaagatgcccggctcctgctggcagcccttgtccaggactacgtccagatgaaggccagtgagcttaagcaggagcaggaaacgcaggggtcctcatctgcagcccagaaacgtgcttgtaatacagcgacctgtgttacacacagactggctggactcctgtcacggtctggaggcatggtgaagagtaactttgtccccacaaatgtgggcagtaaggcattcggaaggaggaggagagacttgcaggcatag

SEQ ID NO: 14840 - DNA, 417 bp, Artificial Sequence
  derived and/or modified sequence
atgaaaaaagaagcaaatttgcagcgaggaggtatgggcttccgcaagttcagtccattcctggccctctccatcctcgtcttatatcaggcaggcagtctgcaggccgctccttttcggtcagccctggaatccagcccagatcccgctacactttccaaagaggatgctagattgctacttgcagctctggttcaggactatgtccagatgaaagcgtcagagctcaagcaagagcaagagacgcagggatcttctagtgctgctcaaaagagggcttgcaatacagcaacatgcgtcactcaccgactggccggcttactgagtcggagcggaggcatggtgaaatccaacttcgttcccacaaatgtcgggtcaaaggcctttggaagaaggagacgggatctgcaggcctag

SEQ ID NO: 14841 - DNA, 384 bp, Artificial Sequence
  derived and/or modified sequence
atgggattcagaaaattcagcccatttctggctttgtctatcctggtactgtatcaggcaggatcactgcaagccgcccctttcaggtccgcactggaatcttcccctgatcccgcaacactgtccaaagaggacgccaggctgttacttgccgcattggtgcaggactatgtccagatgaaggccagcgagctgaagcaagagcaggagactcagggctcttcctctgccgcccagaaaagggcttgtaacaccgccacgtgcgtgacccacaggctggccggactcctgtcgaggagcggagggatggtgaagagcaatttcgtgccaactaatgtcggctccaaagccttcggacggagaaggcgcgatttgcaggcatag

SEQ ID NO: 14842 - DNA, 384 bp, Artificial Sequence
  derived and/or modified sequence
atgggcttcaggaagttcagccccttcctggccctgagcatcctggtgctgtaccaggccggcagcctgcaggccgcccccttccgcagcgccctggagagcagcccagaccctgccaccctgagcaaggaggatgcccggctgctgctggccgccctggtgcaggactatgtgcagatgaaggccagcgagctgaagcaggagcaggagacccagggcagcagcagcgctgcccagaagagggcctgcaacacagccacctgtgtgacccaccggctggccggcctgctgagccgcagcggcggcatggtgaagagcaactttgtgcccaccaacgtgggcagcaaggccttcggcagaagaagaagagacctgcaggcctag

SEQ ID NO: 14843 - DNA, 417 bp, Artificial Sequence
  derived and/or modified sequence
atgaagaaggaggccaacctgcagaggggcggcatgggcttcaggaagttcagccccttcctggccctgagcatcctggtgctgtaccaggccggcagcctgcaggccgcccccttccgcagcgccctggagagcagcccagaccctgccaccctgagcaaagaagatgcccggctgctgctggccgccctggtgcaggactatgtgcagatgaaggccagcgagctgaagcaggagcaggagacccagggcagcagcagcgctgcccagaagagggcctgcaacacagccacctgtgtgacccaccggctggccggcctgctgagccgcagcggcggcatggtgaagagcaactttgtgcccaccaacgtgggcagcaaggcctttggaagaagaagaagagacctgcaggcctag

SEQ ID NO: 14844 - DNA, 384 bp, Artificial Sequence
  derived and/or modified sequence
atgggcttccggaagttcagccccttcctggccctgagcatcctggtgctatatcaggccggaagtttacaggccgctccttttcggagcgccctggagtcaagcccagatccagctaccttatctaaagaggacgcccgcctactactcgcagctttggtccaagattatgtgcaaatgaaagccagcgagctgaaacaagaacaggagacacaagggtcatcatcagctgcccaaaaacgggcctgtaatactgctacttgtgttactcatcggctggccggtctcctgagtcggagtgggggcatggtgaagtctaatttcgtccccactaatgtcggctcaaaggcgtttgggagacgcaggagagatctacaagcatag

SEQ ID NO: 14845 - DNA, 417 bp, Artificial Sequence
  derived and/or modified sequence
atgaagaaggaggccaacctgcagcggggcggcatgggcttccggaaattcagccctttcctggctctgtccatcctggtgctttatcaggccggatcattgcaggctgcgccatttagatctgcgttggagtcttcacccgatcctgccactctaagcaaggaagacgcacggttgttgctggctgccctggtgcaagactacgtgcagatgaaagccagcgagttaaaacaggagcaagaaacacagggttcctcatcggcagcccagaaacgcgcctgcaacaccgcaacgtgtgttacgcatcggttggccggattactttcgcgtagcggtggaatggtgaaatctaatttcgtgcctacaaatgtgggcagcaaagcgtttggcaggaggaggcgggacttgcaagcctag

SEQ ID NO: 14846 - DNA, 384 bp, Artificial Sequence
  derived and/or modified sequence
atgggcttccggaagttcagccccttcctggccctgagcatcctggttctctaccaggccggttccctccaggccgccccgtttaggagcgcattggagtccagtccggacccagcaacactctccaaagaagatgcgaggttgctgcttgcggccctcgtgcaggattacgtccagatgaaagcctccgagctgaaacaagagcaagaaacccagggcagctcatctgccgcccagaaacgagcatgtaacacagcaacctgtgttacccacagactggccgggcttctgtcccgctccgggggtatggtaaaatccaatttcgtcccaacaaacgttggtagcaaggcatttggccggcgccggagagatttacaggcctag

SEQ ID NO: 14847 - DNA, 384 bp, Artificial Sequence
  derived and/or modified sequence
atgggatttcgcaaattctcgcctttcctggccctcagtatcctagtgctctatcaggcgggttccctgcaggccgcaccatttcgctctgcgctggagagcagcccagatcctgctacactctcaaaagaggatgccagacttttattggctgcattagtgcaagattacgtgcagatgaaggcttctgaactgaagcaggagcaggaaacccagggaagttcaagcgccgctcagaagagggcatgtaacacagcaacgtgcgttacccatcggctggccggactgctctcacggagcggcggaatggtcaaaagtaattttgtgcctacaaatgtcggctctaaagcattcggccgacgccgtcgcgatctccaagcatag

SEQ ID NO: 14848 - DNA, 417 bp, Artificial Sequence
  derived and/or modified sequence
atgaaaaaagaagccaatcttcagaggggtggcatgggatttcggaagttttcccctttcttagctttaagcatcttagtcttgtaccaggccggaagcctccaggccgcaccattccggagcgctcttgaatcttcacctgaccctgccacactttcaaaggaggacgccagacttctgctggccgctctggtccaggactacgtccagatgaaggcctctgagctcaaacaagaacaggagacccagggatcaagtagtgcggcacaaaaacgagcatgcaatacagcgacatgcgtcacacatagactggctggtcttcttagtaggagtgggggtatggtcaagtctaattttgtgcctactaacgttggttcgaaggcctttggcagaaggcggagggatctgcaagcttag

SEQ ID NO: 14849 - DNA, 384 bp, Artificial Sequence
  derived and/or modified sequence
atgggattcagaaagttttctcccttcctcgcactctctattcttgtcctttaccaggccggatccctgcaggctgctcccttccggtctgccctcgagtctagtccagatccagcgaccttgagcaaagaagacgctagactgctcttggcggcattggtgcaggattatgttcagatgaaggctagcgaattgaagcaagagcaggagacgcagggatcgtcaagcgctgcccagaagcgcgcttgcaatacggcaacctgcgtgacacaccgattggcaggtctgctcagccgtagcggagggatggtcaaatcgaatttcgtacctaccaatgtggggtctaaagcgtttggcagaagaaggagggacctgcaggcgtag

SEQ ID NO: 14850 - DNA, 384 bp, Artificial Sequence
  derived and/or modified sequence
atgggctttcgtaaattttcaccttttttggccttaagcatcctagttctgtatcaggcgggctctctgcaagcagctcctttccggtctgctctggaatcttcccccgacccagcgacattatctaaagaagacgctaggcttctactggcggcactggtccaggattatgtgcaaatgaaagcttcagagttgaaacaggaacaggagacacaggggtctagtagcgctgcgcaaaagagagcctgtaatacagccacatgcgtgacccatcggctcgctggcctcctctcacgaagcggcggaatggtcaagtcaaattttgtgcccacaaacgtggggagcaaagccttcggaaggcgtcgccgtgacctgcaggcatag

SEQ ID NO: 14851 - DNA, 417 bp, Artificial Sequence
  derived and/or modified sequence
atgaaaaaagaagctaaccttcagagaggcgggatggggttccgtaaattttccccctttttagctctttctattctggtgctctatcaggcaggcagcctccaggccgcccctttcagatctgccttggagtcgtcgccagacccggccactttgagcaaagaagacgctcgattactgctcgcagctctcgtccaagactacgtacaaatgaaggcctcggaacttaagcaagagcaggagacccaggggtcaagttccgccgcacagaaacgtgcatgtaacaccgctacttgcgtcacacacagacttgccggactgctatcccggagtggcggtatggtaaagtcaaacttcgttccgacaaacgttggaagtaaagcattcggcagacgacggagagatttacaggcgtag

SEQ ID NO: 14852 - DNA, 384 bp, Artificial Sequence
  derived and/or modified sequence
atgggatttagaaaattctcgcccttcctagctctgtccatcctggtcttatatcaggccggctcactgcaggcagcgccgttccgttcagcactggaatcttctcccgaccccgccaccctaagcaaagaagatgcaagacttctgctggccgcccttgtacaggattacgtgcagatgaaagcgtccgagctgaaacaagaacaagagacccaaggctcaagctccgcggcacaaaagagggcgtgcaataccgctacctgtgtcacacatagacttgcaggtctactctctcggagcggtgggatggtgaaatcaaacttcgttccaacaaatgtgggcagtaaagctttcggccgccgccggagggatctccaggcttag

SEQ ID NO: 14853 - DNA, 384 bp, Artificial Sequence
  derived and/or modified sequence
atgggcttcaggaagttctcgccctttttggccttgtctatcctcgtactatatcaggccggtagtctccaggctgccccatttagatcagcccttgagagcagcccagatcccgctacactctctaaggaggatgcccgtttgttactggcagctcttgtccaggattatgtccaaatgaaagcttcggaactgaaacaagagcaagagacacaggggagctcttctgccgcccagaagcgagcatgcaataccgccacgtgcgtcactcataggttggccggcctcctctcccgttctggtgggatggtaaagagtaatttcgtgccaactaacgtgggttcgaaggcgttcgggcggcggagaagggatttgcaggcatag

SEQ ID NO: 14854 - DNA, 417 bp, Artificial Sequence
  derived and/or modified sequence
atgaagaaggaggccaacctgcagagaggaggcatgggctttcggaagttctctccattcctggcgttaagcatactagttttgtatcaggctggctcactccaggccgcaccattccggtccgccctcgagagttcacctgatccagccactttatccaaagaagacgcacgtctactgctcgccgctctggtgcaggattatgtgcagatgaaagcaagcgaacttaaacaggagcaggaaacacaaggttcaagttcagcagcccagaaacgtgcatgtaacacagccacatgcgtgacccacagacttgctggattgctgtctcgaagcggagggatggtcaaatccaatttcgtgcctacaaatgttgggagtaaggcttttggacgacggcggagagaccttcaagcatag

SEQ ID NO: 14855 - DNA, 384 bp, Artificial Sequence
  derived and/or modified sequence
atgggatttagaaaattctcgcccttcctagctctgtccatcctggtcttatatcaggccggctcactgcaggcagcgccgttccgttcagcactggaatcttctcccgaccccgccaccctaagcaaagaagatgcaagacttctgctggccgcccttgtacaggattacgtgcagatgaaagcgtccgagctgaaacaagaacaagagacccaaggctcaagctccgcggcacaaaagagggcgtgcaataccgctacctgtgtcacacatagacttgcaggtctactctctcggagcggaggcatggtcaaatctaacttcgttcctaccaacgttggcagcaaggcctttggacgccgcagacgggatctacaagcttag

SEQ ID NO: 14856 - DNA, 1070 bp, Artificial Sequence
  derived and/or modified sequence
gtaataagagcggggtctccgcggggaaggcgcccacagcaggtgtggtgttcatcccgggtcgaccggccgctcgcgctgccctgaaactctagtcgccagagaggcggcatgggtttccggaagttctcccccttcctggctctcagtatcttggtcctgtaccaggcgggcagcctccaggcggcgccattcaggtctgccctggagagcagcccagacccggccacactcagtaaagaggacgcgcgcctcctgctggctgcactggtgcaggactatgtgcagatgaaggccagtgagctgaagcaggagcaggagacacagggctccagctccgctgcccagaagagagcctgcaacactgccacctgtgtgactcatcggctggcaggcttgctgagcagatcagggggcatggtgaagagcaacttcgtgcccaccaatgtgggttccaaagcctttggcaggcgccgcagggaccttcaagcctgagcagatgaatgactccaggaagaaggttatcatgaaactgaactcaccatttctattaatttctgttggtaagaacttggtgagaatgccccgtggaagatacacatgtttgcatcctaagatactgaaaaaagggcacctttgtcacttgaaaggaatgaaactgaatgcaaaataagctaattccatatttgctgtgcatcatttttatatttaattctatgtccagtaaaagtgatggcatctctcattgacttatctggtagcaaactggttctttcggagccatcctgttgatcatgcagctccaccaaaccttagggggacgtgaaatcactgcctgttgtggtctccgaggacacatggtaatggtgatgctgtgccttgttatctaagaacatgattgtataatttgtttaagaaaatgtcaatattgtgccatttgtgaacttcatcaagattaaaagcatattttgggtacatttgtttcaaaaccttggtgatgcattacaacttgttttcttatgtaataataatgatgatgatgatgataataataaatatttttgagtgct

SEQ ID NO: 14857 - DNA, 2258 bp, Artificial Sequence
  derived and/or modified sequence
gtcggccgcgaaggcgtggcggcccgcggaccggcggaccccgggtcataccagctgtccgggtgcacaggcccaggggccccacgaccgcgggtgtcgggaccgtgggctccactgaggagcccaccgaatccttcggcctggccaggcggggggtcttcttcccagtccgcggaagccaggtccgggagacggcggggctcactgtgccttcggacctacactctgctcgggggccggatttctgcaaagcgtccacttggaaagaagtttcacttgcagggaaggcgggtgtacgcaatgatggtccgtgtgtccgggatgtgaatgccaaccaagactgcgtccgttggtggagtgtgcgcgggtcctccgtgagggtgcttctggcagtcacagttcacgagttagcgagaagatggctgggaggcggcgagcccccgctcccggggcgcgcatttcgaactccataggtctcccgtggagagcagcccagacccggccacactcagtgaggaggaagtgcgcctcctgctggctgcactggtgcaggactatgtgcagatgaaggccagtgagctggagcaggagcaggagacagagctccagatttaatttatgtccttttcttctatcttctttggatggaggctgagtttcagttcttgccggagagtttccagatttctcctcctgatggcctgttctgtggattttggatttgccaaggcagccctcacaatccgagtcctggggctgtctaaggaactatggtgagatagagtgttatgggttgaattttgtccccctcaaaaaggtaccattgtcttctaaaagaacaactgaggagttcaacatgaaggaggaaggatatgtcattctttgcagtgacacaatcagaaaaggtactgctcccccacctaaatatgagggataagtgattttcagaagagacaggagaagaagggacaaatgtcctggtccttgtctccttgtcaacaaaagatgtactggtaccctttgaaaggggacagagaggatgccagctgaactgggagcactaagttctctgctttgtgaaaatgaatctgcaatgaactcctggtctttgtctggatgcccatctttctgcaagttgtcagcagaagcttttcaatgtggctacttggtgagttcacatacagcccaacccatagttctgatggagcctgaaaatcagccctgaaaagttctcctcagaggatgcctctgaagtgagaggcatgaaaaaagaggctaaccttcagagaggcggcatgggtttccggaagttctcccccttcctggctctcagtatcttggtcctgtaccaggcgggcagcctccaggcggcgccattcaggtctgccctggagagcagcccagacccggccacactcagtaaagaggacgcgcgcctcctgctggctgcactggtgcaggactatgtgcagatgaaggccagtgagctgaagcaggagcaggagacacagggctccagctccgctgcccagaagagagcctgcaacactgccacctgtgtgactcatcggctggcaggcttgctgagcagatcagggggcatggtgaagagcaacttcgtgcccaccaatgtgggttccaaagcctttggcaggcgccgcagggaccttcaagcctgagcagatgaatgactccaggaagaaggttatcatgaaactgaactcaccatttctattaatttctgttggtaagaacttggtgagaatgccccgtggaagatacacatgtttgcatcctaagatactgaaaaaagggcacctttgtcacttgaaaggaatgaaactgaatgcaaaataagctaattccatatttgctgtgcatcatttttatatttaattctatgtccagtaaaagtgatggcatctctcattgacttatctggtagcaaactggttctttcggagccatcctgttgatcatgcagctccaccaaaccttagggggacgtgaaatcactgcctgttgtggtctccgaggacacatggtaatggtgatgctgtgccttgttatctaagaacatgattgtataatttgtttaagaaaatgtcaatattgtgccatttgtgaacttcatcaagattaaaagcatattttgggtacatttgtttcaaaaccttggtgatgcattacaacttgttttcttatgtaataataatgatgatgatgatgataataataaatatttttgagtgcttact

SEQ ID NO: 14858 - DNA, 2097 bp, Artificial Sequence
  derived and/or modified sequence
gtaataagagcggggtctccgcggggaaggcgcccacagcaggtgtggtgttcatcccgggtcgaccggccgctcgcgctgccctgaaactctagtcgccagagaggcggcatgggtttccggaagttctcccccttcctggctctcagtatcttggtcctgtaccaggcgggcagcctccaggcggcgccattcaggtctgccctggagagcagcccagacccggccacactcagtaaagaggacgcgcgcctcctgctggctgcactggtgcaggactatgtgcagatgaaggccagtgagctgaagcaggagcaggagacacagggctccagctccgctgcccagaagagagcctgcaacactgccacctgtgtgactcatcggctggcaggcttgctgagcagatcagggggcatggtgaagagcaacttcgtgcccaccaatgtgggttccaaagcctttggcaggcgccgcagggaccttcaagcctgagcagatgaatgactccaggaagaaggtgtgtcctaaatccaatgacatatccttataagagattcactcagaagacacatgtggagaaggtgacatgacagaggcaaggaggcacaagccaaggaagtctgtgtctaccagaagccagaatcacagaacagtctctggaagaagagcagccctgctgacacctagagtttggacttccagcttccagaactgtgagagaataatttctgttgttttaagccacaaagtttgtggtaatttgttatgacagccctaggaaactaatacaatacattttcatttattttgggtaaatgccttggagtgggattgctgggttatttggaaagtgtgtatttaactctgtaagaaactgccaaactattttctgaagtgactgtaccacttcgccttcttgccagccacatatgagagctctagtatttccacaaataggtatgtagcagtatctcattgctgttttaatttgtatttccccaatgactaatgacgttgagcatctattttaccatatgtttatcacctttattgaagggtctgtttaaatcttctgctaaatttttgttggcttgcttgctttattagtgttgagtttttagagctctttatatgttgtggatgcaagattgttttcagatatatagtttggaaacttccttcccctgaatctgcggattgctttttcattttcttagcagtgtctctcacagagaaaaagttgtaatttgaataagatccaattcatctttttttttcttttatgtattgtgcttttagttcatgtctaagaactctttgcctaactaaggtcccaaggtcacaataaccttattctatactttcttgtaaaagttttatagttttatattttatatgtagattagtgatctattttgagttaatttttgtataaggtgagaggtgtaggttgaaattcatacctgtgaatatagatacccaattgtttcagtgccatttgttaaaaagactgttatttcaccatttaattgcccctgcacctttgtcaaaaagcaactgatcatatttgtgtgggtatatttctgggttctcaattctgtctcattgattgatttgaccattcttttgccaatgtcatactgccttgattagtgtagtgttaaagtgaatctcaaaaccaggtaatgtgggtctaccaacattgttcattcttgttcaaaaagattttagctacatctaaaatattttctacatcttttatacattttagaatcagtgtgttactatctacaaaatttctgatgagatttttaatgggattgtgttaaatcagtgggttaattttgggagaattagcatattaataatattaagtcgttcaattcatgaacacaatacatgttttcacttatttaggttttctctgtttttttttttttaacagtgttctcagttttcaacagaaatattctacacatatcttgttagatttttaactattttattttttggtgctaatgtaaatggtacttaaacatttttgtttttaattgttcattgctagtagatagaaatacaatatttaaaatatta

SEQ ID NO: 14859 - DNA, 384 bp, Artificial Sequence
  derived and/or modified sequence
atgggcttcagaaagttcagccccttcctggccctgagcatcctggtgctgtaccaggccggcagcctgcaggccgcccccttcagaagcgccctggagagcagccccgaccccgccaccctgagcaaggaggacgccagactgctgctggccgccctggtgcaggactacgtgcagatgaaggccagcgagctgaagcaggagcaggagacccagggcagcagcagcgccgcccagaagagagcctgcaacaccgccacctgcgtgacccacagactggccggcctgctgagcagaagcggcggcatggtgaagagcaacttcgtgcccaccaacgtgggcagcaaggccttcggcagaagaagaagagacctgcaggcctag

SEQ ID NO: 14860 - DNA, 417 bp, Artificial Sequence
  derived and/or modified sequence
atgaagaaggaggccaacctgcagagaggcggcatgggcttcagaaagttcagccccttcctggccctgagcatcctggtgctgtaccaggccggcagcctgcaggccgcccccttcagaagcgccctggagagcagccccgaccccgccaccctgagcaaggaggacgccagactgctgctggccgccctggtgcaggactacgtgcagatgaaggccagcgagctgaagcaggagcaggagacccagggcagcagcagcgccgcccagaagagagcctgcaacaccgccacctgcgtgacccacagactggccggcctgctgagcagaagcggcggcatggtgaagagcaacttcgtgcccaccaacgtgggcagcaaggccttcggcagaagaagaagagacctgcaggcctag

SEQ ID NO: 14861 - protein, 115 aa, Artificial Sequence
  derived and/or modified sequence
MNSGVCLCVLMAVLAAGALTQPVPPADPAGSGLQRAEEAPRRQLRVSQRTDGESRAHLGALLARYIQQARKAPSGRMSIVKNLQNLDPSHRISDRDYMGWMDFGRRSAEEYEYPS

SEQ ID NO: 14862 - DNA, 348 bp, Artificial Sequence
  derived and/or modified sequence
atgaattcaggtgtgtgcttatgcgtattgatggccgtactggcagccggggcactaacccagccagtgcctcctgccgatccggccggaagcgggctgcagagagccgaagaagcaccacgccggcagctccgcgtgagccagagaacggacggtgaaagccgcgctcatttaggagccttacttgcacggtacatccagcaggctaggaaagctcccagcggaagaatgagtatcgtgaaaaatctccagaatctagacccttcacaccgaatttccgatagggattatatgggttggatggacttcggccggagatcagctgaggaatatgagtacccatcatag

SEQ ID NO: 14863 - DNA, 348 bp, Artificial Sequence
  derived and/or modified sequence
atgaacagcggcgtgtgtttatgtgtgcttatggccgtcctagccgccggggccctcacccaaccagtccctccagcagatcctgccggcagtggccttcagagggcagaggaagcaccacggcggcagctgagagtgtcccagaggacagatggagaaagcagagctcatcttggcgccctactggcccgttatatccagcaagcccgtaaagctccaagtggtcgtatgagtattgtgaagaatcttcaaaaccttgatccatcccatagaatctccgacagagactacatgggttggatggatttcgggcggcgaagcgcagaggagtacgagtatccctcatag

SEQ ID NO: 14864 - DNA, 348 bp, Artificial Sequence
  derived and/or modified sequence
atgaattcaggcgtctgcctgtgtgtgttgatggcagttctggcagccggagctctcacccagccagtgccccccgctgatccagccggaagtggtttacaaagggcagaagaggcaccacgtcgacagttacgggtctcccagaggacggacggcgagtcccgagcacacctcggagccttgctggccaggtacatccaacaagcccgtaaggctccatccggacgtatgtcaattgttaagaacctgcaaaacctggatccttcacatcgaatttccgacagggattacatggggtggatggacttcggccggcgttcggccgaggagtatgaatacccatcatag

SEQ ID NO: 14865 - DNA, 348 bp, Artificial Sequence
  derived and/or modified sequence
atgaacagcggcgtgtgcctgtgtgtgctgatggctgtgctggccgccggggccctgacccagcctgtgcccccagctgaccctgctggcagcggcctgcagagagctgaggaggccccccggcggcagctgcgggtgtcccagaggacagatggagagagccgggcccacctgggcgccctgctggcccgctacatccagcaggccaggaaggcccccagcggccgcatgagcatcgtgaagaacctgcagaacctggaccccagccaccgcatcagtgaccgggactacatgggctggatggactttggaagaagatctgctgaggagtatgagtaccccagctag

SEQ ID NO: 14866 - DNA, 348 bp, Artificial Sequence
  derived and/or modified sequence
atgaacagcggcgtgtgcctgtgcgtgctgatggccgtgctggccgcaggggcactcacgcagcccgtgcctccagccgacccggccggcagtgggcttcagagagcagaagaggctcccaggagacagctcagggtctctcagagaacggatggcgagagccgggcacatctgggggccctccttgcacgttatatccagcaggctaggaaggctccaagcggccggatgtcaatcgtgaaaaatttgcaaaacttggacccctcccatcgtatttccgatcgtgactatatgggctggatggacttcggcagaaggtcagccgaagagtatgaataccccagctag

SEQ ID NO: 14867 - DNA, 348 bp, Artificial Sequence
  derived and/or modified sequence
atgaacagcggcgtgtgcctgtgcgtgctgatggccgtgctggccgctggcgcactgacacagcctgtgcccccagccgatccggctggttcaggtttgcaacgggccgaagaggctccgaggaggcaattgagagtaagccaacggacagacggagaatccagggcgcacctaggcgccctgctcgccagatatatacagcaggcgcggaaggcaccaagcggcagaatgagcatcgtgaagaacctgcagaatcttgaccctagccacagaataagcgatcgtgattatatgggatggatggattttggccggaggagcgccgaagagtatgagtatcctagttag

SEQ ID NO: 14868 - DNA, 348 bp, Artificial Sequence
  derived and/or modified sequence
atgaacagcggcgtgtgcctgtgcgtgctgatggccgtgctggccgccggcgccctcacccagccggttcctccagcagatcccgcaggatccggactgcagcgcgcagaagaggctcctagacggcagctgagggtatctcagcgtacagatggtgaaagtcgtgcccatttgggagctctcttggccagatacatccagcaggccagaaaggcaccctctggcaggatgagcattgtcaagaacctgcagaaccttgatcctagtcacaggatctcggacagggattacatgggttggatggactttggccgacgtagtgcggaagagtacgaatacccgagctag

SEQ ID NO: 14869 - DNA, 348 bp, Artificial Sequence
  derived and/or modified sequence
atgaattccggcgtttgtctgtgtgtactgatggcagttctggcagccggagctctaacgcagccagtccctcccgctgacccagcagggagcgggttgcaacgggctgaagaggccccacggagacagttgagagtatcccagcggactgatggcgagagtcgagcccaccttggcgcattactggccaggtacatccaacaggctcgaaaggctccatctggtcgtatgagtatcgtcaaaaacctccagaatttagatccttcccatcgcatcagtgaccgggactacatgggctggatggacttcggtagacgcagcgcagaagagtacgagtacccgtcttag

SEQ ID NO: 14870 - DNA, 348 bp, Artificial Sequence
  derived and/or modified sequence
atgaattccggcgtgtgtttgtgtgtcctgatggccgtgctggccgctggcgcattaacccagcctgtacccccagctgaccctgcgggaagtggactccaacgagccgaagaggcccctaggcgccagctgagggtgagtcagaggacggacggagagtctcgcgctcacctgggagctttgctcgcgagatatatccaacaggcccgtaaagccccaagtggtcgaatgtccattgtcaaaaatttgcagaacctggatccctcacacagaatttccgatagggattacatggggtggatggatttcggtagacgcagcgccgaggagtacgaatacccgagttag

SEQ ID NO: 14871 - DNA, 348 bp, Artificial Sequence
  derived and/or modified sequence
atgaacagtggcgtgtgtctgtgcgtgttaatggcagtcttagctgccggtgccctgactcaacccgtgcctcctgcagaccccgcaggatcagggctgcaaagggctgaggaggcccctagaaggcaactgcgcgttagccagcggacagacggagagtctcgcgctcatctcggcgcactgttggctagatatatccagcaagcacgtaaagctcctagcggtaggatgtccattgtcaagaatcttcagaacttggacccttctcataggatcagcgaccgagactatatgggatggatggatttcggcagaagatctgcagaggaatatgagtatccatcatag

SEQ ID NO: 14872 - DNA, 830 bp, Artificial Sequence
  derived and/or modified sequence
cacttcaaccggttgtcgccccagtggccgccctctgagcacgtgttactgccagtctgcgtcagcgttgggtaaatacatgactggccgacgccgccgggtggggctatttaagagacagccgcccgctggtcctccctgaacttggctcagctgccgggctgctccggttggaaacgccaagccagctgcgtcctaatccaaaagccatgaacagcggcgtgtgcctgtgcgtgctgatggcggtactggcggctggcgccctgacgcagccggtgcctcccgcagatcccgcgggctccgggctgcagcgggcagaggaggcgccccgtaggcagctgagggtatcgcagagaacggatggcgagtcccgagcgcacctgggcgccctgctggcaagatacatccagcaggcccggaaagctccttctggacgaatgtccatcgttaagaacctgcagaacctggaccccagccacaggataagtgaccgggactacatgggctggatggattttggccgtcgcagtgccgaggagtatgagtacccctcctagaggacccagccgccatcagcccaacgggaagcaacctcccaacccagaggaggcagaataagaaaacaatcacactcataactcattgtctgtggagtttgacattgtatgtatctatttattaagttctcaatgtgaaaaatgtgtctgtaagattgtccagtgcaaccacacacctcaccagaattgtgcaaatggaagacaaaatgttttcttcatctgtgactcctggtctgaaaatgttgttatgctattaaagtgatttcattctgc

SEQ ID NO: 14873 - DNA, 1527 bp, Artificial Sequence
  derived and/or modified sequence
ctggcgttgccacagtccctccattccagagggaattccagagcggaatacggattccgattttaaaataagcgcttctaaatctttctccttgcatctaagacgggtgggggaaagaaagggagaggagttgaggtcccaaggttcaaggcctggtgatctccaggtcccaggctgggcggcctcggtgcacggagagggcgaggggcgtgttgtggagccttggcaaggcgctgctcttcctcgcgcctcggtttgcggtctgtgaaatggggttggcagtgcctttgcagggacgcggcgaactcaagcaccagcaagcggactcgaactcaaagggtttcagggtgtagacgaccagagcgcactgaggggctccaggtcggcccgctccggagccgggagagtaaccgcgtgcagggaaaggcgcacggcagcctcggtgcctcccttccctccaccggacgggtgactgactaggggtgaggtcctcacctccaggctgcgcagctgagttctggaagctgcgtcaagagaggcccaggacaccaagagccagctgtggccagagccctttcactgacccagaacactggccctcggaaacctggagaactgcgagggcttttaatgcggctgagaagaaagtgaagaccccgactcctcctctctccttcgaaagagccgacacaggagccacttcaaccggttgtcgccccagtggccgccctctgagcacgtgttactgccagtctgcgtcagcgttgggtaaatacatgactggccgacgccgccgggtggggctatttaagagacagccgcccgctggtcctccctgaacttggctcagctgccgggctgctccggttggaaacgccaagccagctgcgtcctaatccaaaagccatgaacagcggcgtgtgcctgtgcgtgctgatggcggtactggcggctggcgccctgacgcagccggtgcctcccgcagatcccgcgggctccgggctgcagcgggcagaggaggcgccccgtaggcagctgagggtatcgcagagaacggatggcgagtcccgagcgcacctgggcgccctgctggcaagatacatccagcaggcccggaaagctccttctggacgaatgtccatcgttaagaacctgcagaacctggaccccagccacaggataagtgaccgggactacatgggctggatggattttggccgtcgcagtgccgaggagtatgagtacccctcctagaggacccagccgccatcagcccaacgggaagcaacctcccaacccagaggaggcagaataagaaaacaatcacactcataactcattgtctgtggagtttgacattgtatgtatctatttattaagttctcaatgtgaaaaatgtgtctgtaagattgtccagtgcaaccacacacctcaccagaattgtgcaaatggaagacaaaatgttttcttcatctgtgactcctggtctgaaaatgttgttatgctattaaagtgatttcattctgc

SEQ ID NO: 14874 - DNA, 747 bp, Artificial Sequence
  derived and/or modified sequence
gagaggcactctgcaaacacttcctcaaactttaggaaagcaaaaacattccttctgctcaacacggcagaaaacagggtctctgccccttggcgctgggtgaggagttcccaaagaccagccagccatgaacagcggcgtgtgcctgtgcgtgctgatggcggtactggcggctggcgccctgacgcagccggtgcctcccgcagatcccgcgggctccgggctgcagcgggcagaggaggcgccccgtaggcagctgagggtatcgcagagaacggatggcgagtcccgagcgcacctgggcgccctgctggcaagatacatccagcaggcccggaaagctccttctggacgaatgtccatcgttaagaacctgcagaacctggaccccagccacaggataagtgaccgggactacatgggctggatggattttggccgtcgcagtgccgaggagtatgagtacccctcctagaggacccagccgccatcagcccaacgggaagcaacctcccaacccagaggaggcagaataagaaaacaatcacactcataactcattgtctgtggagtttgacattgtatgtatctatttattaagttctcaatgtgaaaaatgtgtctgtaagattgtccagtgcaaccacacacctcaccagaattgtgcaaatggaagacaaaatgttttcttcatctgtgactcctggtctgaaaatgttgttatgctattaaagtgatttcattctg

SEQ ID NO: 14875 - DNA, 348 bp, Artificial Sequence
  derived and/or modified sequence
atgaacagcggcgtgtgcctgtgcgtgctgatggccgtgctggccgccggcgccctgacccagcccgtgccccccgccgaccccgccggcagcggcctgcagagagccgaggaggcccccagaagacagctgagagtgagccagagaaccgacggcgagagcagagcccacctgggcgccctgctggccagatacatccagcaggccagaaaggcccccagcggcagaatgagcatcgtgaagaacctgcagaacctggaccccagccacagaatcagcgacagagactacatgggctggatggacttcggcagaagaagcgccgaggagtacgagtaccccagctag

SEQ ID NO: 14876 - protein, 428 aa, Artificial Sequence
  derived and/or modified sequence
MDVVDSLLVNGSNITPPCELGLENETLFCLDQPRPSKEWQPAVQILLYSLIFLLSVLGNTLVITVLIRNKRMRTVTNIFLLSLAVSDLMLCLFCMPFNLIPNLLKDFIFGSAVCKTTTYFMGTSVSVSTFNLVAISLERYGAICKPLQSRVWQTKSHALKVIAATWCLSFTIMTPYPIYSNLVPFTKNNNQTANMCRFLLPNDVMQQSWHTFLLLILFLIPGIVMMVAYGLISLELYQGIKFEASQKKSAKERKPSTTSSGKYEDSDGCYLQKTRPPRKLELRQLSTGSSSRANRIRSNSSAANLMAKKRVIRMLIVIVVLFFLCWMPIFSANAWRAYDTASAERRLSGTPISFILLLSYTSSCVNPIIYCFMNKRFRLGFMATFPCCPNPGPPGARGEVGEEEEGGTTGASLSRFSYSHMSASVPPQ

SEQ ID NO: 14877 - DNA, 1287 bp, Artificial Sequence
  derived and/or modified sequence
atggacgttgtggactcattactggtcaacggaagcaacattaccccgccatgcgaactcgggttagaaaatgaaacgctcttttgtctggatcagcctcggccttccaaagagtggcagcctgccgtgcagatcctgttgtattccctgatctttttgttgagcgtcttaggtaataccctggtgattaccgttctgatacggaacaaaaggatgagaacagtcacgaacatcttcctcttgtccctcgcagtcagcgatctgatgctttgtctattctgtatgccattcaacctcatccctaatctactgaaagactttatttttgggtctgccgtgtgcaagaccacaacctacttcatgggtacctcggttagtgtgagcacctttaaccttgtggccatctcactcgaacggtatggtgcaatatgtaaacccttgcaaagccgcgtctggcagaccaaatctcacgccctgaaggtcattgccgctacctggtgtctgagttttaccatcatgacaccataccccatctactccaaccttgtgccattcacaaagaacaacaaccagactgccaacatgtgccgcttcctcctccccaatgacgtaatgcagcaaagttggcacactttccttctgctcatcttgtttctgatccctggtattgttatgatggtcgcctatggccttatcagtctggaactgtaccagggcatcaaattcgaagcctcccagaagaagagcgctaaggagaggaagccgagcaccacaagctccgggaaatacgaagatagcgatgggtgttatcttcaaaagacccgcccacctcgaaaacttgaattacgccagctgtctacggggtccagtagccgagctaacagaattaggtcaaattcttccgcagccaatctgatggccaaaaaaagagtaattcgaatgttaatcgtcattgtggtacttttttttctgtgctggatgcccatcttctccgccaatgcctggcgagcatatgatactgcatccgcagaacggcgtctgtccggcacaccgatcagcttcattctactgctttcatatacttcatcttgcgttaaccctataatctactgttttatgaataaacggttccggctcggttttatggccactttcccgtgctgtcccaatccaggaccccccggcgcaaggggtgaggttggtgaggaggaggaggggggtacaactggagctagtttgtctagattctcctactctcatatgtccgcatccgtcccaccccagtag

SEQ ID NO: 14878 - DNA, 1287 bp, Artificial Sequence
  derived and/or modified sequence
atggatgtggtggacagcctgctggtgaatggcagcaacatcaccccaccctgtgagctgggcctggagaatgagaccctcttctgcctggaccagccccggcccagcaaggagtggcagcctgctgtgcagatcctgctgtacagcctcatcttcctgctgtctgtgctgggcaacaccctggtgatcaccgtgctgatccggaacaagaggatgaggacagtgaccaacatcttcctgctgagcctggccgtgtctgacctgatgctgtgcctcttctgcatgcccttcaacctgatccccaacctgctgaaggacttcatctttggatctgctgtgtgcaagaccaccacctacttcatgggcacctctgtgtctgtgtccaccttcaacctggtggccatcagcctggagcgctacggggccatctgcaagcccctgcagagccgggtgtggcagaccaagagccacgccctgaaggtgattgctgccacctggtgcctgtccttcaccatcatgaccccctaccccatctacagcaacctggtgcccttcaccaagaacaacaaccagacagccaacatgtgccgcttcctgctgcccaatgatgtgatgcagcagagctggcacaccttcctgctgctgatcctcttcctgatccctggcatcgtgatgatggtggcctacggcctcatcagcctggagctgtaccagggcatcaagtttgaggccagccagaagaagagcgccaaggagaggaagcccagcaccaccagcagcggcaagtatgaggacagtgatggctgctacctgcagaagacccggccccccaggaagctggagctgcggcagctgagcacaggcagcagcagccgggccaaccgcatccgcagcaacagcagcgctgccaacctgatggccaagaagagggtcatccgcatgctgattgtcatcgtggtgctcttcttcctgtgctggatgcccatcttcagcgccaatgcctggagggcctatgacacagccagcgctgagcggcggctgagcggcacccccatctccttcatcctgctgctgagctacaccagcagctgtgtgaaccccatcatctactgcttcatgaacaagcgcttccggctgggcttcatggccaccttcccctgctgccccaaccctggccccccaggggcccggggggaggtgggggaggaggaggagggcggcaccactggagccagcctgagccgcttctcctacagccacatgtctgcctctgtgcccccccagtag

SEQ ID NO: 14879 - DNA, 1287 bp, Artificial Sequence
  derived and/or modified sequence
atggacgtggtggacagcctgctggtgaacggcagcaacatcaccccaccatgtgagctgggcctggaaaatgagacattgttctgcctagatcagcctcgcccctccaaagaatggcagcccgctgtccagatcttactgtattccctgattttcctcctgtctgtgctgggcaacaccctcgtgatcacagtgctgattcgcaataaaaggatgcgaactgtgactaatatcttcctgctctctctggccgtgtccgatttaatgctttgcttgttttgcatgcctttcaaccttattcctaacttgttgaaagacttcatctttggctccgccgtgtgcaagaccactacatacttcatgggcacgagtgtgtcagtgagtaccttcaacctagtagcaatctcattggagcggtacggagctatttgcaaacctcttcagtcgcgcgtgtggcagacaaagagccacgctctgaaggtgattgccgccacttggtgcctgagtttcacgattatgacgccttatcccatctatagtaatctagtcccattcacaaagaacaacaatcagacagctaacatgtgtcgatttcttctccccaatgatgtgatgcagcaatcatggcacacatttcttctgttgatcctgttcctgattccaggtatagtgatgatggtcgcctatggcctgatttcgttagagttgtaccaaggcataaaatttgaagcctcacaaaagaagagcgcaaaggaaaggaagccctcgacaacaagcagtggcaagtatgaggactcagatggctgctacctccaaaaaacccggccccccaggaagctggaactgagacagctgtccacaggaagcagctcccgcgccaacaggatcaggtccaattcttctgccgctaatcttatggctaagaagagagttataaggatgttgattgtgattgtggtcctcttcttcctgtgctggatgcctatcttcagtgcaaatgcgtggagagcatacgataccgcatcagccgaaaggcgcttgtcggggactccaatcagctttatcctgttgctgtcttacacttcctcctgcgtgaatcctattatttattgcttcatgaacaagcgcttccggctgggcttcatggcaacatttccatgctgtcctaatccagggcctccaggcgccagaggtgaggtcggggaggaggaagaaggtgggaccacaggcgcctctctgtcaagattcagttactcccacatgtcagcgtccgtgccacctcaatag

SEQ ID NO: 14880 - DNA, 1287 bp, Artificial Sequence
  derived and/or modified sequence
atggacgtggtcgactcccttctcgttaacggcagcaacatcacccccccatgtgagctcgggcttgaaaatgaaaccctattctgcctggatcagcccaggcctagcaaggaatggcaaccagccgtgcagatactgctttattcactgatctttcttcttagtgtcctgggtaacaccttggtgatcacagtgctgatccgaaacaaaaggatgcggaccgtgactaacattttcctgctttctctcgcagtgtccgatctaatgttatgtctgttttgtatgccattcaaccttataccgaatctgctcaaggatttcattttcgggtccgccgtctgtaaaacaacaacatactttatgggcacatcagtaagcgtaagcacctttaacctggtggccatttctctggagcgctacggagccatttgtaaaccgcttcagagccgtgtgtggcaaaccaagtcacacgctttgaaggtgatcgcagccacctggtgcctgtcgttcactatcatgacgccttaccccatctatagtaatctcgttccatttaccaagaataacaaccagactgccaatatgtgtagattcttgctgccgaatgacgtgatgcagcagagttggcatactttcctattactcatcctttttctgatccctggtatcgtgatgatggtggcctatggactgatctccctggaactttatcaaggcatcaagttcgaagcttctcagaagaagagtgccaaggagagaaaaccatccacgaccagtagtggtaagtacgaggatagcgatggatgctatctccaaaagacaagaccccctaggaagttggagttacgccagctgtccactggtagctctagccgtgcaaataggatccgcagtaacagctctgctgccaacttaatggctaagaaacgtgtcatcaggatgttgatcgtgatcgttgtcctgttcttcctgtgttggatgccaatcttctcggccaacgcttggagggcgtacgatacagcctcagcggaaagacgactgtccggtacaccaatcagtttcattctattgctatcttatacatcttcatgtgtaaaccctataatatattgtttcatgaataagagatttaggctcggattcatggccacttttccttgctgtccgaatcccggtccaccaggcgctcgtggggaagtaggcgaggaagaagagggtgggactaccggcgctagcttgagtaggttctcttacagtcatatgtccgcatccgtcccacctcaatag

SEQ ID NO: 14881 - DNA, 1720 bp, Artificial Sequence
  derived and/or modified sequence
tacaaatgctggagtgagtgaggtgaactcaagtcgcctttaggaatggctgaaaaagcccacacctggaaatcactccctccctgctcctccacggcaggttgcatctgcgagacgcttcggtcattagaggaatgagccgggagtgagcaattcaccagctctccagcacttggtggaaagcagcaggcaaggatggatgtggttgacagccttcttgtgaatggaagcaacatcactcctccctgtgaactcgggctcgaaaatgagacgcttttctgcttggatcagccccgtccttccaaagagtggcagccagcggtgcagattctcttgtactccttgatattcctgctcagcgtgctgggaaacacgctggtcatcaccgtgctgattcggaacaagcggatgcggacggtcaccaacatcttcctcctctccctggctgtcagcgacctcatgctctgtctcttctgcatgccgttcaacctcatccccaatctgctcaaggatttcatcttcgggagcgccgtttgcaagaccaccacctacttcatgggcacctctgtgagtgtatctacctttaatctggtagccatatctctagagagatatggtgcgatttgcaaacccttacagtcccgggtctggcagacaaaatcccatgctttgaaggtgattgctgctacctggtgcctttcctttaccatcatgactccgtaccccatttatagcaacttggtgccttttaccaaaaataacaaccagaccgcgaatatgtgccgctttctactgccaaatgatgttatgcagcagtcctggcacacattcctgttactcatcctctttcttattcctggaattgtgatgatggtggcatatggattaatctctttggaactctaccagggaataaaatttgaggctagccagaagaagtctgctaaagaaaggaaacctagcaccaccagcagcggcaaatatgaggacagcgatgggtgttacctgcaaaagaccaggcccccgaggaagctggagctccggcagctgtccaccggcagcagcagcagggccaaccgcatccggagtaacagctccgcagccaacctgatggccaagaaaagggtgatccgcatgctcatcgtcatcgtggtcctcttcttcctgtgctggatgcccatcttcagcgccaacgcctggcgggcctacgacaccgcctccgcagagcgccgcctctcaggaacccccatttccttcatcctcctcctgtcctacacctcctcctgcgtcaaccccatcatctactgcttcatgaacaaacgcttccgcctcggcttcatggccaccttcccctgctgccccaatcctggtcccccaggggcgaggggagaggtgggggaggaggaggaaggcgggaccacaggagcctctctgtccaggttctcgtacagccatatgagtgcctcggtgccaccccagtgagatgtcccctgaccctccaccgcagaaggaaggcagggaggaggcagagaagaaagaacggaagaagagatcaggaagagaaggagcagagctgatggagaaggaaggctccatctccagtgggaactcttcaaggtctgcttttcatccttcatctggattccagagcactgctccagtggggccatgattggtttctaggcagttcaaagcaggatatgttaagtaacactcacca

SEQ ID NO: 14882 - DNA, 1287 bp, Artificial Sequence
  derived and/or modified sequence
atggacgtggtggacagcctgctggtgaacggcagcaacatcacccccccctgcgagctgggcctggagaacgagaccctgttctgcctggaccagcccagacccagcaaggagtggcagcccgccgtgcagatcctgctgtacagcctgatcttcctgctgagcgtgctgggcaacaccctggtgatcaccgtgctgatcagaaacaagagaatgagaaccgtgaccaacatcttcctgctgagcctggccgtgagcgacctgatgctgtgcctgttctgcatgcccttcaacctgatccccaacctgctgaaggacttcatcttcggcagcgccgtgtgcaagaccaccacctacttcatgggcaccagcgtgagcgtgagcaccttcaacctggtggccatcagcctggagagatacggcgccatctgcaagcccctgcagagcagagtgtggcagaccaagagccacgccctgaaggtgatcgccgccacctggtgcctgagcttcaccatcatgaccccctaccccatctacagcaacctggtgcccttcaccaagaacaacaaccagaccgccaacatgtgcagattcctgctgcccaacgacgtgatgcagcagagctggcacaccttcctgctgctgatcctgttcctgatccccggcatcgtgatgatggtggcctacggcctgatcagcctggagctgtaccagggcatcaagttcgaggccagccagaagaagagcgccaaggagagaaagcccagcaccaccagcagcggcaagtacgaggacagcgacggctgctacctgcagaagaccagaccccccagaaagctggagctgagacagctgagcaccggcagcagcagcagagccaacagaatcagaagcaacagcagcgccgccaacctgatggccaagaagagagtgatcagaatgctgatcgtgatcgtggtgctgttcttcctgtgctggatgcccatcttcagcgccaacgcctggagagcctacgacaccgccagcgccgagagaagactgagcggcacccccatcagcttcatcctgctgctgagctacaccagcagctgcgtgaaccccatcatctactgcttcatgaacaagagattcagactgggcttcatggccaccttcccctgctgccccaaccccggcccccccggcgccagaggcgaggtgggcgaggaggaggagggcggcaccaccggcgccagcctgagcagattcagctacagccacatgagcgccagcgtgcccccccagtag

SEQ ID NO: 14883 - protein, 171 aa, Artificial Sequence
  derived and/or modified sequence
MEHSTFLSGLVLATLLSQVSPFKIPIEELEDRVFVNCNTSITWVEGTVGTLLSDITRLDLGKRILDPRGIYRCNGTDIYKDKESTVQVHYRMCQSCVELDPATVAGIIVTDVIATLLLALGVFCFAGHETGRLSGAADTQALLRNDQVYQPLRDRDDAQYSHLGGNWARNK

SEQ ID NO: 14884 - DNA, 516 bp, Artificial Sequence
  derived and/or modified sequence
atggagcatagcacgtttttgtcgggccttgtcttagctaccctgttgagccaagtgagcccctttaagatacccatcgaagagctcgaggaccgagtctttgttaactgtaatacaagtattacttgggttgaaggcactgttgggaccctgctgtcggatatcaccagactggatctcgggaaacgcattttagatccaaggggaatctatcgctgcaatggcaccgacatttacaaagacaaagagagcaccgtgcaggtgcactacagaatgtgccagtcgtgtgtcgaacttgatcccgccacagtcgccggcattattgtgactgatgtgatcgccactttattactggccctcggagtattttgtttcgccggacatgagactggacggctcagcggcgccgccgacacacaggcactgctgagaaacgatcaggtgtatcagccattgcgcgaccgcgatgacgcacagtacagtcacctaggaggcaattgggcaagaaacaaatag

SEQ ID NO: 14885 - DNA, 516 bp, Artificial Sequence
  derived and/or modified sequence
atggagcacagcaccttcctgagcggcctggtgctggccaccctgctgagccaggtgagccccttcaagatccccatcgaggagctggaggacagagtgtttgtgaactgcaacaccagcatcacctgggtggagggcaccgtgggcaccctgctgagtgacatcacccggctggacctgggcaagaggatcctggacccccggggcatctaccgctgcaatggaacagacatctacaaggacaaggagagcacagtgcaggtgcactacaggatgtgccagagctgtgtggagctggaccctgccaccgtggccggcatcatcgtgacagatgtgattgccaccctgctgctggccctgggcgtcttctgctttgctggccacgagaccggccgcctgagcggggctgctgacacccaggccctgctgagaaatgaccaggtgtaccagcccctgcgggacagagatgatgcccagtacagccacctgggcggcaactgggccaggaacaagtag

SEQ ID NO: 14886 - DNA, 516 bp, Artificial Sequence
  derived and/or modified sequence
atggagcacagcaccttcctgagcggcctggtgctggccaccctgctctcccaagtgagccctttcaagatacccatagaggagctggaggatagagtgttcgtgaattgtaatacctcaattacttgggtggagggcactgtgggcacattgctgagtgatatcactcgcctcgatctgggcaagcggatcctagacccccggggaatctacagatgtaatgggacggacatctataaagataaagaatctacagttcaggtccattaccgcatgtgtcaaagctgcgtcgagttggatcccgctacagtggctgggattatcgtgactgatgtgatcgcaacactcctgctggcccttggtgtcttttgttttgcgggacacgaaacaggccgcctgtccggagcagccgatactcaggcgttgttaagaaatgatcaagtctatcagcccctgcgagaccgggacgacgctcagtacagccatctgggcggtaattgggcgaggaataagtag

SEQ ID NO: 14887 - DNA, 516 bp, Artificial Sequence
  derived and/or modified sequence
atggagcactcaacttttttgagtggccttgtcctagctacactactctctcaggtcagcccttttaaaattcccattgaggagttagaggatagggtattcgtgaactgcaacactagcatcacttgggtggaaggcactgtcgggactctgctgtccgatatcacaaggttagacttgggtaagcggatattagatccaagagggatatacaggtgtaacgggacggacatatataaggataaggagtcaacagtccaggtgcattataggatgtgccagtcttgcgttgagcttgatccagccaccgtcgccggtattatcgtgacagacgtcatcgctacactgctcctagctttgggtgtgttctgtttcgctggacatgagactggccgactcagtggagcagctgatactcaagcgctgctgcgcaacgaccaggtgtaccaacccctgcgggatcgagatgacgcccagtatagtcatcttggaggcaattgggcacgcaataaatag

SEQ ID NO: 14888 - DNA, 861 bp, Artificial Sequence
  derived and/or modified sequence
agagaagcagacatcttctagttcctcccccactctcctctttccggtacctgtgagtcagctaggggagggcagctctcacccaggctgatagttcggtgacctggctttatctactggatgagttccgctgggagatggaacatagcacgtttctctctggcctggtactggctacccttctctcgcaagtgagccccttcaagatacctatagaggaacttgaggacagagtgtttgtgaattgcaataccagcatcacatgggtagagggaacggtgggaacactgctctcagacattacaagactggacctgggaaaacgcatcctggacccacgaggaatatataggtgtaatgggacagatatatacaaggacaaagaatctaccgtgcaagttcattatcgaatgtgccagagctgtgtggagctggatccagccaccgtggctggcatcattgtcactgatgtcattgccactctgctccttgctttgggagtcttctgctttgctggacatgagactggaaggctgtctggggctgccgacacacaagctctgttgaggaatgaccaggtctatcagcccctccgagatcgagatgatgctcagtacagccaccttggaggaaactgggctcggaacaagtgaacctgagactggtggcttctagaagcagccattaccaactgtaccttcccttcttgctcagccaataaatatatcctctttcactcagcaggtgcctgggcttcttaaggctcctgggcaaggcgtgggagttgtcctgacttgcttgggatctcgccctcctacctacctgtttcttccttcatctccttccttcctctgcctcaca

SEQ ID NO: 14889 - DNA, 516 bp, Artificial Sequence
  derived and/or modified sequence
atggagcacagcaccttcctgagcggcctggtgctggccaccctgctgagccaggtgagccccttcaagatccccatcgaggagctggaggacagagtgttcgtgaactgcaacaccagcatcacctgggtggagggcaccgtgggcaccctgctgagcgacatcaccagactggacctgggcaagagaatcctggaccccagaggcatctacagatgcaacggcaccgacatctacaaggacaaggagagcaccgtgcaggtgcactacagaatgtgccagagctgcgtggagctggaccccgccaccgtggccggcatcatcgtgaccgacgtgatcgccaccctgctgctggccctgggcgtgttctgcttcgccggccacgagaccggcagactgagcggcgccgccgacacccaggccctgctgagaaacgaccaggtgtaccagcccctgagagacagagacgacgcccagtacagccacctgggcggcaactgggccagaaacaagtag

SEQ ID NO: 14890 - protein, 207 aa, Artificial Sequence
  derived and/or modified sequence
MQSGTHWRVLGLCLLSVGVWGQDGNEEMGGITQTPYKVSISGTTVILTCPQYPGSEILWQHNDKNIGGDEDDKNIGSDEDHLSLKEFSELEQSGYYVCYPRGSKPEDANFYLYLRARVCENCMEMDVMSVATIVIVDICITGGLLLLVYYWSKNRKAKAKPVTRGAGAGGRQRGQNKERPPPVPNPDYEPIRKGQRDLYSGLNQRRI

SEQ ID NO: 14891 - protein, 201 aa, Artificial Sequence
  derived and/or modified sequence
MQSGTHWRVLGLCLLSVGVWGQDGNEEMAYKVSISGTTVILTCPQYPGSEILWQHNDKNIGGDEDDKNIGSDEDHLSLKEFSELEQSGYYVCYPRGSKPEDANFYLYLRARVCENCMEMDVMSVATIVIVDICITGGLLLLVYYWSKNRKAKAKPVTRGAGAGGRQRGQNKERPPPVPNPDYEPIRKGQRDLYSGLNQRRI

SEQ ID NO: 14892 - DNA, 624 bp, Artificial Sequence
  derived and/or modified sequence
atgcagtcagggacgcactggcgtgttctgggcctttgtctactttctgtcggagtgtgggggcaagatgggaatgaggaaatgggcggaatcacacaaaccccgtataaagtgtctatcagcgggactactgtgatcctgacatgtccccagtatcccggatcagagattctgtggcagcataacgataagaacataggtggagacgaagatgacaaaaatatcggttccgacgaggaccatctgtcccttaaggagtttagtgaactggagcaatctggctactacgtatgttaccctcgaggttccaaacccgaagatgctaacttttatttgtacctgcgggcccgcgtctgcgaaaactgtatggaaatggatgtgatgtcagtcgccaccatcgtgatagtcgacatttgcatcaccgggggcctcttgctacttgtttactattggtcgaaaaacaggaaagccaaggcaaagcctgttacgcgcggcgcaggagccggcgggcgacaacgcggtcaaaacaaggagcgcccacctcccgtgcccaaccccgactatgagccaatccggaaggggcagagggacctttatagtggcttgaatcaacgccgaatttag

SEQ ID NO: 14893 - DNA, 606 bp, Artificial Sequence
  derived and/or modified sequence
atgcagagtggtactcattggagagtgttgggcctttgcctcctgtcggttggggtgtggggtcaggacgggaatgaagaaatggcctacaaggtgagtattagtggtaccaccgtcattcttacttgtccccagtatccggggtctgaaatcctgtggcagcacaatgacaaaaacattggcggtgatgaagacgataagaatatcggctcggatgaagaccacctctctcttaaagagttttcggagttagaacagtccggctattatgtgtgctatcccagagggtccaagcccgaggatgccaatttctacctgtacctccgcgcccgggtttgtgagaattgcatggagatggacgttatgagcgttgcaaccatcgtaatcgtggacatctgtatcacgggaggcctgctgttgctcgtctactactggagcaagaatcgaaaagccaaggccaagcccgtgacccgcggcgcgggggctgggggtaggcagagaggtcaaaacaaagaaaggcctcctccagtgccaaatcctgattacgaacccatcaggaaaggccagcgcgatctttactccggtctgaaccagcgacggatttag

SEQ ID NO: 14894 - DNA, 624 bp, Artificial Sequence
  derived and/or modified sequence
atgcagagcggcacccactggagggtgctgggcctgtgcctgctgtctgtgggcgtgtggggccaggatggaaatgaggagatgggcggcatcacccagaccccctacaaggtgtccatcagcggcaccaccgtcatcctgacctgcccccagtacccaggcagcgagatcctgtggcagcacaatgacaagaacattggaggagatgaagatgacaagaacattggaagtgatgaggaccacctgagcctgaaggagttcagcgagctggagcagagcggctactacgtgtgctacccccggggcagcaagccagaagatgccaacttctacctgtacctgcgggcccgggtgtgtgagaactgcatggagatggatgtgatgtctgtggccaccatcgtgattgtggacatctgcatcactggaggcctgctgctgctggtgtactactggagcaagaacaggaaggccaaggccaagcctgtgaccaggggggccggggccggcggccggcagaggggccagaacaaggagcggcccccacctgtgcccaacccagactatgagcccatcaggaagggccagagggacctgtacagcggcctgaaccagaggcgcatctag

SEQ ID NO: 14895 - DNA, 606 bp, Artificial Sequence
  derived and/or modified sequence
atgcagagcggcacccactggagggtgctgggcctgtgcctgctgtctgtgggcgtgtggggccaggatggaaatgaggagatggcctacaaggtgtccatcagcggcaccaccgtcatcctgacctgcccccagtacccaggcagcgagatcctgtggcagcacaatgacaagaacattggaggagatgaagatgacaagaacattggaagtgatgaggaccacctgagcctgaaggagttcagcgagctggagcagagcggctactacgtgtgctacccccggggcagcaagccagaagatgccaacttctacctgtacctgcgggcccgggtgtgtgagaactgcatggagatggatgtgatgtctgtggccaccatcgtgattgtggacatctgcatcactggaggcctgctgctgctggtgtactactggagcaagaacaggaaggccaaggccaagcctgtgaccaggggggccggggccggcggccggcagaggggccagaacaaggagcggcccccacctgtgcccaacccagactatgagcccatcaggaagggccagagggacctgtacagcggcctgaaccagaggcgcatctag

SEQ ID NO: 14896 - DNA, 624 bp, Artificial Sequence
  derived and/or modified sequence
atgcagagcggcacccactggcgggtgctgggcctgtgcctgctgtcggtgggcgtctggggccaggacgggaatgaggaaatgggtggcatcactcagaccccttacaaggtgtcaatcagcgggaccaccgttatccttacctgtccacagtacccaggttcggagatcttgtggcagcacaacgataagaacataggcggcgacgaggacgacaagaacatcggctctgacgaagaccatttatccctgaaagagttttcagaacttgagcagtctggatactacgtttgctatccacgcggtagtaagcccgaggatgcaaacttctacctatacttacgtgcccgagtgtgcgaaaattgtatggagatggatgtaatgtccgtcgccacaattgtcatagttgacatttgcataacaggaggcctactcctgttagtgtattattggtcaaagaacaggaaggccaaagccaagcctgtgactcgaggtgccggggccgggggacgacagcggggccaaaataaagagagaccacccccagtcccaaatccagactacgaacccatccgcaaaggccaacgagacctgtactctggactgaatcagagaaggatatag

SEQ ID NO: 14897 - DNA, 606 bp, Artificial Sequence
  derived and/or modified sequence
atgcagagcggcacccactggcgggtgctgggcctgtgcctgctgagcgttggtgtttggggccaggatggcaacgaggagatggcctacaaagtctccatcagtggaacaaccgtaatcctcacatgtccccaataccctggctcagagatcttgtggcagcacaacgataaaaacatcggaggagacgaggacgacaaaaatatcgggtctgatgaggatcacctgagcctgaaggagttctctgaactcgagcagtcaggttactatgtatgctaccctcgtggatctaagcccgaagacgcaaacttctacctgtacctgcgggcccgcgtgtgtgagaactgtatggagatggacgtgatgtccgtggctacgatcgtcatagttgacatatgtatcacaggtggcctcctgctactcgtgtactactggagcaaaaaccggaaagccaaagcaaaacctgtgaccaggggggctggagcaggggggcgacagaggggtcagaacaaagaaagacctccccccgtgccaaaccctgattacgagcccatccgcaagggtcagagggatttatactccggcctgaatcagcgccgaatctag

SEQ ID NO: 14898 - DNA, 624 bp, Artificial Sequence
  derived and/or modified sequence
atgcagtctggcactcactggagagtcctgggactttgtctgttatcagtgggtgtgtggggacaggatggtaatgaggaaatgggcggaattacccaaacaccttataaggtgagcatttccgggacgaccgtgattcttacttgccctcagtaccctggctcagagatcctctggcaacacaatgataagaacattggtggagacgaggacgacaagaacatcggctctgatgaggaccacctttctctcaaggagttcagcgaactggagcagtccggctattacgtctgctaccctaggggatccaaacccgaggatgcaaacttttacctctatttgcgagctagggtgtgtgaaaactgcatggagatggatgtcatgtccgttgctacaattgtgatcgtggatatttgcattaccgggggtttgctcttgcttgtgtattattggtccaagaatcggaaagctaaggcaaaacccgtcacaaggggagccggagccggagggagacagaggggtcagaacaaagagcgccctcctcccgttccaaatcctgattacgaaccaattcgtaagggacagcgggatctgtacagcgggctcaaccaacgaaggatttag

SEQ ID NO: 14899 - DNA, 606 bp, Artificial Sequence
  derived and/or modified sequence
atgcagtccggcacacattggagggttcttggcctttgcttactcagcgtcggagtgtggggacaggacgggaacgaggagatggcctacaaggtttctatcagtggaacgactgttattttgacatgtccccagtacccgggatctgagatcttgtggcagcataatgataaaaatattggtggggatgaggacgataaaaatattggatctgacgaggatcacctgagcttgaaggaattcagcgagctcgagcagtccggatactatgtgtgttaccccagaggaagtaaacccgaggacgcgaatttttatctctacctccgagcacgggtctgcgagaattgcatggagatggacgtgatgtctgtggccaccattgtgattgtggatatctgcataacaggtggtcttctgctcctggtatactattggagcaagaatcggaaggccaaggccaaacctgtcaccaggggcgctggcgcaggagggagacaacgcggacagaataaggaacgaccaccacctgtccccaatccagattatgagccaatcagaaagggccagcgcgacttatatagtggccttaaccagcggcgaatatag

SEQ ID NO: 14900 - DNA, 1548 bp, Artificial Sequence
  derived and/or modified sequence
gctaaatgtcatgtatttttcatggcccctccaggtattgtcagagtcctcttgtttggccttctaggaaggctgtgggacccagctttcttcaaccagtccaggtggaggcctctgccttgaacgtttccaagtgaggtaaaacccgcaggcccagaggcctctctacttcctgtgtggggttcagaaaccctcctcccctcccagcctcaggtgcctgcttcagaaaatgaagtagtaagtctgctggcctccgccatcttagtaaagtaacagtcccatgaaacaaagatgcagtcgggcactcactggagagttctgggcctctgcctcttatcagttggcgtttgggggcaagatggtaatgaagaaatgggtggtattacacagacaccatataaagtctccatctctggaaccacagtaatattgacatgccctcagtatcctggatctgaaatactatggcaacacaatgataaaaacataggcggtgatgaggatgataaaaacataggcagtgatgaggatcacctgtcactgaaggaattttcagaattggagcaaagtggttattatgtctgctaccccagaggaagcaaaccagaagatgcgaacttttatctctacctgagggcaagagtgtgtgagaactgcatggagatggatgtgatgtcggtggccacaattgtcatagtggacatctgcatcactgggggcttgctgctgctggtttactactggagcaagaatagaaaggccaaggccaagcctgtgacacgaggagcgggtgctggcggcaggcaaaggggacaaaacaaggagaggccaccacctgttcccaacccagactatgagcccatccggaaaggccagcgggacctgtattctggcctgaatcagagacgcatctgaccctctggagaacactgcctcccgctggcccaggtctcctctccagtccccctgcgactccctgtttcctgggctagtcttggaccccacgagagagaatcgttcctcagcctcatggtgaactcgcgccctccagcctgatcccccgctccctcctccctgccttctctgctggtacccagtcctaaaatattgctgcttcctcttcctttgaagcatcatcagtagtcacaccctcacagctggcctgccctcttgccaggatatttatttgtgctattcactcccttccctttggatgtaacttctccgttcagttccctccttttcttgcatgtaagttgtcccccatcccaaagtattccatctacttttctatcgccgtccccttttgcagccctctctggggatggactgggtaaatgttgacagaggccctgccccgttcacagatcctggccctgagccagccctgtgctcctccctcccccaacactccctaccaaccccctaatcccctactccctccaccccccctccactgtaggccactggatggtcatttgcatctccgtaaatgtgctctgctcctcagctgagagagaaaaaaataaactgtatttggctgcaaga

SEQ ID NO: 14901 - DNA, 1289 bp, Artificial Sequence
  derived and/or modified sequence
gtaagtctgctggcctccgccatcttagtaaagtaacagtcccatgaaacaaagatgcagtcgggcactcactggagagttctgggcctctgcctcttatcagttggcgtttgggggcaagatggtaatgaagaaatggcatataaagtctccatctctggaaccacagtaatattgacatgccctcagtatcctggatctgaaatactatggcaacacaatgataaaaacataggcggtgatgaggatgataaaaacataggcagtgatgaggatcacctgtcactgaaggaattttcagaattggagcaaagtggttattatgtctgctaccccagaggaagcaaaccagaagatgcgaacttttatctctacctgagggcaagagtgtgtgagaactgcatggagatggatgtgatgtcggtggccacaattgtcatagtggacatctgcatcactgggggcttgctgctgctggtttactactggagcaagaatagaaaggccaaggccaagcctgtgacacgaggagcgggtgctggcggcaggcaaaggggacaaaacaaggagaggccaccacctgttcccaacccagactatgagcccatccggaaaggccagcgggacctgtattctggcctgaatcagagacgcatctgaccctctggagaacactgcctcccgctggcccaggtctcctctccagtccccctgcgactccctgtttcctgggctagtcttggaccccacgagagagaatcgttcctcagcctcatggtgaactcgcgccctccagcctgatcccccgctccctcctccctgccttctctgctggtacccagtcctaaaatattgctgcttcctcttcctttgaagcatcatcagtagtcacaccctcacagctggcctgccctcttgccaggatatttatttgtgctattcactcccttccctttggatgtaacttctccgttcagttccctccttttcttgcatgtaagttgtcccccatcccaaagtattccatctacttttctatcgccgtccccttttgcagccctctctggggatggactgggtaaatgttgacagaggccctgccccgttcacagatcctggccctgagccagccctgtgctcctccctcccccaacactccctaccaaccccctaatcccctactccctccaccccccctccactgtaggccactggatggtcatttgcatctccgtaaatgtgctctgctcctcagctgagagagaaaaaaataaactgtatttggctgc

SEQ ID NO: 14902 - DNA, 624 bp, Artificial Sequence
  derived and/or modified sequence
atgcagagcggcacccactggagagtgctgggcctgtgcctgctgagcgtgggcgtgtggggccaggacggcaacgaggagatgggcggcatcacccagaccccctacaaggtgagcatcagcggcaccaccgtgatcctgacctgcccccagtaccccggcagcgagatcctgtggcagcacaacgacaagaacatcggcggcgacgaggacgacaagaacatcggcagcgacgaggaccacctgagcctgaaggagttcagcgagctggagcagagcggctactacgtgtgctaccccagaggcagcaagcccgaggacgccaacttctacctgtacctgagagccagagtgtgcgagaactgcatggagatggacgtgatgagcgtggccaccatcgtgatcgtggacatctgcatcaccggcggcctgctgctgctggtgtactactggagcaagaacagaaaggccaaggccaagcccgtgaccagaggcgccggcgccggcggcagacagagaggccagaacaaggagagacccccccccgtgcccaaccccgactacgagcccatcagaaagggccagagagacctgtacagcggcctgaaccagagaagaatctag

SEQ ID NO: 14903 - DNA, 606 bp, Artificial Sequence
  derived and/or modified sequence
atgcagagcggcacccactggagagtgctgggcctgtgcctgctgagcgtgggcgtgtggggccaggacggcaacgaggagatggcctacaaggtgagcatcagcggcaccaccgtgatcctgacctgcccccagtaccccggcagcgagatcctgtggcagcacaacgacaagaacatcggcggcgacgaggacgacaagaacatcggcagcgacgaggaccacctgagcctgaaggagttcagcgagctggagcagagcggctactacgtgtgctaccccagaggcagcaagcccgaggacgccaacttctacctgtacctgagagccagagtgtgcgagaactgcatggagatggacgtgatgagcgtggccaccatcgtgatcgtggacatctgcatcaccggcggcctgctgctgctggtgtactactggagcaagaacagaaaggccaaggccaagcccgtgaccagaggcgccggcgccggcggcagacagagaggccagaacaaggagagacccccccccgtgcccaaccccgactacgagcccatcagaaagggccagagagacctgtacagcggcctgaaccagagaagaatctag

SEQ ID NO: 14904 - protein, 163 aa, Artificial Sequence
  derived and/or modified sequence
MKWKALFTAAILQAQLPITEAQSFGLLDPKLCYLLDGILFIYGVILTALFLRVKFSRSADAPAYQQGQNQLYNELNLGRREEYDVLDKRRGRDPEMGGKPRRKNPQEGLYNELQKDKMAEAYSEIGMKGERRRGKGHDGLYQGLSTATKDTYDALHMQALPPR

SEQ ID NO: 14905 - DNA, 492 bp, Artificial Sequence
  derived and/or modified sequence
atgaagtggaaggctctctttacagctgccatactccaggcacagctaccaattacagaagcacagtcctttggcttactcgatccgaaactctgctacctgctcgatggaatcttattcatctatggagtaattttgacggccctctttctacgggtgaaattcagtcgttccgcagatgcacccgcatatcagcaggggcagaatcagctctacaacgaactaaatctggggcgtcgggaggagtatgacgtgctggataagcggcgtggcagagacccagagatgggaggcaagcctcgtcggaaaaacccccaagagggtctctataacgaactgcagaaggacaagatggcggaagcatactctgagattggaatgaagggcgagcgaagaagggggaaggggcacgatggcttgtaccaagggctgagcacggcgactaaggacacgtatgacgccctccacatgcaggctttacctccgcgttag

SEQ ID NO: 14906 - DNA, 492 bp, Artificial Sequence
  derived and/or modified sequence
atgaagtggaaggccctcttcaccgctgccatcctgcaggcccagctgcccatcacagaggcccagagctttggcctgctggaccccaagctgtgctacctgctggatggcatcctcttcatctacggcgtcatcctgacagccctcttcctgcgggtgaagttcagccgctctgcagatgccccagcctaccagcagggccagaaccagctgtacaatgagctgaacctgggcagaagagaggagtatgatgtgctggacaagagaagaggccgggaccctgagatgggcggcaagcccaggaggaagaacccccaggagggcctgtacaatgagctgcagaaggacaagatggccgaggcctacagcgagatcggcatgaagggggagcggcggcggggcaaaggacatgatggcctgtaccagggcctgagcacagccaccaaggacacctatgatgccctgcacatgcaggccctgcccccaagatag

SEQ ID NO: 14907 - DNA, 492 bp, Artificial Sequence
  derived and/or modified sequence
atgaagtggaaggccctgttcaccgccgccatcctgcaggcccagctgccaatcacagaagcccagagtttcggtctactggaccctaagttatgctatctgctcgacggcatcttgtttatatacggcgtgatcctgaccgcactgttccttcgggtgaagtttagtcggagcgctgatgcccctgcatatcagcaggggcagaatcagttgtataacgaactcaatctgggccgcagagaggagtacgatgtgctggacaaacggcgaggccgggatcccgagatggggggcaagccccggcggaaaaacccccaggaagggctgtataatgagctccaaaaggacaagatggcggaagcttactccgagatcggcatgaaaggcgaaaggaggcgagggaagggacacgatggcctgtaccagggcctcagcactgccaccaaggatacctatgacgctcttcacatgcaggctctacccccaagatag

SEQ ID NO: 14908 - DNA, 492 bp, Artificial Sequence
  derived and/or modified sequence
atgaaatggaaggccttgttcacagccgctattcttcaggcacagctccccattacggaagctcagtccttcggtcttcttgatccaaagctctgttatttgctcgatgggatcctgttcatatacggtgttattcttaccgccctgtttttgagggtgaaatttagccgcagcgctgatgctcctgcttatcagcagggacagaatcagctgtacaatgagttgaatctcggtcgcagggaggaatacgacgtgcttgataaacgacgaggacgagatcccgagatgggaggcaaacctcgtaggaagaacccacaagaggggctctacaatgaattgcagaaggacaagatggcggaggcctacagcgagattggaatgaaaggagaaagacggcgaggtaagggccacgacggactctatcaggggctctctacagccaccaaagacacatacgatgcactgcacatgcaggccctgccacccaggtag

SEQ ID NO: 14909 - DNA, 1678 bp, Artificial Sequence
  derived and/or modified sequence
tgctttctcaaaggccccacagtcctccacttcctggggaggtagctgcagaataaaaccagcagagactccttttctcctaaccgtcccggccaccgctgcctcagcctctgcctcccagcctctttctgagggaaaggacaagatgaagtggaaggcgcttttcaccgcggccatcctgcaggcacagttgccgattacagaggcacagagctttggcctgctggatcccaaactctgctacctgctggatggaatcctcttcatctatggtgtcattctcactgccttgttcctgagagtgaagttcagcaggagcgcagacgcccccgcgtaccagcagggccagaaccagctctataacgagctcaatctaggacgaagagaggagtacgatgttttggacaagagacgtggccgggaccctgagatggggggaaagccgagaaggaagaaccctcaggaaggcctgtacaatgaactgcagaaagataagatggcggaggcctacagtgagattgggatgaaaggcgagcgccggaggggcaaggggcacgatggcctttaccagggtctcagtacagccaccaaggacacctacgacgcccttcacatgcaggccctgccccctcgctaacagccaggggatttcaccactcaaaggccagacctgcagacgcccagattatgagacacaggatgaagcatttacaacccggttcactcttctcagccactgaagtattcccctttatgtacaggatgctttggttatatttagctccaaaccttcacacacagactgttgtccctgcactctttaagggagtgtactcccagggcttacggccctggccttgggccctctggtttgccggtggtgcaggtagacctgtctcctggcggttcctcgttctccctgggaggcgggcgcactgcctctcacagctgagttgttgagtctgttttgtaaagtccccagagaaagcgcagatgctagcacatgccctaatgtctgtatcactctgtgtctgagtggcttcactcctgctgtaaatttggcttctgttgtcaccttcacctcctttcaaggtaactgtactgggccatgttgtgcctccctggtgagagggccgggcagaggggcagatggaaaggagcctaggccaggtgcaaccagggagctgcaggggcatgggaaggtgggcgggcaggggagggtcagccagggcctgcgagggcagcgggagcctccctgcctcaggcctctgtgccgcaccattgaactgtaccatgtgctacaggggccagaagatgaacagactgaccttgatgagctgtgcacaaagtggcataaaaaacatgtggttacacagtgtgaataaagtgctgcggagcaagaggaggccgttgattcacttcacgctttcagcgaatgacaaaatcatctttgtgaaggcctcgcaggaagacccaacacatgggacctataactgcccagcggacagtggcaggacaggaaaaacccgtcaatgtactaggatactgctgcgtcattacagggcacaggccatggatggaaaacgctctctactctgctttttttctactgttttaatttatactggcatgctaaagccttcctattttgcataataaatgcttcagtgaaaatgca

SEQ ID NO: 14910 - DNA, 492 bp, Artificial Sequence
  derived and/or modified sequence
atgaagtggaaggccctgttcaccgccgccatcctgcaggcccagctgcccatcaccgaggcccagagcttcggcctgctggaccccaagctgtgctacctgctggacggcatcctgttcatctacggcgtgatcctgaccgccctgttcctgagagtgaagttcagcagaagcgccgacgcccccgcctaccagcagggccagaaccagctgtacaacgagctgaacctgggcagaagagaggagtacgacgtgctggacaagagaagaggcagagaccccgagatgggcggcaagcccagaagaaagaacccccaggagggcctgtacaacgagctgcagaaggacaagatggccgaggcctacagcgagatcggcatgaagggcgagagaagaagaggcaagggccacgacggcctgtaccagggcctgagcaccgccaccaaggacacctacgacgccctgcacatgcaggccctgccccccagatag

SEQ ID NO: 14911 - protein, 116 aa, Artificial Sequence
  derived and/or modified sequence
MDYYRKYAAIFLVTLSVFLHVLHSAPDVQDCPECTLQENPFFSQPGAPILQCMGCCFSRAYPTPLRSKKTMLVQKNVTSESTCCVAKSYNRVTVMGGFKVENHTACHCSTCYYHKS

SEQ ID NO: 14912 - DNA, 348 bp, Artificial Sequence
  derived and/or modified sequence
atggactactaccggaagtacgcggcaatctttcttgtgactctttcagtctttctccatgtgctccattccgccccagatgtgcaggattgtccagaatgtactcttcaagagaacccattcttttcacagccaggcgcacctattcttcaatgcatgggatgttgtttttcacgtgcctaccccacgcctctgcgcagcaaaaagactatgctggtgcaaaagaacgtcacctcggaatctacttgttgtgttgcgaaatcatacaacagggtgactgtgatgggcggattcaaagtggagaatcacactgcttgccattgttctacctgctactaccacaagtcc

SEQ ID NO: 14913 - DNA, 348 bp, Artificial Sequence
  derived and/or modified sequence
atggattactacagaaagtacgccgccatctttctcgtgacgctgtccgtcttcctacatgtactgcattccgcacccgacgtgcaagattgccctgagtgcacgctgcaggaaaatcccttctttagtcagccgggagcccctatactgcaatgtatgggatgctgtttctctcgcgcctatccgaccccactaaggtctaagaagaccatgctggtgcagaagaacgtcacctcagaaagcacctgctgcgtcgccaaaagctataatcgggttaccgtgatgggtggttttaaggtggagaatcacaccgcctgccactgttccacctgttactaccataagtct

SEQ ID NO: 14914 - DNA, 348 bp, Artificial Sequence
  derived and/or modified sequence
atggactattatcgaaaatatgcggcaatatttctggttaccttatctgttttcctgcacgtactgcatagtgccccggacgtgcaagattgtccagaatgtacactgcaggagaatccatttttttctcaacccggtgctcccatcctccagtgtatggggtgttgcttttctcgtgcttacccgaccccacttagaagtaagaagactatgcttgtgcaaaagaatgtgactagcgagtcaacctgctgcgtggcaaagagctacaatcgagtgacagtgatgggcgggtttaaggtggaaaatcacactgcttgccattgttccacatgttactatcataagtcg

SEQ ID NO: 14915 - DNA, 348 bp, Artificial Sequence
  derived and/or modified sequence
atggattactaccggaagtatgctgcgatcttcctcgtgaccctgagcgtgttcctccacgtgcttcacagcgccccagacgtgcaagactgccctgaatgcaccctccaagaaaacccgttcttctcgcagcctggagcaccaattctgcaatgtatgggatgctgcttctccagagcctaccccaccccactgcggtcaaaaaagacgatgctggtgcagaaaaacgtcacttcggaatcaacttgttgcgttgctaagtcctacaatcgcgttaccgtcatgggaggattcaaagtggagaaccacaccgcgtgccattgctcaacctgctactaccacaagagc

SEQ ID NO: 14916 - DNA, 348 bp, Artificial Sequence
  derived and/or modified sequence
atggactactatcgtaaatacgctgctatattcttggttacccttagcgtttttctccatgtgttacattctgctccagatgttcaagattgcccggagtgtacactacaagagaacccttttttctctcaacctggggccccaattttgcaatgcatgggctgttgtttttcaagagcttacccaacgccattaaggtccaagaaaacaatgcttgtccaaaaaaatgtaacttctgaatctacctgctgcgtcgctaaatcctacaaccgtgttactgttatgggaggttttaaggtagaaaaccacaccgcgtgtcattgttccacgtgctattaccataaatct

SEQ ID NO: 14917 - DNA, 348 bp, Artificial Sequence
  derived and/or modified sequence
atggactactataggaaatacgctgccatattcctggtgacactgtctgtgtttctgcatgtgctccatagtgccccagatgtgcaagattgccccgagtgcactctacaggaaaatccattcttttcccagccaggggcccctatcctccagtgcatggggtgctgcttcagccgggcctacccgacgccactccggtctaagaagaccatgctggtgcagaaaaacgtgacatctgaatcgacatgctgtgtggccaagtcatacaatcgcgtaacagtaatgggagggtttaaagtagagaatcacacggcctgccactgttctacctgttattaccataagagc

SEQ ID NO: 14918 - DNA, 348 bp, Artificial Sequence
  derived and/or modified sequence
atggattactacagaaagtacgcagcgattttcctggtgactctctccgtgttcctgcacgtgctccactcggcgcctgacgtgcaggactgcccagaatgtacgctccaagagaacccgttcttcagccaaccaggcgcgccgatcctccagtgcatgggatgctgcttctcgcgggcatacccaaccccactccggtccaaaaagaccatgctggtgcaaaagaatgtcacgtccgagtcaacctgctgcgtcgccaagtcgtacaacagagtgaccgtcatgggtggatttaaggtggagaaccataccgcctgccactgctcaacctgttattaccataaatct

SEQ ID NO: 14919 - DNA, 348 bp, Artificial Sequence
  derived and/or modified sequence
atggattactaccggaagtacgcagccattttcctcgtgaccctgtccgtgttcctgcacgtgcttcactccgcacccgacgtgcaagattgcccggaatgcaccctgcaggaaaacccattcttttcgcagccgggggcaccgattctgcaatgcatgggttgctgctttagcagggcgtacccaactcctttgcgtagcaagaaaaccatgctcgtccagaagaatgtcacctccgaatctacttgttgcgtggccaaaagctacaaccgggtgaccgtcatgggaggatttaaggtggaaaaccatactgcatgtcattgctcaacgtgttactaccataagagc

SEQ ID NO: 14920 - DNA, 348 bp, Artificial Sequence
  derived and/or modified sequence
atggattactataggaagtacgccgctatatttctggtgacactaagtgtgttcctacacgtcttacacagcgcccccgacgttcaggattgtccagagtgcaccctgcaggaaaacccattctttagtcaaccgggcgcacccatcttgcagtgcatggggtgttgtttctcacgcgcatatcccactccactgaggtccaagaagaccatgctggttcaaaaaaacgtgacttctgagtccacttgctgcgtcgccaagagctataacagggttactgtgatgggcgggtttaaggtggagaatcacactgcttgccactgctctacttgctactaccacaaatcc

SEQ ID NO: 14921 - DNA, 348 bp, Artificial Sequence
  derived and/or modified sequence
atggattattaccgaaaatatgctgccattttcctcgtgacactgagcgtgtttctccacgtgctgcacagcgcccctgatgtccaagactgtccggaatgtacactgcaggagaacccctttttttcccagccgggagctcccatcctgcagtgtatgggctgctgcttttctcgggcgtatccgacaccactgaggtcaaaaaaaaccatgctggtgcagaaaaacgtcacgagtgagtccacatgctgcgttgcaaagtcctacaatcgagtaaccgtcatgggtggatttaaagtcgagaaccatacggcttgccactgttctacttgttattaccacaaaagt

SEQ ID NO: 14922 - DNA, 348 bp, Artificial Sequence
  derived and/or modified sequence
atggattactaccgcaagtacgcagcgattttccttgtcacgttgtctgtgtttctccacgtgctgcatagcgctcctgatgtgcaggactgccccgaatgcactttgcaagaaaatccgtttttcagccagcctggagctcccatcctgcaatgtatgggttgttgctttagtagagcatatcccacccctctgcggtccaaaaagaccatgctcgtgcagaagaacgtgacttcggaaagcacctgctgtgtcgcaaaatcttacaacagggtgacggtgatgggtggatttaaggtcgagaatcatactgcatgtcattgctcaacctgttattaccataaatcc

SEQ ID NO: 14923 - DNA, 348 bp, Artificial Sequence
  derived and/or modified sequence
atggactactatcgcaagtacgcagctatcttcctggtgaccctctcagtgttcctgcacgtcctgcactccgcccctgatgtgcaagactgtccggagtgcaccctccaagaaaatccgttcttcagccagcctggagcaccgatccttcagtgtatgggttgctgcttttcgcgggcataccctacgccgttgcggtcaaaaaagaccatgctggtgcagaagaacgtgacttccgaatcaacctgttgcgtggcgaaatcatataacagagtgactgtgatgggaggtttcaaggtggagaatcacaccgcttgccattgcagcacttgctactaccacaaatca

SEQ ID NO: 14924 - DNA, 348 bp, Artificial Sequence
  derived and/or modified sequence
atggactattacagaaagtacgcagcgatcttcctggtgactctgagcgtgttcttgcacgtgctccactcggccccagatgtccaagactgccctgagtgcactctgcaagagaacccattcttctcccagcccggggcgccgattctgcagtgtatgggatgctgcttctctcgcgcctacccgaccccactccggagcaaaaagaccatgctggtgcaaaagaatgtgactagcgagtccacttgctgcgtggcgaaatcgtacaatcgcgtcaccgtgatgggtggatttaaggtggaaaaccataccgcgtgccactgctcaacctgctactaccataagtcg

SEQ ID NO: 14925 - DNA, 348 bp, Artificial Sequence
  derived and/or modified sequence
atggactactaccgcaagtacgcagcgatctttttggtgaccctttccgtgttcctgcatgtgctgcattcggctccggatgtgcaggattgcccagaatgtacgctgcaagaaaatccgttcttctcgcagccgggagccccaattctgcagtgtatgggctgctgcttctcaagggcctaccctaccccacttagaagcaaaaagaccatgctcgtccagaagaacgtcacttcggagtctacctgctgtgtggccaaatcgtataacagggttaccgtgatggggggattcaaggtcgagaaccacactgcttgccactgtagcacctgttactaccacaagtcc

SEQ ID NO: 14926 - DNA, 348 bp, Artificial Sequence
  derived and/or modified sequence
atggactactaccggaagtacgccgccatctttctggtgaccctgtcagtgttcctgcacgtgctgcactcggccccagacgtgcaagactgtccggagtgtaccctgcaggagaacccgttcttctcccaacctggcgcgcccattctccagtgcatgggctgctgcttcagccgggcctacccgactccattgcggagcaagaaaaccatgctcgtccagaaaaatgtgactagcgaaagcacctgctgcgtggccaagagctacaacagagtgaccgtgatgggcggatttaaggtggaaaaccacactgcgtgccactgctcaacttgttactaccacaagtcc

SEQ ID NO: 14927 - DNA, 348 bp, Artificial Sequence
  derived and/or modified sequence
atggattactataggaagtacgcagccatttttctggtcaccctgtccgtgttccttcacgtactgcacagcgctcctgacgtgcaggattgtcccgaatgcaccctgcaggaaaaccctttttttagtcagccaggagcgcctatattgcagtgcatgggatgctgttttagcagggcatacccaacacccttgcggtctaagaagaccatgctggttcagaagaacgtgacgagtgagtctacctgctgcgtggctaaaagctacaaccgagttaccgtaatgggcggttttaaagttgaaaaccacacggcctgtcactgcagcacatgctattatcataaatct

SEQ ID NO: 14928 - DNA, 348 bp, Artificial Sequence
  derived and/or modified sequence
atggattactatcgcaagtatgcggcaatattcttggtgaccttgtcggtattcctacatgtgctccattccgccccagatgtgcaggactgtccagagtgcaccttgcaggagaacccattcttctcccaaccaggggccccaatactgcagtgcatgggctgctgcttcagccgtgcttatcccacgcctctgagaagcaagaaaactatgttggttcagaagaatgtgacttcggaatctacctgctgcgtggcaaagtcatacaatagggtgacggtcatgggtggttttaaggtcgaaaatcacaccgcttgccattgctcaacatgttactaccataagtcg

SEQ ID NO: 14929 - DNA, 348 bp, Artificial Sequence
  derived and/or modified sequence
atggactactatcgcaaatacgcggccattttccttgtcacgttatcagtctttctgcatgtgctgcacagtgctcccgacgttcaggactgtcctgagtgtacactgcaggagaatcctttcttcagtcaaccaggagcgcctatcttgcagtgtatgggctgctgtttctcccgcgcctaccccacgccactgcgtagcaagaaaactatgctagtccagaaaaacgtgactagcgagtcaacatgttgcgtcgccaaaagctacaatagagtgactgtgatggggggcttcaaggtggagaaccatactgcctgtcattgttctacctgctactaccacaagtcg

SEQ ID NO: 14930 - DNA, 348 bp, Artificial Sequence
  derived and/or modified sequence
atggattattacagaaaatatgctgctatcttcttagtgacactgtcagtatttcttcatgtgctccatagcgctcccgacgttcaagattgccccgagtgtaccctccaagaaaacccattttttagtcagcccggcgctcccatcttgcaatgtatgggatgttgtttctctcgcgcctaccctacgcctctcaggtccaagaagactatgcttgttcagaagaacgtgacatcagagagcacatgctgcgtggccaagagctacaatcgggttacggtgatggggggattcaaggttgagaatcatacagcttgccattgttctacctgttattaccacaaaagt

SEQ ID NO: 14931 - DNA, 348 bp, Artificial Sequence
  derived and/or modified sequence
atggactactaccgaaaatacgccgctatctttctggtgactttgagcgtgttcctgcacgtgcttcactctgcaccggatgtccaagattgcccggagtgtactcttcaggaaaatccttttttcagccagcctggcgcaccgatactccaatgcatgggctgttgtttttccagagcttaccccactccactgagatccaagaaaacgatgctcgtgcaaaagaacgttacttcggaatcgacctgttgcgtggcaaagtcatacaaccgtgtcaccgttatggggggttttaaggtggagaaccataccgcatgtcattgttcaacgtgctattaccacaagtca

SEQ ID NO: 14932 - DNA, 348 bp, Artificial Sequence
  derived and/or modified sequence
atggactactacaggaagtacgctgcaatctttctggtgaccctgtccgtgttcctccacgtgcttcattccgccccggacgtgcaagattgtcctgagtgtacgctccaagagaacccgttcttttcacagccaggagcaccaattctccaatgtatgggatgctgtttttcccgagcataccctacgcctctccggagcaagaaaaccatgctggtccagaagaacgtgacctcagaatcgacttgttgtgtcgcaaagtcttacaacagggtgactgtgatgggaggtttcaaggtggaaaaccatactgcatgtcactgttcgacctgttactaccataagtcg

SEQ ID NO: 14933 - DNA, 348 bp, Artificial Sequence
  derived and/or modified sequence
atggactactaccgcaagtatgcagccatcttcctcgtcactctgtccgtctttctccacgtccttcactcagcacccgatgtgcaggattgtcctgaatgcactctccaagaaaaccccttcttcagccaaccgggtgcgccaatattgcaatgcatgggatgttgcttttcaagagcataccctacgcctctcaggtcaaaaaagactatgctggtgcagaagaatgtgacctccgaatccacttgctgcgttgcgaaatcgtacaaccgggtcaccgtcatgggtggttttaaggtcgaaaaccacaccgcatgtcattgcagcacttgttactaccacaagtca

SEQ ID NO: 14934 - DNA, 348 bp, Artificial Sequence
  derived and/or modified sequence
atggattactatcggaaatacgcagcaatcttcttggtgaccctgtcggtgttcctccacgtgctgcattccgcaccggacgttcaagactgcccggaatgcactctgcaagagaaccctttcttctctcaaccaggggcgcctatcctccagtgtatgggatgctgtttctccagagcctacccgacgccactgcgctcgaaaaagactatgctggtgcagaaaaatgtgacttccgagagcacttgctgcgtggcgaagtcgtacaatcgagtgactgtgatgggaggatttaaggtcgaaaatcataccgcttgccattgcagcacttgctactaccataaaagc

SEQ ID NO: 14935 - DNA, 348 bp, Artificial Sequence
  derived and/or modified sequence
atggactactatcggaaatacgcagccatcttcctggtgacccttagcgtctttcttcatgtgcttcattcggccccagatgtacaggattgtcccgagtgtaccctccaagaaaatccctttttctcgcagccaggggcgccgattctgcaatgcatgggatgctgtttttccagagcctaccctactccgcttagatcaaagaaaaccatgctcgtgcaaaagaacgtaaccagcgaatccacttgctgtgtcgcaaagagttacaatagggtgaccgtcatgggcgggtttaaagtggaaaaccacaccgcatgccattgctcgacttgttactaccacaagtcg

SEQ ID NO: 14936 - DNA, 348 bp, Artificial Sequence
  derived and/or modified sequence
atggactactatcgcaagtacgccgcaatcttcctggtgaccctgagcgtgtttttgcacgtgttgcatagtgcgcctgatgttcaggattgccccgagtgtactcttcaagaaaacccatttttctcgcaacctggtgcccctattcttcagtgtatgggttgctgtttctctcgagcatatccaacccccctgaggtctaagaaaaccatgctcgtccaaaagaacgtgacgtccgaatctacgtgttgcgtggcaaagtcatacaatcgggtaactgtgatgggaggctttaaagtcgaaaaccataccgcatgccattgttcgacttgttactaccacaagtcc

SEQ ID NO: 14937 - DNA, 348 bp, Artificial Sequence
  derived and/or modified sequence
atggattattatcggaaatacgctgctattttcctggtgacactatcggtgtttctccacgttctccacagcgcaccagatgtgcaggactgccctgagtgtacattgcaggaaaacccattcttctcccagccaggcgcccccatactccaatgcatggggtgctgtttctcaagagcctacccaacacctctgcgctccaagaaaaccatgctggtccagaaaaacgtcacctcagagtccacctgttgtgtagctaaatcttataaccgagttacggtcatgggcgggtttaaggttgaaaaccacaccgcttgccactgcagcacctgctattaccataagagc

SEQ ID NO: 14938 - DNA, 348 bp, Artificial Sequence
  derived and/or modified sequence
atggactactacagaaagtacgccgcgatcttcctggtcaccctgtcagtgtttcttcacgttctgcactcagcaccagatgtgcaggattgtcctgaatgcacgctgcaggaaaaccccttcttttcgcagccgggagcacctattctgcagtgtatgggctgttgcttttcgagagcttacccgacgcccttgcgctccaagaaaacgatgcttgtgcaaaagaatgtcacttctgagtccacttgctgtgtcgcaaagagctacaacagagtgaccgtgatggggggctttaaggtggaaaatcatacggcatgccattgttccacctgttactaccacaaatca

SEQ ID NO: 14939 - DNA, 348 bp, Artificial Sequence
  derived and/or modified sequence
atggattattaccgtaagtacgcggcaatctttctggtgactctctccgtattcctccatgttttgcatagcgcaccagacgtgcaggattgtcctgagtgtacacttcaagagaacccgtttttcagccagccgggagccccgatcctgcagtgtatggggtgctgctttagccgcgcctaccctacccccttgcgctcaaaaaagaccatgttagtgcagaaaaacgtgacttcagaatctacgtgctgcgtggcgaaatcctataatcgggtgactgtcatgggggggtttaaagttgaaaatcacaccgcctgtcactgctccacgtgttattatcacaagagt

SEQ ID NO: 14940 - DNA, 348 bp, Artificial Sequence
  derived and/or modified sequence
atggattactaccgaaagtatgccgcgattttcctggtgactctttctgtattcctgcatgtactgcattcagctccagacgtccaggactgccccgaatgtacccttcaggaaaaccctttcttctcccagcccggggcgcccatcctgcagtgtatgggctgctgcttcagtagggcctatcccactcccttgagaagcaagaagactatgctggtgcagaagaatgttacctccgaatctacctgctgcgtggctaaatcttataatagggtgacggtgatgggaggatttaaggtagagaatcataccgcatgccactgttctacgtgctactaccataagagt

SEQ ID NO: 14941 - DNA, 348 bp, Artificial Sequence
  derived and/or modified sequence
atggactactaccggaagtacgccgctatcttcctggtgaccctgtccgtctttctgcatgtgttgcactcggcgccggacgtgcaggactgtccggaatgcaccctgcaggagaaccctttcttttcacagccgggcgcaccgatcctccagtgcatgggttgctgctttagccgggcctaccccactcctcttcggtccaagaaaaccatgctcgtccagaagaatgttacttccgaaagcacttgctgcgtggccaaaagctataacagggtcactgtgatgggaggattcaaggtggaaaaccataccgcctgccattgctcgacttgttactatcataagtcc

SEQ ID NO: 14942 - DNA, 348 bp, Artificial Sequence
  derived and/or modified sequence
atggactactacaggaaatacgctgcaatatttctggtgacgctttcagtgttcctccatgtgcttcatagtgcccctgatgtccaggattgccccgagtgtaccctgcaggagaatcccttcttctcccagccaggggcaccgattcttcagtgtatgggctgttgcttttcaagagcatatcctacaccgcttcgatcaaagaagacaatgttggtgcagaagaatgtaacaagcgaatccacgtgctgtgtggctaagagctacaaccgggtgactgtaatgggcgggtttaaagtggaaaaccacactgcctgccactgtagtacctgctactaccacaagagc

SEQ ID NO: 14943 - DNA, 348 bp, Artificial Sequence
  derived and/or modified sequence
atggactattaccggaaatacgccgctatcttcctcgtcactttgtccgtgtttctgcatgtccttcattcggccccggacgtgcaagattgtcctgagtgcaccctccaggaaaacccattcttcagccagcccggagcgccaatcctgcaatgcatgggatgttgcttctcgcgcgcgtacccgaccccgctgagaagcaaaaagaccatgctggtgcagaagaatgtgacctcagaatcgacgtgctgcgttgccaagtcttacaacagggtgactgtgatggggggctttaaggtcgagaaccacactgcatgccactgttcaacttgctactaccacaagtcc

SEQ ID NO: 14944 - DNA, 348 bp, Artificial Sequence
  derived and/or modified sequence
atggattattacaggaagtacgccgctattttcctggtcaccttgagcgtgtttctgcatgtgctgcactccgctccggacgttcaggactgccccgaatgcacactacaggagaatccattcttctcccagcccggcgcacccatactccagtgtatgggctgttgtttctctcgcgcatacccaactcctctcagatctaaaaagacaatgttggtccaaaaaaacgttacttctgagtccacatgctgcgtagctaagagctataaccgggttacagtgatgggagggttcaaagtggaaaatcacacggcatgtcactgtagtacttgctattaccataagagt

SEQ ID NO: 14945 - DNA, 348 bp, Artificial Sequence
  derived and/or modified sequence
atggactattacagaaagtacgccgcgatctttctcgtgaccctgtcggtgttcttgcatgtgctgcattcagcccccgacgtgcaagattgcccggaatgcacccttcaggaaaatccgttcttctcacagccgggtgccccaatcctgcaatgcatgggctgctgttttagccgcgcctaccctactccactccgcagcaaaaagaccatgctcgtacagaaaaatgtgacctccgagtccacctgttgtgtggcgaagtcctacaaccgcgtcacggtgatgggcgggttcaaagtcgagaaccacactgcgtgccattgctcaacttgttactaccacaagtcc

SEQ ID NO: 14946 - DNA, 348 bp, Artificial Sequence
  derived and/or modified sequence
atggattattaccgcaaatacgcagctatcttcctggtgaccctctctgtgtttctccacgttctccactcagcgcccgatgtgcaagactgtcctgagtgtaccttgcaggagaatccatttttctctcagcccggagctccgattctccagtgtatgggatgttgttttagtagagcatatcccaccccactccggtccaagaagaccatgcttgtgcagaagaacgtcacctccgaatctacctgctgcgttgcaaagtcctataatagggtgaccgtgatgggcggattcaaagtggaaaatcacactgcatgtcactgcagtacgtgttactatcataagagc

SEQ ID NO: 14947 - DNA, 348 bp, Artificial Sequence
  derived and/or modified sequence
atggattactacagaaagtatgctgcaatcttcctcgttactctgtccgtgttcttgcacgtcctgcactcggcaccggacgtccaggattgtccggagtgtaccctccaggaaaaccctttctttagccagcctggggccccgatactgcagtgtatgggttgctgcttctcccgcgcctacccaacccctctccggtcaaaaaagaccatgttggtgcagaaaaatgtcacgtccgagtctacctgctgcgtcgcaaagtcgtacaaccgggtgactgtgatggggggattcaaggtggaaaatcacactgcctgtcattgctctacttgctactaccataagagc

SEQ ID NO: 14948 - DNA, 348 bp, Artificial Sequence
  derived and/or modified sequence
atggactattaccgaaagtacgcggctatcttcctcgtcaccttgtccgtctttctgcacgtactgcactccgcgccggatgtccaagactgtccggagtgtactctgcaagaaaatcccttcttctcccagccgggcgcgccaatcctgcagtgcatgggttgctgcttttcacgcgcctatccgaccccactcagatctaaaaagactatgctcgtacagaaaaacgtcactagcgaatcgacttgctgcgtggccaagtcgtacaacagggtgaccgtgatgggaggattcaaagttgagaatcataccgcctgccactgcagcacttgctactaccataagtcg

SEQ ID NO: 14949 - DNA, 348 bp, Artificial Sequence
  derived and/or modified sequence
atggattattatcgtaaatatgctgcaatttttttagttacattgtctgtatttcttcatgttcttcatagtgctcctgatgtacaagattgtccagaatgtacgcttcaagagaatccattcttttcacaaccaggtgctcctattttacaatgtatgggatgttgtttttcaagggcttatccaacaccattgcgatcaaaaaaaacaatgctcgttcaaaaaaatgttacttcagaatctacatgttgtgtagccaaatcatataatagagtaactgttatgggaggatttaaggtagaaaatcatacagcctgtcattgttctacatgttattatcataagtcc

SEQ ID NO: 14950 - DNA, 348 bp, Artificial Sequence
  derived and/or modified sequence
atggactactaccgcaagtacgcagccattttccttgtgacgttgagcgtgtttctccacgtcttgcattcggccccagatgtgcaggattgccctgaatgcactctgcaagaaaacccgtttttcagccagccgggtgctccgatcctgcagtgtatgggctgttgtttcagccgggcttatccgacgccgctgaggtcgaaaaagactatgctggtgcagaaaaacgtcacctcggagtcgacctgttgcgtggcaaagagctacaaccgcgtgactgtgatgggcggattcaaggtggaaaatcacaccgcgtgccactgttcgacttgttactaccataagtca

SEQ ID NO: 14951 - DNA, 348 bp, Artificial Sequence
  derived and/or modified sequence
atggattactaccgtaaatacgcagcaatcttcctggtgaccctttctgtgtttctccacgttctgcactccgcacctgacgtgcaggattgcccagagtgtaccctgcaagagaatccgttcttttcccaacctggtgcacctattctccaatgtatgggctgttgtttttcgagagcatacccaactcctcttagatcgaagaaaaccatgctggtgcaaaagaatgtgacttcagagtccacctgctgtgtcgcaaagtcctacaatcgggtgactgtgatgggtggatttaaggtggagaaccataccgcatgccattgtagcacttgttactatcataagagc

SEQ ID NO: 14952 - DNA, 348 bp, Artificial Sequence
  derived and/or modified sequence
atggattattatcgaaaatatgcagccatctttcttgtaacattgagtgtctttttacacgtgcttcattcagctccagacgtacaagattgtcctgaatgtacactacaggaaaatccgtttttctctcaaccgggagcacctatcttgcaatgtatggggtgctgcttctctcgggcttaccctacccccttacgttctaagaaaacaatgctcgtgcagaaaaatgtcacaagcgaatccacgtgttgtgttgctaagtcatacaacagagtaacagtgatgggagggttcaaagtagaaaaccatacggcatgccattgctctacgtgttattaccacaagtca

SEQ ID NO: 14953 - DNA, 348 bp, Artificial Sequence
  derived and/or modified sequence
atggactattacaggaagtacgctgctatctttctggtgaccctctccgtgttcctgcatgtcctccactctgcccccgatgtgcaggactgccctgaatgtaccctgcaagaaaaccccttcttctcacagcctggagccccaatactgcagtgcatgggttgctgcttttcacgggcgtaccccacccctctaagaagtaagaaaaccatgttggtccagaagaatgtgacttccgagtctacatgctgtgtagcaaaatcctataatagagtgaccgtgatgggagggtttaaggttgagaaccacactgcctgtcactgttcaacatgttattaccataagtct

SEQ ID NO: 14954 - DNA, 348 bp, Artificial Sequence
  derived and/or modified sequence
atggattactaccgcaagtacgctgctatattcttggtgactctcagcgtgttcctgcatgtcctccatagcgcacccgacgtgcaagattgtcccgagtgcacactgcaagagaatccattcttcagccaaccaggcgctcccatcttgcaatgcatgggatgctgtttctcgcgcgcctaccctaccccattgcgttcaaagaagaccatgctggtccagaagaacgtgacgtctgagtcgacatgttgcgtggcgaaatcttataaccgcgttacagtaatgggtggttttaaggtcgagaatcacaccgcctgccattgttctacatgctattatcataagtcc

SEQ ID NO: 14955 - DNA, 348 bp, Artificial Sequence
  derived and/or modified sequence
atggactattatcgcaaatacgcagccatcttcttggttacactatctgtgtttctccatgtgctccactccgcccctgacgtgcaggactgtcccgagtgtacgctccaggaaaacccattcttctcccaacccggcgccccgatcctgcagtgtatgggatgttgcttttcccgggcgtatccaacacccctgaggtctaaaaaaaccatgcttgtgcagaaaaatgtgactagcgagtccacttgctgcgtcgccaaaagctataatagggtaaccgttatgggtggatttaaggttgagaaccatactgcctgtcactgttctacatgctactaccacaagtcc

SEQ ID NO: 14956 - DNA, 348 bp, Artificial Sequence
  derived and/or modified sequence
atggattactacaggaaatacgccgccatattcctggtgaccctgagcgtgtttctgcacgtgctccacagcgcacccgacgttcaagactgtccagagtgtacactgcaggagaatccctttttcagtcagccgggggccccaatcctgcaatgtatggggtgctgcttctcaagagcataccccactccactccgatcaaagaagactatgctcgtccagaagaacgtcacctctgagagcacttgctgcgtggccaagtcctacaatagggttacagttatgggagggttcaaagtggaaaatcatactgcctgtcattgtagcacctgctactatcataagagc

SEQ ID NO: 14957 - DNA, 348 bp, Artificial Sequence
  derived and/or modified sequence
atggattattaccgcaagtatgcagcgattttcctggtgaccctgagcgtcttcctgcatgtgctgcattccgctccagacgtgcaggattgccctgaatgcacgctgcaagagaatcctttttttagccagccaggcgccccaattctgcagtgtatgggttgctgtttctcccgcgcatatccaaccccactaagaagcaagaagactatgctggtgcaaaaaaacgtgaccagcgagagtacctgctgtgtggccaagagctacaaccgcgttacggtcatgggtggttttaaggtggaaaatcacacggcatgccattgttccacttgttactaccacaaaagc

SEQ ID NO: 14958 - DNA, 348 bp, Artificial Sequence
  derived and/or modified sequence
atggactattacagaaagtacgctgcgatcttcctggttactcttagtgtgttccttcacgtcctgcacagcgccccagacgtgcaagattgccctgagtgtaccctgcaggagaatccattctttagtcaaccgggagcccccatcttgcagtgtatggggtgctgcttctcgcgggcctaccccaccccactccgcagcaagaaaacgatgctggtccagaagaacgtgaccagcgaatccacgtgttgcgtcgcgaaatcatacaaccgcgtgacggtcatgggaggctttaaggtggaaaatcacactgcatgccattgctccacttgttactaccataaatcg

SEQ ID NO: 14959 - DNA, 348 bp, Artificial Sequence
  derived and/or modified sequence
atggactattataggaagtatgctgctattttcctcgtaactttatccgtctttttgcacgtgctccactctgcccctgacgtacaggattgtcccgagtgtacactgcaggaaaatcctttttttagtcagccaggagcccccattctacaatgtatgggatgctgcttttccagagcctaccccactccactgcgctccaagaagaccatgctcgtgcagaagaacgtgacctccgagtcaacttgctgtgtcgccaaatcatacaaccgggtcaccgttatgggtggatttaaagttgagaaccacaccgcctgccactgctccacatgctactaccataaaagt

SEQ ID NO: 14960 - DNA, 348 bp, Artificial Sequence
  derived and/or modified sequence
atggactactatcgtaagtacgcagctatttttcttgtgacactgtccgtgttcctgcatgtgttgcattccgctcccgacgtgcaagattgtcctgaatgtaccttgcaggagaaccctttcttctcacaaccaggcgctccaatcttgcagtgtatgggctgctgcttcagcagggcatatccaactccactcaggtcaaagaagaccatgctcgtgcaaaaaaacgtaacttccgaatccacctgttgcgtagccaagtcatacaaccgtgtgaccgtcatgggaggctttaaggtcgagaaccataccgcatgtcactgcagtacctgctactaccacaagtcc

SEQ ID NO: 14961 - DNA, 348 bp, Artificial Sequence
  derived and/or modified sequence
atggattactacaggaaatacgcagccattttcctcgtcactctctcagtgttcctccacgtgcttcacagcgcaccagacgtgcaagattgtccagaatgcactctgcaagagaatccttttttctcgcagccaggtgccccaatactgcaatgcatgggatgttgtttttcgagggcatacccaaccccacttcgctccaaaaagacgatgcttgtgcagaaaaacgttacttccgaatcgacctgttgcgtggcaaagtcatacaatagagtgaccgtgatgggaggatttaaggtggagaatcataccgcgtgtcattgctccacttgttactaccacaagtca

SEQ ID NO: 14962 - DNA, 348 bp, Artificial Sequence
  derived and/or modified sequence
atggactattatagaaagtacgctgctatcttcctcgtgaccctctccgtattcctgcacgtgctccatagtgccccagatgttcaggactgcccggaatgtacgttacaggagaatccgttctttagccagccaggtgctccgatactgcagtgtatggggtgctgcttttctcgggcttacccgaccccattaaggtcaaagaaaaccatgctcgttcaaaaaaacgtgacttctgagagcacatgctgtgtggcaaagagttacaaccgggtgacagtgatgggtgggttcaaggtggaaaatcacactgcctgccactgcagcacatgttattaccataagtcc

SEQ ID NO: 14963 - DNA, 348 bp, Artificial Sequence
  derived and/or modified sequence
atggattattacagaaagtatgcggcaatattcctagtaactctgtcggttttccttcatgtgcttcatagtgctccagatgtgcaggattgccctgagtgcactctgcaggaaaaccctttcttttcccagcctggagcccccatactacagtgcatgggatgttgcttcagtcgggcgtatcccacacctctgcgctcaaaaaaaacaatgctcgtgcagaaaaatgtgacatccgaatctacatgttgtgtggcaaagagttataacagggtgacagtgatggggggattcaaagtcgaaaaccacacagcgtgtcactgttcgacttgttattatcataaatct

SEQ ID NO: 14964 - DNA, 348 bp, Artificial Sequence
  derived and/or modified sequence
atggattactacaggaagtacgcagcaatattccttgtgacgttgtcagtgtttctccacgtactgcactccgcacctgacgtgcaagactgtcccgagtgcaccctgcaagaaaatcccttctttagccagcctggtgcccctattttgcagtgtatgggatgttgcttctcacgtgcgtaccctacccctctccgaagcaaaaagactatgcttgtccagaagaacgtgacttcagagtcgacctgctgtgtggccaagagctataatcgcgtcactgtgatgggcgggttcaaggtggaaaaccataccgcttgtcattgctcgacctgttactaccataagtca

SEQ ID NO: 14965 - DNA, 348 bp, Artificial Sequence
  derived and/or modified sequence
atggactattatcggaagtatgccgccatcttcctagttactttgtcggtgttcctgcacgtgctgcattcggctcccgacgttcaggattgcccagagtgtaccctccaagaaaatcccttcttcagccagcccggagctcctatcttgcaatgcatggggtgttgtttctctcgagcctatcctaccccactgcgctccaaaaagactatgctcgtacaaaaaaatgtgacctcagaaagcacttgttgcgtggctaaatcttacaaccgtgtgacagtgatgggtgggttcaaagtcgagaaccataccgcatgtcattgctccacctgttattaccacaagtcc

SEQ ID NO: 14966 - DNA, 348 bp, Artificial Sequence
  derived and/or modified sequence
atggattactaccgaaagtacgcagcaattttcctggtcactctttccgtgtttctgcatgtgctgcactccgccccagatgtccaagactgcccagaatgcaccctgcaagaaaatccttttttctcccagcccggcgcgcctatccttcaatgtatgggttgttgtttctccagggcatacccgactccgctcaggagcaagaaaacgatgcttgtgcagaagaacgtgacttctgagtccacctgctgcgttgcaaagtcatacaatcgagtcactgtgatgggcggttttaaggtggagaaccacaccgcctgccattgttcaacctgttactatcacaagagc

SEQ ID NO: 14967 - DNA, 348 bp, Artificial Sequence
  derived and/or modified sequence
atggactactaccgaaaatacgctgcaatcttcctagtcaccctgagcgtgttcttacacgtgttgcactcagctccggatgtccaggactgtcccgaatgtactctgcaggaaaaccctttcttttcacagcccggcgctcctatcctccagtgtatgggatgttgctttagcagagcttaccccacgcccttgcgatctaagaagactatgttggtgcaaaagaatgtgacgtctgagagtacctgttgtgtggcgaagtcctacaaccgagttaccgtcatgggcggcttcaaggttgaaaaccacaccgcttgccactgcagcacctgttactatcataaatca

SEQ ID NO: 14968 - DNA, 348 bp, Artificial Sequence
  derived and/or modified sequence
atggactactacaggaagtacgcggccattttcctagtcaccctgagtgttttcctccacgttctgcactccgctccagatgttcaagactgtcctgaatgcactctacaggagaacccattcttctcccaaccaggcgctcctatccttcagtgcatgggctgttgcttttcccgggcatacccaacaccgcttcgtagcaagaagaccatgctagtccagaaaaatgtcacttccgaatcaacatgctgtgtggctaaaagctataatcgtgtaaccgttatgggaggttttaaggtggagaatcatactgcctgccactgctccacgtgctattatcacaaaagc

SEQ ID NO: 14969 - DNA, 348 bp, Artificial Sequence
  derived and/or modified sequence
atggactattatcgcaaatatgctgccatattcttggtgaccttaagcgtgtttttgcacgtcctacacagtgctccggatgttcaggactgccccgagtgtacactccaggagaatccattcttttcccagccaggggcacccatactacagtgtatgggctgctgtttcagcagagcctacccgacaccattgaggagcaagaagaccatgctcgtgcaaaaaaatgtcaccagcgaatcaacctgctgtgtagcaaagagctataaccgcgtcactgtaatgggtgggtttaaggttgagaaccacacagcttgccactgctccacctgttattatcataagtca

SEQ ID NO: 14970 - DNA, 348 bp, Artificial Sequence
  derived and/or modified sequence
atggactactaccggaagtacgctgcaatcttcctcgtgactctctcggtctttcttcatgtgctgcattccgccccagatgtgcaagattgtcctgagtgtactctgcaagagaatcccttcttttctcagcctggcgcgccgatcctgcaatgtatggggtgctgttttagccgcgcctatccaacgccgcttagatcgaagaaaactatgctggtccagaagaatgtgacgtcggaatctacctgttgtgtcgcaaagtcctacaacagagtgaccgtgatggggggatttaaggtcgagaaccatactgcatgccactgcagcacctgctactaccataagtct

SEQ ID NO: 14971 - DNA, 348 bp, Artificial Sequence
  derived and/or modified sequence
atggactactacagaaagtatgccgccatcttcttggtaaccctcagcgtattccttcatgtgcttcacagcgcccctgatgtccaggactgccccgagtgtacccttcaggagaacccgtttttttcgcagccgggcgctccgattcttcaatgcatgggctgttgtttttcccgcgcctaccccacacccttacgctccaagaagaccatgttggtccagaagaacgtcacttccgagtcaacctgctgtgtcgccaagagctacaaccgcgtgacggttatgggcggtttcaaggtcgagaaccacacggcctgccactgctctacgtgctactaccacaaaagt

SEQ ID NO: 14972 - DNA, 348 bp, Artificial Sequence
  derived and/or modified sequence
atggattactatcgtaagtatgctgccatattcctcgtaaccctgagcgtgtttctgcacgttctacactctgcaccagacgtgcaggattgcccagagtgtactctgcaggaaaatccctttttctcacagccgggagcacccattctgcagtgcatgggttgttgcttctcccgggcctacccaacacctctgaggagtaaaaaaactatgttggtccagaaaaatgtgaccagcgagagcacgtgctgtgtggctaaatcttacaaccgtgtgaccgttatggggggctttaaggtagagaatcacacggcttgccactgcagtacctgttattaccacaaatca

SEQ ID NO: 14973 - DNA, 348 bp, Artificial Sequence
  derived and/or modified sequence
atggactactaccggaagtatgcagctatttttctagtaaccttgtccgtgttcctgcacgttctccatagtgcccccgatgtgcaggactgtccggagtgcacgctgcaagagaatccattctttagccagcctggcgctccaattctccagtgtatggggtgttgcttttccagggcctaccctactcccctcagatctaagaagaccatgctggtgcagaagaacgttactagcgaaagcacctgttgcgtagctaagagctacaatagagttaccgtgatgggggggtttaaggtggaaaatcatacagcttgtcattgttctacctgctactatcacaagtcc

SEQ ID NO: 14974 - DNA, 348 bp, Artificial Sequence
  derived and/or modified sequence
atggattattatcgcaaatatgctgctatattccttgtcacccttagcgtttttctgcacgtgttacatagtgcaccagatgtacaggattgcccggaatgcacacttcaagaaaacccattttttagccagccaggagcaccaatcctgcagtgcatgggatgttgtttttcgcgagcttatccaacaccccttcgatctaagaaaactatgcttgttcaaaaaaatgtgacgtcggagtccacatgttgtgtggcgaagagctataaccgggttacggttatgggaggctttaaggttgaaaaccacacagcgtgtcattgcagtacatgttattaccataaatcg

SEQ ID NO: 14975 - DNA, 348 bp, Artificial Sequence
  derived and/or modified sequence
atggactactacagaaaatacgccgccatcttcctcgttacattgagcgtctttctccatgtcctccatagtgcgcctgatgtacaagattgccctgagtgcactctgcaggaaaatccctttttttctcagccaggcgcacccatcttacagtgcatgggatgttgcttctcccgggcctacccaacccccctgcgatccaagaagaccatgctggtgcagaagaacgttacatccgagagcacctgttgcgtagcaaaatcctacaacagggttacggtaatggggggcttcaaggtggagaatcataccgcctgccattgcagtacttgttattatcacaaatcc

SEQ ID NO: 14976 - DNA, 348 bp, Artificial Sequence
  derived and/or modified sequence
atggactattacaggaagtatgcagccatcttccttgtaacattatctgtcttcttgcacgtcttgcacagtgcgccagacgtccaggattgcccggaatgcactttacaggaaaacccgttcttctcacaaccaggggctcctatactgcagtgcatgggctgctgcttttcccgggcttaccctacccctctgcgctctaaaaagaccatgctggtgcaaaagaatgtcacgtctgagagcacttgctgtgtggctaagagctacaatcgtgtcacagtcatgggtggtttcaaggtggaaaatcataccgcctgtcattgcagcacttgctactatcataaaagc

SEQ ID NO: 14977 - DNA, 348 bp, Artificial Sequence
  derived and/or modified sequence
atggattactaccgcaagtacgccgcaattttcctggtgaccctgtcagtgtttttgcatgtcctccatagcgccccagacgtccaggactgccctgaatgcaccctgcaggaaaacccgtttttctctcagccgggagccccgatcctccagtgtatgggatgttgcttctccagagcttaccccactccgctgcgcagcaaaaagactatgctggtgcaaaagaacgtgacctccgagtcgacttgttgcgtggccaagtcgtacaacagggtcactgtcatgggaggattcaaggtcgaaaaccacaccgcatgtcactgcagcacgtgttactatcacaagtcg

SEQ ID NO: 14978 - DNA, 348 bp, Artificial Sequence
  derived and/or modified sequence
atggactactatagaaagtacgcagccatctttctggtgaccctttctgttttcctccatgtcctgcattcggcaccagatgtgcaagactgtcctgaatgtacgctccaggagaacccgttcttttcccaaccaggagctcctattcttcaatgtatgggatgttgcttctcccgcgcgtaccccaccccactgcgttcaaaaaagactatgcttgtgcagaagaacgtgacttccgaatctacttgctgtgtggcaaagagctacaatagagtcaccgtcatgggtggcttcaaggtggaaaaccatactgcctgtcactgctccacttgttactatcacaaatcc

SEQ ID NO: 14979 - DNA, 348 bp, Artificial Sequence
  derived and/or modified sequence
atggattattatcgtaaatatgcggcgatatttctagttacgctatcggtatttttacatgttctacattcggcgccggatgtacaagattgtccggaatgtacgctacaagaaaatccgtttttttcgcaaccgggtgcgccgatattacaatgtatgggttgttgtttttcgcgtgcgtatccgacgccgttacgatcgaaaaaaacgatgttagtacaaaaaaatgtaacgtcggaatcgacgtgttgtgtagcgaaatcgtataatcgagttacggtaatgggtggttttaaagtagaaaatcatacggcgtgtcattgttcgacgtgttattatcataaatcg

SEQ ID NO: 14980 - DNA, 348 bp, Artificial Sequence
  derived and/or modified sequence
atggactattatcgtaagtatgccgctatattcctcgttactctgtctgtgttcctgcatgtgctgcactctgctcctgacgtgcaggattgtccagagtgtaccctacaggagaatccattcttcagtcagcctggggcacccatactgcaatgcatggggtgttgcttttccagggcctatcctactcccctgcgatctaaaaagaccatgctggtgcaaaagaatgtgacttcggagtcaacttgctgtgttgccaagagctacaaccgggtaacggtgatggggggtttcaaggtcgagaatcataccgcatgccactgtagtacatgctattaccacaaatct

SEQ ID NO: 14981 - DNA, 348 bp, Artificial Sequence
  derived and/or modified sequence
atggattattatcggaaatatgcagccattttcctggtgactcttagcgtctttttgcacgtacttcattccgcccctgatgtgcaggactgccccgagtgtaccctacaggaaaacccattcttcagtcaacccggcgctccaatcctgcagtgtatgggctgctgtttcagtagggcatatccgactcccctgcgtagcaagaagacaatgttggtccagaaaaatgtgacatccgaatccacatgctgtgtggctaagtcatacaacagggtcacagtgatgggcggtttcaaagtcgaaaatcacactgcctgtcattgttctacatgttattaccataagtcc

SEQ ID NO: 14982 - DNA, 348 bp, Artificial Sequence
  derived and/or modified sequence
atggattactacaggaaatatgcagcgattttcctggttacattgtctgtcttcctgcatgtgctccactcggccccggacgtgcaggattgtcccgaatgcacacttcaagagaatccttttttttctcaaccgggggctcctatcctacagtgcatgggctgctgtttctctagggcataccctacgccccttaggtccaaaaagactatgctggtccagaagaatgtaacctcagagagcacatgctgtgtggcgaaatcatacaacagagtgacagtgatgggcggattcaaggtcgagaaccatactgcttgtcactgctctacttgttactaccacaagagc

SEQ ID NO: 14983 - DNA, 348 bp, Artificial Sequence
  derived and/or modified sequence
atggactactatcggaaatacgcagcgatctttctggtaactctgagcgtgttccttcatgttctccattcagcgccggatgtgcaagactgcccagaatgtaccctgcaagaaaaccccttcttctctcagccgggagcgccgatcctgcagtgtatggggtgttgcttttcgagagcctacccaactcccttgaggtccaagaaaactatgctggttcagaagaatgtcacctcggagtcgacctgctgcgtcgccaaaagctacaatagagtgactgtcatggggggtttcaaggtggagaaccacaccgcctgccattgctccacctgctattaccacaagagc

SEQ ID NO: 14984 - DNA, 348 bp, Artificial Sequence
  derived and/or modified sequence
atggactattacagaaagtacgcagccatcttcctcgttactctttcagtgttcctgcacgtgctgcatagcgcgcctgacgtccaagactgtccagaatgcaccctgcaagaaaacccattcttctcccagccaggagcccccattttgcagtgtatgggatgctgcttcagccgggcatacccgaccccgttgcgttccaagaaaactatgctcgttcagaagaacgtgaccagcgagtcaacctgttgcgtggcgaaatcgtacaaccgagtgacggtgatggggggatttaaggtggagaatcatactgcgtgccactgttccacctgttactaccacaaaagc

SEQ ID NO: 14985 - DNA, 348 bp, Artificial Sequence
  derived and/or modified sequence
atggactactatcggaagtacgcagccatctttctagtgactctgtccgtcttcctacacgttctgcacagtgctcccgacgtacaggattgcccagagtgtaccctgcaagaaaaccccttttttagccagccaggagctcccatccttcagtgcatgggctgttgcttctcacgtgcttaccccacacccttacggtctaagaagaccatgttagtacagaagaacgttactagcgagtctacttgctgcgtagccaagtcttacaatcgggtgaccgtcatggggggcttcaaggtggagaatcataccgcatgccactgcagtacttgctattatcacaaatca

SEQ ID NO: 14986 - DNA, 348 bp, Artificial Sequence
  derived and/or modified sequence
atggattactatcgcaagtacgcagcgatatttctggtgaccctgtccgtttttcttcatgtgcttcattcagcacctgacgtgcaagactgtcctgaatgcaccctccaggaaaacccatttttctcccaacctggagcgcctatcctgcaatgtatgggatgttgtttcagcagggcctaccccactcctctgcgatccaagaaaaccatgcttgtgcaaaagaacgtgacctcagagagcacgtgttgtgtggcaaagtcttacaatagagtcaccgtcatgggtgggtttaaggtggagaaccacactgcatgtcactgcagcacctgctactaccacaagagc

SEQ ID NO: 14987 - DNA, 348 bp, Artificial Sequence
  derived and/or modified sequence
atggactactataggaagtacgccgctatcttcctagtgacgctgtccgtctttctgcacgtcttgcacagcgccccagatgtgcaagactgtccagagtgcacattgcaggagaatccattttttagccaacctggggctcccatcctccagtgcatgggatgttgcttcagccgagcgtatcccactccactccgatccaaaaaaacaatgctggtacagaaaaatgtgacatcagaaagcacatgttgtgtagctaagtcgtacaaccgggttacggtgatgggggggttcaaagtcgaaaatcatactgcctgccactgctctacttgctactatcataagagt

SEQ ID NO: 14988 - DNA, 348 bp, Artificial Sequence
  derived and/or modified sequence
atggattattacaggaaatacgcggctatatttctggtcactctctctgtcttcctccatgtgctgcacagcgctcctgacgttcaggactgtccagaatgtaccctccaggagaatcctttcttttctcagcccggagcacctatccttcagtgtatgggatgttgcttttctcgggcttaccctacccccctcagatccaaaaagactatgctcgtacagaagaatgtaaccagcgagtcaacctgctgtgtcgctaaaagctacaaccgagtgaccgtcatgggggggttcaaggtggagaatcacactgcctgccactgcagtacctgctactatcacaagagt

SEQ ID NO: 14989 - DNA, 348 bp, Artificial Sequence
  derived and/or modified sequence
atggactactatagaaaatacgcagcaatcttcctggtgaccctctccgtgtttctccacgtcctccacagcgccccagacgtgcaagattgtcccgaatgcacgctgcaggaaaacccgttcttctcgcagccgggcgctccgattttgcaatgcatgggatgctgtttttcgcgggcctacccaactcctctccgttcgaagaagactatgctggtacagaagaacgttaccagcgagtccacctgctgcgtggccaagtcatacaatcgcgtgactgttatgggagggttcaaggtggagaatcataccgcgtgtcactgctccacttgctactaccacaaaagc

SEQ ID NO: 14990 - DNA, 348 bp, Artificial Sequence
  derived and/or modified sequence
atggattactatcgcaaatatgcggctatattcctggttaccctgtcggtcttcttgcatgtactgcactctgccccagacgttcaggactgtcctgagtgcacactgcaggaaaatccttttttcagccagcctggtgcacccattctacaatgcatgggctgctgttttagccgcgcttatcctacccccctaaggtccaagaagactatgctggttcagaaaaacgtgacatcagaaagcacttgctgcgtggctaagtcgtacaacagagtcacagttatgggcgggtttaaggtcgagaatcacacagcgtgccattgtagtacatgttactaccataaaagt

SEQ ID NO: 14991 - DNA, 348 bp, Artificial Sequence
  derived and/or modified sequence
atggactactacaggaagtacgcagccattttcctggtgactctgtcggtgtttctccatgtcctgcactcggccccagatgtacaggattgtccggaatgcacgttgcaagagaacccgttcttctcacagcccggagccccgatcctccaatgcatgggctgttgtttcagtagagcctatccaacccccctgcggtcgaagaaaaccatgcttgtgcagaaaaatgtgacctcagagagcacttgctgtgtagcgaagtcttacaaccgcgttaccgtcatgggagggtttaaggtggaaaaccacactgcatgccactgctccacttgctactaccacaagtca

SEQ ID NO: 14992 - DNA, 348 bp, Artificial Sequence
  derived and/or modified sequence
atggattactacagaaaatatgcggccatcttcctggtgacactgagcgtgtttctgcacgtgcttcattctgctcctgatgtgcaggattgcccagagtgcaccctccaggagaatccattttttagccagcctggcgcccccatcttgcagtgcatggggtgttgcttcagcagagcttaccccacgcccctcagatccaaaaagacgatgctagttcagaaaaatgtcacctccgagagtacatgttgcgtcgccaagagctacaatcgcgtcactgtgatgggcggcttcaaagtcgagaaccacacggcctgtcattgcagtacctgttactatcacaagtct

SEQ ID NO: 14993 - DNA, 348 bp, Artificial Sequence
  derived and/or modified sequence
atggactactatcgaaagtatgcagccatctttctggtaactctgtctgttttcctgcacgtcctgcattcagctcccgatgttcaggattgcccagagtgtaccttacaggagaacccattcttttcacagcccggcgctcccattctgcaatgtatgggatgctgtttttcaagggcgtaccccacgcccctgaggagcaagaaaaccatgctggtccagaagaacgtaacctcagagagcacctgttgtgtggccaagagttacaatcgagtcaccgtgatgggggggttcaaggttgaaaaccacacggcatgtcactgctccacttgttattaccataagtcc

SEQ ID NO: 14994 - DNA, 348 bp, Artificial Sequence
  derived and/or modified sequence
atggactactacagaaaatatgccgccatcttcttggttaccctgagtgttttcctccacgtcttgcacagtgcccctgacgtgcaggattgtccagagtgtactcttcaggaaaatccgttttttagccaacctggagcacctattttgcagtgcatgggctgctgtttttccagggcctacccgaccccgctgcggagcaagaaaaccatgctcgtccagaaaaacgtgaccagtgaatccacctgctgcgtggcaaagtcgtataaccgggtgaccgtcatgggcggcttcaaggttgaaaatcacacagcttgtcactgttctacatgctactatcacaaatca

SEQ ID NO: 14995 - DNA, 348 bp, Artificial Sequence
  derived and/or modified sequence
atggactactatcggaaatacgcggcgatctttcttgtcactctgtccgtgtttcttcatgtgctccattcagccccagatgtgcaggattgtcctgagtgtacgcttcaggaaaacccatttttcagccaacccggggccccaattttgcaatgtatgggatgttgcttttccagagcctaccctacccctctgcgtagcaaaaagacgatgctggtgcaaaagaacgtcacctcagaatcgacttgctgtgtcgcaaaatcgtacaacagagtcactgtgatggggggattcaaggtcgaaaatcacactgcatgccattgttctacctgctactaccacaagtcc

SEQ ID NO: 14996 - DNA, 348 bp, Artificial Sequence
  derived and/or modified sequence
atggattattatagaaaatatgctgcgatttttctcgtaactttatcagtattcctccatgtgctccattctgcccccgatgtccaggattgcccagaatgcacgctccaggagaatccttttttttcacagccaggggcacccatactacagtgtatgggatgttgcttttcacgggcatatcctactccactcagatccaaaaagacgatgttagtacagaaaaatgtcacttcggaatctacttgctgcgtggcaaaaagttataaccgagttacagtaatgggaggattcaaagtggaaaatcatacagcatgccattgtagtacttgttattatcataaatct

SEQ ID NO: 14997 - DNA, 348 bp, Artificial Sequence
  derived and/or modified sequence
atggactactacaggaaatacgccgccattttcctggttaccttgagtgtgttcctgcatgtactccactccgcacccgacgttcaggactgccccgaatgtactctgcaggaaaaccccttcttttcccagcccggtgcgccaattctgcagtgcatgggctgttgcttcagccgcgcttaccccacaccattgaggtccaaaaaaaccatgctggtccagaaaaatgtcacatcagaatctacttgttgcgtcgccaagtcctacaacagagtcactgtgatgggcggtttcaaagtggaaaaccacaccgcctgccattgctctacctgctactaccataagtcc

SEQ ID NO: 14998 - DNA, 494 bp, Artificial Sequence
  derived and/or modified sequence
gggaaataagagagaaaagaagagtaagaagaaatataagagccaccatggactactataggaagtacgctgcaatctttctcgtaacactttcagtctttctccatgtgctgcattcggcccctgatgtgcaagactgtccagaatgcacgctgcaagagaacccgttcttcagccagcccggagcgcccattttgcagtgtatggggtgttgcttttcacgggcctatccgacgccccttagatcgaagaaaaccatgttggtgcagaagaacgtaacctcggagtccacttgttgcgtggcgaaatcgtacaatcgcgtaacagtcatgggcggtttcaaggtcgaaaatcacacagcgtgccactgcagcacgtgttactatcacaaatcctgataagctgccttctgcggggcttgccttctggccatgcccttcttctctcccttgcacctgtacctcttggtctttgaataaagcctgagtaggaag

SEQ ID NO: 14999 - DNA, 351 bp, Artificial Sequence
  derived and/or modified sequence
atggactactacagaaagtacgccgccatcttcctggtgaccctgagcgtgttcctgcacgtgctgcacagcgcccccgacgtgcaggactgccccgagtgcaccctgcaggagaaccccttcttcagccagcccggcgcccccatcctgcagtgcatgggctgctgcttcagcagagcctaccccacccccctgagaagcaagaagaccatgctggtgcagaagaacgtgaccagcgagagcacctgctgcgtggccaagagctacaacagagtgaccgtgatgggcggcttcaaggtggagaaccacaccgcctgccactgcagcacctgctactaccacaagagctag

SEQ ID NO: 15000 - DNA, 351 bp, Artificial Sequence
  derived and/or modified sequence
atggattactatagaaaatacgctgccatcttcctggtgacgctcagcgtgttcctccacgtgttacattctgcacccgatgtgcaggactgtcctgagtgcactctgcaggagaacccgttcttttcacagcccggcgctccaatcctccagtgcatgggctgctgtttttcccgggcttaccccacccccctgagatctaaaaaaactatgcttgtgcaaaagaacgtgacatctgaatctacctgttgcgtggctaagtcatacaacagggtcacagtcatgggtgggttcaaagtggagaaccacaccgcatgtcactgtagcacatgttattatcataagtcatag

SEQ ID NO: 15001 - DNA, 351 bp, Artificial Sequence
  derived and/or modified sequence
atggactactacagaaaatatgctgccatcttcctggtgaccctgagcgtcttcctgcacgtgctgcacagcgccccagatgtgcaggactgcccagaatgtaccctgcaggagaaccccttcttcagccagcccggggcccccatcctgcagtgcatgggctgctgcttcagccgggcctaccccacccccctgcggagcaagaagaccatgctggtgcagaagaatgtgaccagcgagagcacctgctgcgtggccaagagctacaacagagtgacagtgatgggcggcttcaaggtggagaaccacacagcctgccactgcagcacctgctactaccacaagagctag

SEQ ID NO: 15002 - DNA, 351 bp, Artificial Sequence
  derived and/or modified sequence
atggactactaccggaagtacgccgccatcttcctggtgaccctgagcgtttttctacatgtgctccacagcgcccccgacgtacaggactgtccagaatgcactcttcaggagaacccattctttagccagccaggagccccaattctgcagtgtatgggctgttgtttttccagggcctatcccacccccttaagaagcaaaaagactatgcttgtccagaaaaacgtgactagtgagtccacctgctgcgtcgctaagtcctacaatcgggtgaccgtgatgggcgggtttaaggtggaaaaccacactgcttgccactgctcaacatgctactatcacaagagttag

SEQ ID NO: 15003 - DNA, 710 bp, Artificial Sequence
  derived and/or modified sequence
gcagttactgagaactcataagacgaagctaaaatccctcttcggatccacagtcaaccgccctgaacacatcctgcaaaaagcccagagaaaggagcgccatggattactacagaaaatatgcagctatctttctggtcacattgtcggtgtttctgcatgttctccattccgctcctgatgtgcaggattgcccagaatgcacgctacaggaaaacccattcttctcccagccgggtgccccaatacttcagtgcatgggctgctgcttctctagagcatatcccactccactaaggtccaagaagacgatgttggtccaaaagaacgtcacctcagagtccacttgctgtgtagctaaatcatataacagggtcacagtaatggggggtttcaaagtggagaaccacacggcgtgccactgcagtacttgttattatcacaaatcttaaatgttttaccaagtgctgtcttgatgactgctgattttctggaatggaaaattaagttgtttagtgtttatggctttgtgagataaaactctccttttccttaccataccactttgacacgcttcaaggatatactgcagctttactgccttcctccttatcctacagtacaatcagcagtctagttcttttcatttggaatgaatacagcatttagcttgttccactgcaaataaagccttttaaatcatcattcaa

SEQ ID NO: 15004 - DNA, 351 bp, Artificial Sequence
  derived and/or modified sequence
atggactattacagaaaatacgctgccatcttcctcgtcactttgtccgtttttctgcatgtcctgcacagcgccccagacgttcaggactgccctgagtgtactttgcaggagaaccccttcttctctcaacccggagcacctatcctgcagtgtatgggctgttgtttttcaagggcatacccaacccctctccggtcaaagaagaccatgctggtgcagaagaatgtcacttctgaaagcacctgttgtgtggcgaagagctacaatagagtgaccgttatgggaggtttcaaagtggaaaatcacacagcctgccactgctctacatgttactaccacaaatcttag

SEQ ID NO: 15005 - DNA, 351 bp, Artificial Sequence
  derived and/or modified sequence
atggattactacaggaagtacgctgctatctttctcgtcacgttgagcgtctttcttcacgtcctccacagcgcccctgatgtacaggattgcccagaatgtaccttgcaagagaatccattcttcagccagccaggcgcacccatcttacagtgtatgggttgctgcttctcccgggcctatcccactcctctccggtctaagaaaacaatgctggtacagaagaatgttaccagtgagtctacctgttgtgtcgcaaaatcctacaaccgggttactgtcatgggcggcttcaaagtcgaaaaccacactgcctgccattgttctacatgctattaccacaagagctag

SEQ ID NO: 15006 - DNA, 351 bp, Artificial Sequence
  derived and/or modified sequence
atggactattatcgaaagtacgccgcaattttcttggtaaccctgagcgtattcttgcatgtgcttcattccgctccagacgtacaggactgtccagaatgtactctccaggagaacccctttttctctcaaccaggcgctcccattctccagtgcatgggctgttgtttctcgcgagcgtatccgaccccgctgaggtcaaagaaaacaatgctggtacagaagaacgttacctctgaatcaacatgttgtgttgctaaatcatataacagggtgacagtaatgggcggatttaaggtcgagaaccacactgcctgccattgttccacatgttattaccataagtcttag

SEQ ID NO: 15007 - RNA, 494 nt, Artificial Sequence
  derived and/or modified sequence
gggaaauaagagagaaaagaagaguaagaagaaauauaagagccaccauggacuacuauaggaaguacgcugcaaucuuucucguaacacuuucagucuuucuccaugugcugcauucggccccugaugugcaagacuguccagaaugcacgcugcaagagaacccguucuucagccagcccggagcgcccauuuugcaguguaugggguguugcuuuucacgggccuauccgacgccccuuagaucgaagaaaaccauguuggugcagaagaacguaaccucggaguccacuuguugcguggcgaaaucguacaaucgcguaacagucaugggcgguuucaaggucgaaaaucacacagcgugccacugcagcacguguuacuaucacaaauccugauaagcugccuucugcggggcuugccuucuggccaugcccuucuucucucccuugcaccuguaccucuuggucuuugaauaaagccugaguaggaag

SEQ ID NO: 15008 - RNA, 351 nt, Artificial Sequence
  derived and/or modified sequence
auggauuacuacaggaaguacgcugcuaucuuucucgucacguugagcgucuuucuucacguccuccacagcgccccugauguacaggauugcccagaauguaccuugcaagagaauccauucuucagccagccaggcgcacccaucuuacaguguauggguugcugcuucucccgggccuaucccacuccucuccggucuaagaaaacaaugcugguacagaagaauguuaccagugagucuaccuguugugucgcaaaauccuacaaccggguuacugucaugggcggcuucaaagucgaaaaccacacugccugccauuguucuacaugcuauuaccacaagagcuag

SEQ ID NO: 15009 - RNA, 351 nt, Artificial Sequence
  derived and/or modified sequence
auggacuauuaucgaaaguacgccgcaauuuucuugguaacccugagcguauucuugcaugugcuucauuccgcuccagacguacaggacuguccagaauguacucuccaggagaaccccuuuuucucucaaccaggcgcucccauucuccagugcaugggcuguuguuucucgcgagcguauccgaccccgcugaggucaaagaaaacaaugcugguacagaagaacguuaccucugaaucaacauguuguguugcuaaaucauauaacagggugacaguaaugggcggauuuaaggucgagaaccacacugccugccauuguuccacauguuauuaccauaagucuuag

SEQ ID NO: 15010 - protein, 590 aa, Artificial Sequence
  derived and/or modified sequence
MTLHNNSTTSPLFPNISSSWIHSPSDAGLPPGTVTHFGSYNVSRAAGNFSSPDGTTDDPLGGHTVWQVVFIAFLTGILALVTIIGNILVIVSFKVNKQLKTVNNYFLLSLACADLIIGVISMNLFTTYIIMNRWALGNLACDLWLAIDYVASNASVMNLLVISFDRYFSITRPLTYRAKRTTKRAGVMIGLAWVISFVLWAPAILFWQYFVGKRTVPPGECFIQFLSEPTITFGTAIAAFYMPVTIMTILYWRIYKETEKRTKELAGLQASGTEAETENFVHPTGSSRSCSSYELQQQSMKRSNRRKYGRCHFWFTTKSWKPSSEQMDQDHSSSDSWNNNDAAASLENSASSDEEDIGSETRAIYSIVLKLPGHSTILNSTKLPSSDNLQVPEEELGMVDLERKADKLQAQKSVDDGGSFPKSFSKLPIQLESAVDTAKTSDVNSSVGKSTATLPLSFKEATLAKRFALKTRSQITKRKRMSLVKEKKAAQTLSAILLAFIITWTPYNIMVLVNTFCDSCIPKTFWNLGYWLCYINSTVNPVCYALCNKTFRTTFKMLLLCQCDKKKRRKQQYQQRQSVIFHKRAPEQAL

SEQ ID NO: 15011 - protein, 110 aa, Artificial Sequence
  derived and/or modified sequence
MTLHNNSTTSPLFPNISSSWIHSPSDAGLPPGTVTHFGSYNVSRAAGNFSSPDGTTDDPLGGHTVWQVVFIAFLTGILALVTIIGNILVIVSFKVNKQLKTVNNYFLLSL

SEQ ID NO: 15012 - DNA, 510 bp, Artificial Sequence
  derived and/or modified sequence
atgctgccctcaactatgtttctggtgcatctgccgttatccacaaataggctccactgtttacgtaacaccagcctggaatcgtacctgtgctccttcgtgcacctaaatcacccactgcacatctcggaccgggtgatactcatttccctgcatgaggcagtcaggttttccttcgcgttctcttttccacgtggtaccctgtcaattgcttattgcctgatgtcttctgtttcaacttccagcgaagctattatgagcaccgagcttctggctaattactgtcatagctcgttgcacgtctgtatctgtatctcttcatttcctaacgaaacaggcaatcacgattcatttcccggtgccgtggtgtccatcagcgatcaacctacggatcagtgcaaactagctgccaaagagctgcctctccgaaaccttttggaatgtcgatttttcgactgcatgggggaagaagaccttattaacctgggcgtgatcggcacagaacggtag

SEQ ID NO: 15013 - DNA, 1773 bp, Artificial Sequence
  derived and/or modified sequence
atgacactgcataataattcaaccacatcacccctcttcccaaacatctcatcgtcctggattcattccccctccgacgcgggcttgccgcctggaacagtaactcacttcggctcttataacgtttcacgggccgctggaaacttcagctccccagatggtaccacagatgatcccttgggaggccataccgtatggcaggtggtatttatcgcttttttgactgggatcctggcgcttgtcactattatcgggaacattctcgtgatagtgagttttaaagtcaataagcagctaaagacagtgaacaactatttcctcctgtcactggcgtgtgctgacctaatcatcggcgttatctcaatgaatcttttcactacgtacatcattatgaacaggtgggcacttggcaacctggcctgtgacctctggctcgcaatagattatgtggccagtaatgcttcagtaatgaatctgctcgtgatctccttcgaccggtatttcagtattacaaggcctctcacctatcgggctaagagaacaaccaagcgcgctggtgtcatgatcgggctggcctgggtaatcagttttgtcttgtgggctccagccatcctgttctggcagtatttcgtggggaaacggaccgtgcccccaggagaatgtttcatacagtttctctccgagcctactatcacctttggcacggccatcgccgcattctacatgcccgtgaccatcatgaccatcctctactggcgtatttacaaggagacagaaaagagaaccaaggaactggccggcctccaggcctctggaactgaagctgaaactgagaacttcgtgcatcccactggcagcagcaggagctgcagctcctatgaattgcagcagcagtccatgaagcgatccaacaggcggaagtatggccgatgtcacttctggtttacaactaagtcatggaagccctcgagtgagcagatggatcaagatcattcatccagtgattcatggaacaataacgatgctgctgcgtctctggagaactctgcctcatcagatgaggaggacatcggatccgaaaccagagcaatctattccatagtgctcaagctacccggacattctaccatactgaatagcaccaaactgccaagcagcgataacctgcaggtgcccgaggaagagcttgggatggtggatctggaacggaaggcagacaagctgcaagcccagaaaagcgtggatgatggtggaagtttccccaaaagtttcagtaaacttcctattcaactggagtccgccgtcgatacagccaagacaagtgacgttaactcatctgtaggcaaaagtactgctacactgccactcagcttcaaggaggccacgttggcgaagaggttcgcccttaagactcgttctcagatcactaagagaaagaggatgagtctagtgaaggaaaagaaggctgcccagacattgtcggccatcctgctagcattcatcataacgtggacgccttacaacattatggtattggtaaatacattctgcgacagttgtattcccaagaccttttggaacctgggatactggctgtgctatatcaatagcacagtcaatcctgtttgctacgctctctgcaacaaaacattccgcacaacctttaagatgctccttctctgtcagtgcgataaaaaaaaacgaagaaagcagcagtatcagcagagacagagcgtgatcttccataagagagcacccgagcaggctctctag

SEQ ID NO: 15014 - DNA, 333 bp, Artificial Sequence
  derived and/or modified sequence
atgactttgcacaataactcaacgaccagcccactgttccccaatataagctctagctggatccatagtccatcagatgccggactgcctcctggcaccgtgacacactttggcagttacaacgtttctcgtgccgctggaaactttagttcgccagacgggaccacagatgaccctctgggcgggcacacagtctggcaggtggtttttatagcgttcctgaccggtattcttgcattagtgacaatcatcggtaacattcttgtcattgttagcttcaaagtgaacaaacagctgaagaccgtcaataactatttcttattatccctttag

SEQ ID NO: 15015 - DNA, 1773 bp, Artificial Sequence
  derived and/or modified sequence
atgaccctgcacaacaacagcaccaccagccccctcttccccaacatcagcagctcctggatccacagccccagtgatgctggcctgcccccaggcaccgtgacccacttcggcagctacaacgtgtccagagctgctggcaacttcagcagcccagatggcaccacagatgaccccctgggcggccacacagtgtggcaggtggtgttcatcgccttcctgaccggcatcctggccctggtgaccatcatcggcaacatcctggtgattgtgtccttcaaggtgaacaagcagctgaagacagtgaacaactacttcctgctgagcctggcctgtgccgacctgatcattggagtcatctccatgaacctcttcaccacctacatcatcatgaaccgctgggccctgggcaacctggcctgtgacctgtggctggccattgattatgtggccagcaatgcctctgtgatgaacctgctggtgatcagctttgaccgctacttcagcatcacccggcccctgacctaccgggccaagaggaccaccaagagagctggggtgatgattggcctggcctgggtgatcagctttgtgctgtgggccccagccatcctcttctggcagtactttgtgggcaagaggacagtgcccccaggagagtgcttcatccagttcctgtctgagcccaccatcacctttggaacagccatcgccgccttctacatgcctgtgaccatcatgaccatcctgtactggaggatctacaaggagacagagaagaggaccaaggagctggccggcctgcaggccagcggcacagaagctgagacagagaactttgtgcaccccaccggcagcagccgcagctgcagcagctatgagctgcagcagcagagcatgaagaggagcaacagaagaaaatatggccgctgccacttctggttcaccaccaagtcctggaagcccagcagcgagcagatggaccaggaccacagcagcagtgacagctggaacaacaatgatgctgctgccagcctggagaacagcgccagcagtgatgaagaagatattggcagcgagacccgggccatctacagcatcgtgctgaagctgcccggccacagcaccatcctgaacagcaccaagctgcccagcagtgacaacctgcaggtgcctgaggaggagctgggcatggtggacctggagaggaaggctgacaagctgcaggcccagaagtctgtggatgatggcggcagcttccccaagagcttcagcaagctgcccatccagctggagagcgctgtggacacagccaagaccagtgatgtgaacagctctgtgggcaagagcacagccaccctgcccctgtccttcaaggaggccaccctggccaagagatttgccctgaagaccaggagccagatcaccaagaggaagaggatgagcctggtgaaggagaagaaggccgcccagaccctgagcgccatcctgctggccttcatcatcacctggaccccctacaacatcatggtgctggtgaacaccttctgtgacagctgcatccccaagaccttctggaacctgggctactggctgtgctacatcaacagcacagtgaaccctgtgtgctacgccctgtgcaacaagaccttccgcaccaccttcaagatgctgctgctgtgccagtgtgacaagaagaagaggaggaagcagcagtaccagcagaggcagagcgtcatcttccacaagagggcccctgagcaggccctgtag

SEQ ID NO: 15016 - DNA, 333 bp, Artificial Sequence
  derived and/or modified sequence
atgaccctgcacaacaacagcaccaccagccccctcttccccaacatcagcagctcctggatccacagccccagtgatgctggcctgcccccaggcaccgtgacccacttcggcagctacaacgtgtccagagctgctggcaacttcagcagcccagatggcaccacagatgaccccctgggcggccacacagtgtggcaggtggtgttcatcgccttcctgaccggcatcctggccctggtgaccatcatcggcaacatcctggtgattgtgtccttcaaggtgaacaagcagctgaagacagtgaacaactacttcctgctgagcctgtag

SEQ ID NO: 15017 - DNA, 1773 bp, Artificial Sequence
  derived and/or modified sequence
atgaccctgcacaacaacagcaccaccagccccctgttccccaacataagctcatcctggatccactctccctcagatgccggcctcccaccagggactgtaacgcacttcggtagctacaacgtgtcaagggcagccggaaacttttctagtccggacgggacgacagatgatccactgggaggacacactgtgtggcaagtggtgtttatcgcattcttgacaggcatcctggcccttgtcacaattattggaaacatcttagttatcgtcagcttcaaagtgaacaaacagctgaagacagtgaataattactttctgttaagcctcgcttgtgccgatctcatcatcggagtgatttccatgaacctctttaccacctacatcattatgaaccgatgggctctgggtaaccttgcgtgcgacctctggcttgctatagattatgtggcctcgaacgccagcgtgatgaatctccttgtcatcagtttcgatagatactttagcatcactcgacccctaacttaccgggcgaagagaacaacaaagcgggctggggttatgatcggcctcgcttgggtaatcagcttcgttctgtgggcaccagccattttattctggcagtacttcgttggaaaacgcaccgtgccgcccggggagtgttttatccagttcttaagcgaaccaactatcacattcggtaccgcaattgcagcattctacatgcctgtaactatcatgaccattctctactggaggatttacaaggagacagagaagagaaccaaggaactcgcgggtctgcaggcctcagggactgaagctgagacagagaacttcgtgcaccccactggcagcagccgtagctgttcctcctatgagctgcagcagcagtccatgaagcggtccaatagacgcaaatatggacggtgccacttctggttcacgaccaaatcttggaagccatcttcagagcagatggaccaggaccattcttcttcagatagctggaacaacaatgacgctgctgccagcctcgagaattccgctagctctgacgaagaggatattggctcagagactcgcgccatctattctatcgtgctgaagctgcccggacactctactattttaaactcaaccaagctccctagcagtgataatctccaagtgccagaggaagaactaggaatggtggaccttgagcgcaaagccgataaattacaggcccagaagagcgtggacgacggaggcagcttccctaaatccttcagcaaactgcctatccagttggagtccgcggtggacactgccaaaaccagcgatgtgaacagcagcgtgggaaagtccacagccacccttcccctgtctttcaaggaggccacactagcaaagaggtttgcactgaaaacccgttcacaaatcacaaaacggaaacgaatgtctctggtgaaggaaaaaaaagccgcccagaccctttccgctatcctcttggcgttcattattacttggaccccttataacatcatggtgctcgtcaataccttttgcgatagctgtatacctaagacgttttggaacctggggtattggttatgttatatcaacagcactgtgaatcccgtgtgctatgcgctgtgtaacaagacatttagaaccacatttaaaatgttacttctctgccagtgtgacaagaagaagagaagaaagcaacagtatcagcagaggcaatcagtaatttttcacaagcgggcgcccgaacaggcactgtag

SEQ ID NO: 15018 - DNA, 333 bp, Artificial Sequence
  derived and/or modified sequence
atgaccctgcacaacaacagcaccaccagccccctgttccccaacatttcctcgtcttggatccacagtccatccgacgccggcctcccccctggcactgtgactcacttcgggtcttataatgttagccgagccgcaggaaacttttcttctcctgacggcacaactgacgacccccttggtggccacacggtctggcaggtcgtcttcatcgcatttctgacagggattctggctctggtgacaatcattggcaatatattagtgatcgttagctttaaggtcaataagcaactcaagaccgtgaacaattactttttgcttagcttgtag

SEQ ID NO: 15019 - DNA, 1773 bp, Artificial Sequence
  derived and/or modified sequence
atgacgttacacaacaattctacgaccagtcctttgtttcctaacatttcttcatcttggattcacagccctagcgacgctggtctgcccccaggcactgtgacccattttggatcctacaatgtatcgcgagccgctgggaatttttcttccccagatggtaccactgacgatcctctgggcggacatacagtgtggcaggtggtattcattgcgttcctgaccgggatcctggccctagtcaccattatcggaaacatcttagtcatcgtgtctttcaaagtaaataaacagctcaaaacggtgaacaattactttcttttaagtctggcctgtgcagacctcattattggggtcatttctatgaacttgtttactacgtacatcattatgaaccgatgggctttggggaatctggcatgtgacctctggctggctattgattacgtcgctagcaatgctagcgtgatgaaccttctggttattagcttcgaccgctacttctctatcactagaccattgacgtaccgcgcaaaaaggaccacgaagcgggctggcgtaatgatcggtctagcctgggtaatttcctttgtgctgtgggccccagcaatcctattctggcaatactttgtcggcaaaagaacagtgccacctggggagtgtttcatccaatttctgagcgaacctacaatcacctttgggacagcaattgccgctttctacatgccggtgaccatcatgaccatcttatactggcgtatctacaaagaaaccgaaaaaaggaccaaagaactcgctggcttgcaggccagtggcactgaagccgaaacagaaaactttgttcaccctaccggctcttcgcgctcttgtagttcgtatgaattacagcaacagagtatgaaacgcagtaatcgccgtaagtacgggcgatgccacttctggttcaccaccaagagctggaagccttcgagtgagcagatggatcaggaccatagttcttcagacagctggaacaataatgacgcagctgcaagcttggaaaattcggcctcaagtgacgaagaagatattggaagcgaaactagggctatctattccatagtgctaaaactgcccggtcactccaccatacttaatagtacaaaactccccagttctgacaatctgcaggttcccgaggaagagcttggaatggtcgatctggaaagaaaagccgataaactccaggcccagaagagtgtcgacgatggcggtagttttccgaagagcttctccaaactccccatccaactggaaagcgctgtggacaccgccaagacaagcgacgttaactcctctgtcgggaagagcacggccaccctacccctgagtttcaaggaggctacccttgctaagcgctttgccctgaagacacgatcccagatcaccaaacgtaaacgaatgtctctagtcaaagagaaaaaagccgctcaaactttgtctgccatcctgctcgcgttcatcattacctggacaccctacaacattatggtcttggtaaacaccttttgtgactcatgtatccccaaaacgttctggaatttaggatactggctatgctatattaattccaccgtgaatccagtctgttacgccctctgtaataaaactttcaggaccacattcaaaatgctgttattgtgccaatgcgataaaaagaagcggcgaaagcagcagtatcagcagcggcagtctgtgattttccacaagcgcgcaccggaacaggccctctag

SEQ ID NO: 15020 - DNA, 333 bp, Artificial Sequence
  derived and/or modified sequence
atgaccttgcacaataacagcactacaagcccactgttccccaatatcagcagctcttggatacatagtccttccgacgccggtttaccaccaggtaccgtgacacatttcgggtcctacaatgtatcaagagccgcaggcaattttagctcacctgacggcactaccgacgatcccttgggcggacacacagtgtggcaggtggtttttatcgctttcctcaccggcattctagcactggtcactatcatcggaaatatcctggtcatcgtgagcttcaaagtaaataagcagttaaaaacagtcaataattacttcctccttagcctgtag

SEQ ID NO: 15021 - DNA, 8778 bp, Artificial Sequence
  derived and/or modified sequence
gggcaatggcgggcgcccctcccccagcctcgttgccgccttgcagtttgatctcagactgctgtgctagcaatcagcgagactccgtgggcgtaggaccctccgagccaggtgtgggatatagtctcgtggtgcgccgtttcttaagctggtctgaaaagcgcaatattcgggtgggagtgacccgattttccaggtgcttccgtcacccctttctttgactcggaaagggaactccctgaccccttgcgcttcccaggtgaggcaatgcctcgccctgcttcggctcgcgcacggtgcgcgcacacactggcctgcgcccactgtctagcactccctagtgagatgaacccggtacctcagatggaaatgcagaaatcacccgtcttctgcgtcgctcacgctgggagctgtagaccggagctgttcctattcggccatcttggctcctagtatttttaattaagcacttgtgttctgattagtggccaaataaatgacagtcagaacttcagctaaggtacaataaggttttgctgtggcgtggcacctggtctctttctagaaggaaagttcaacatacagcacaattctggacacattgtattggtttgatgctcctacctggaacaggtggagctggtctcttgggcagcctgacatctggtccactcctctgtcctatgccgggatcatcatgaccgtagagattatgtcactgttttgcatccttgttacataactcagttcctggtagattactatgtcagagagtcacaatgaccttgcacaataacagtacaacctcgcctttgtttccaaacatcagctcctcctggatacacagcccctccgatgcagggctgcccccgggaaccgtcactcatttcggcagctacaatgtttctcgagcagctggcaatttctcctctccagacggtaccaccgatgaccctctgggaggtcataccgtctggcaagtggtcttcatcgctttcttaacgggcatcctggccttggtgaccatcatcggcaacatcctggtaattgtgtcatttaaggtcaacaagcagctgaagacggtcaacaactacttcctcttaagcctggcctgtgccgatctgattatcggggtcatttcaatgaatctgtttacgacctacatcatcatgaatcgatgggccttagggaacttggcctgtgacctctggcttgccattgactacgtagccagcaatgcctctgttatgaatcttctggtcatcagctttgacagatacttttccatcacgaggccgctcacgtaccgagccaaacgaacaacaaagagagccggtgtgatgatcggtctggcttgggtcatctcctttgtcctttgggctcctgccatcttgttctggcaatactttgttggaaagagaactgtgcctccgggagagtgcttcattcagttcctcagtgagcccaccattacttttggcacagccatcgctgctttttatatgcctgtcaccattatgactattttatactggaggatctataaggaaactgaaaagcgtaccaaagagcttgctggcctgcaagcctctgggacagaggcagagacagaaaactttgtccaccccacgggcagttctcgaagctgcagcagttacgaacttcaacagcaaagcatgaaacgctccaacaggaggaagtatggccgctgccacttctggttcacaaccaagagctggaaacccagctccgagcagatggaccaagaccacagcagcagtgacagttggaacaacaatgatgctgctgcctccctggagaactccgcctcctccgacgaggaggacattggctccgagacgagagccatctactccatcgtgctcaagcttccgggtcacagcaccatcctcaactccaccaagttaccctcatcggacaacctgcaggtgcctgaggaggagctggggatggtggacttggagaggaaagccgacaagctgcaggcccagaagagcgtggacgatggaggcagttttccaaaaagcttctccaagcttcccatccagctagagtcagccgtggacacagctaagacttctgacgtcaactcctcagtgggtaagagcacggccactctacctctgtccttcaaggaagccactctggccaagaggtttgctctgaagaccagaagtcagatcactaagcggaaaaggatgtccctggtcaaggagaagaaagcggcccagaccctcagtgcgatcttgcttgccttcatcatcacttggaccccatacaacatcatggttctggtgaacaccttttgtgacagctgcatacccaaaaccttttggaatctgggctactggctgtgctacatcaacagcaccgtgaaccccgtgtgctatgctctgtgcaacaaaacattcagaaccactttcaagatgctgctgctgtgccagtgtgacaaaaaaaagaggcgcaagcagcagtaccagcagagacagtcggtcatttttcacaagcgcgcacccgagcaggccttgtagaatgaggttgtatcaatagcagtgacaaaacgcacacatcaacccacagaccttaggaggaggaaggcgagggcggggtgacttctggtgatgataaaaatggttttatcacccagatgtgaaagaagctgcctgtttactgatccattgaataaacccattttaatagaaaaagtcaataccaattcagcaaaaagaaaaaaaaaacatactactgaatataaagaaatttattctgaaatagactttacgtgtttttttcttaaagaggagaaaaatattgcttgacggcaattatatacccaaagtgatttgcctgggtcctttaattcccattagctttggaatctcagatgagcatagctgacccagttcccacattcttcccaaggatcccaaaagtgggaatccagaccccaagtggaacactgcaggcttacgaatctgtggttccaaaattatttcatacgttgcaaagctgaatcttcttgtcccaatagagcttcctgtcttttctttggtgtgttgttaaactctatttgtggacttgattcttgattcttgcaaagtactgttttgtgcagttcaagtttcgtacaaataaaaatacttaagtatatatatatgtgtgagttctgcacgcacacacatagtgtatataatatcatgggaaacactgaactggcaaattattcctgcaacatacgctttcagtactttggtaactgaagttctctaggatcctaatgcaacattaacgtgaaataagcccagtgtaatgtttttgaaaccagggctgttttccacagagagcagccaggccttcccagcaggtctgtgcagagcggacaggctcgtgagtcagctgagcgccgtggcttcgccagacttggtgttaagcaacctcctttgttgatgtctcaacagagctaaatcggggcccctctgagctcaaagaatgaaccacatccacacgtttgaatttaatcatctaaatctgaatgtttcagaacaaaatttctgctatctaaactgcttgaaactcaataatagtgtcacgtttgaatgtcatacacagcaatatatatatatgtgtatatatatatatatggcaaagcaaaaaaaaaaacatggtaagagagaatgaaggagaacattgtgtttgattcttgctgaatggcaccttctcaaagaaaatagggcttgcacctttgttaatcagctgtggccagtgctttctggtgttcattgtgtaaccttcacccaggaataggtgaggttttaggaagttacatgtcctctgaagaaagaattacactctgaaaagtaatgcttcaaattgatttccttaccttttgggaaaaaaaaaaaattgtttttttgcattctcccttgaattgaccaaaatgttaactgtttcatttggggaggggatggggtgctgccatcattgtcgttgttgttgctgctgtagctgttggggtttcttttcctgttgccggggctgtttggggagagggaggggagggaggtgggagggccgcggagatatcttccctttgtacagggcattcgtgttgtgaacccagagctgggtagaagctgcttttgtattcagtgtgaggtggtgtttacagacgactttgacaacagtagaagtgtactcagtggtgtctgtgtatctgaactatttaatttcgtgttatgtttatatgcagaaatatttatggatactacaccaagtgtttatttaatgttgataaatatgactcttcagtcgtcagccatggtgtcctttcaaagtgattctttaaggtccacttgagcaatgaatagagtatattggagctttcctgtggctaagaagaagaaacatgtcatcctgttggcatcaccaagcacctaactctttctaggtaataaaaagtcaacggtcacttcaacgtaaatgtttaaaaccactctttagttaaatctgatgggaactgaacaaagctccaccattgtgtctgaaatcattttacacagggaaaaaaaaaaacaatcagcataattgtaagaatgatttttttgggcccacattcaaccaaagaacaagaaagaaacagacgattttctaatatgtacacagcaaactacagaatgtcatattatccacctgtgaaacatctagtaagcaattgcatctatattttatttctcaagttggcctggcactaataaatatgtgaaagcttattcaagtgtcccagtacttcagcacttcccatccttttggaaactcctatcttgcctccctcccaaaagggctgtttcttttattaaaaaaaaaaaagaaatagaattaaatttgagaaaaggagaaaccctgaaatttaacagaactttgagagtcacttccaatctccttaaacatgattatctccttatccttgtccttttgtgatgctaataatagcagaaaaggaacaaatccaagactctaggtctcccttttttgttttactggttttattatagaattgtttttaagcctcttatggatgaaagctgcatttaaatactatctactgattttatagaaaggtatgtccatttcttgggtcactttcagagaaagaaaacaagcaaaataggttcttttgaatatgaataatttaaaagcataattgaagatgtagtgagtatttataattggaccttagttacacgtgcatttctcaaagggcttgtcattacaggagatattcagcacttacctaagatcaaaatgtcttcatcccaaattgggaatcgaattatttcatgccatatgcatgaggtttgcagacatttcaagattagccactttgcttgaaagaagaaaatgatcaaacctaaaataaactacacatggagaatctctctctctctctctgcctctctctctctctttctccctcttcttccttctctctctctcacaagcacacacacacacactcaatctccattctccaggcattgccagatggttaggagaagtgagctctctctggtcccctagatccctcggctctgctctcctttgcccatcagctccctgtggcctctatgctagtcctccctattctcctagtcaccctttgcctcttaagcccagccttgactctctacatatttttcatttctctttaccctttagtgtacaatagttgtagactctgacggaatgaaaacaaacaagaagcctaagcgttagaccctgctgtggctaaagatctagaaggcatatcagttttctctgtcaggcttcctacgttgccctcgtgcagggctcattgctctgcagagcgctggaagccccttcatgtatcgagagagaagctggagcacagagctctgatgcacagttggctgtttcagctctgactcagggaggaaagaaggatgccaaggctctgtcacagcggagaagtctaataccagagtggcacagagaaggattccagggatcagtcagggtgtcctgtacctatctgagtagagatgattcaaggatggggacatattccaggaaattgcacaatcttcccctggcagcttcagaggacgagtgaaaatagtgcagtatagtcaaagaagcaatgaatttaggatgaggaacctgaagtttctggaccagtttggtcactgcttagttacatgtccttaggaatgcttgtcacttaacctaaactttctgggttttatcctcattgctcaaactaagcaacaacaccgaagcttctctaatttgccttctgatgccaaatcggtcaaaactgaggtcagcagctaccatgacgaaagtaaaatggtatattgggtgaatgtttgaaaatttcagattttatattctgtaaagttatttacttactctatttcaacaccacaaaatcttgaaatttggaaggtaaccaaggaagctttgaaatttgttggcaaacccggagtagtatggtttcaaataccactccaacccagcacctgaggtcgggcaaactcacaaaatagagtttctaggtagcaggtgtttgctttggttttgcaatagcatttctcataacagaactgaaactgtatagattacaacactccaaagttatttttttttaacctaaagaaccctacttctagcacctcctctgaaagaatattttgctccaataccacgtgcaacaaacttatttagacagtatcaactctagcccttaataggttcaaggacaagtttactgcttcctttctacacgcttaagttacactctcttctcctgttctgatgactctaaatcttcagcctctcccagcattaatgtgtgagtcaacattgcagacctgagaaaggtttctagaatggtaacccaatgttctttagaactggagaattccattttccttttctggctttagtgttaatgtctgggaagggaggctcatgataagaaaataaaaatgagaaaagaagatctagttcataaaatgactataccccacgtaagtttgtaactgcacagtgttttgttgtacggctcagaaatgagcaagtgttagtattattaggcacacatcacgttcacagcttcgcgcagagacggatagtgtatttggatatatggaagtcatccaaatgcgttgctagaatatcaggcctatgtttgttctggtagaaccacagagactcacacaaagttctgaccctaccactctggtctgggctgagaccaccccaaaaaatcatctagagaatcaaaggggctcacatctcagttgcattctatttaaaagataaaggggccatactctccactgcaaagaagcattagtaaaacttcccgcacccaaattataatccggcaaccctagcttcagctaaaaagattatccccagaatctaaaagcttactattgttctttcttggagtccaaaatgcttagcagttctgcagttcacatacaaaactcaaaactctttttatcctgtattctgtgagttccttgatgatagtaattgggtcttattcatcactctgtatcctgtggctcacacagaatctggcaaattgcatatattcaataaatgttgaatatctaataacctccttattaatataacaaatattatcaacattctgtgcacatcaatgtcccatgctgctactgtagtcaggagttatttggctgggaagtggaaagtgttcacaaacatgatgcttatctaataaaatatcactgagcaataaggagaaatattttaaatagatttgaagttgtgaacaaataatttagagtccaaagaggaaaaagaaaattaactctgttttttatccctagaactcagaaactttactggattggtcaacaaagacaaactttttattgtataaaacagtagaattcatggaagggataattcttttggaacaggcttctcggttacttgccttagtaaaagaagtatctggagggcctggagagttcataaacatagttttctgtgcaagtgaagatctgtagtttggcttaaaaatccttgcatgtagttttgcttggcgtggaaagttattaggagacaatcctttatcctgttctgcaagcaatcaaacacatgatctcccttctagccattcctcatccagtacatgggcatttccagcctcctacatgtaacacttcaaacttcctctgggcgtctgcttagagctatgtgatggccacagtttgggcaaagcccttctttcttttaaatataggaactgttaccaagtttggtgcaggcttgaggaataattacataaaaatgggcttccacgatggtgaatcagcatgctgatttctcttggcaggaagctctcagggaaatgtctgtgaatcatttaaagatgctctctggtggatagagaaaccgcagtccaaaaacagatgggtgtatatttgctttgtaagcaaagggcatgtatcatactcgcatctaaaacagtgtccacatctttgccaaaggcactgaattttacctttttttattacctcgtggccagcacttcctcagtaggcatttcaggtgtgtcacaaaccatgttcatttttaatcttgaaaaagtcaatcgtctgtagtctgtactataaaatgatgcctgcaactttgtggtgaatattatccccaagttaacagtgaaataagtaaataaaactattattgaacaaa

SEQ ID NO: 15022 - DNA, 587 bp, Artificial Sequence
  derived and/or modified sequence
ttttagtacggtattgttgcagctgacctgtatacgtaaggaattactgggtcatcagctctggggaatgtcttttgattatgaacacattttcagcatgtgtccactgaaggtggagctggtctcttgggcagcctgacatctggtccactcctctgtcctatgccgggatcatcatgaccgtagagattatgtcactgttttgcatccttgttacataactcagttcctggtagattactatgtcagagagtcacaatgaccttgcacaataacagtacaacctcgcctttgtttccaaacatcagctcctcctggatacacagcccctccgatgcagggctgcccccgggaaccgtcactcatttcggcagctacaatgtttctcgagcagctggcaatttctcctctccagacggtaccaccgatgaccctctgggaggtcataccgtctggcaagtggtcttcatcgctttcttaacgggcatcctggccttggtgaccatcatcggcaacatcctggtaattgtgtcatttaaggtcaacaagcagctgaagacggtcaacaactacttcctcttaagcct

SEQ ID NO: 15023 - DNA, 1773 bp, Artificial Sequence
  derived and/or modified sequence
atgaccctgcacaacaacagcaccaccagccccctgttccccaacatcagcagcagctggatccacagccccagcgacgccggcctgccccccggcaccgtgacccacttcggcagctacaacgtgagcagagccgccggcaacttcagcagccccgacggcaccaccgacgaccccctgggcggccacaccgtgtggcaggtggtgttcatcgccttcctgaccggcatcctggccctggtgaccatcatcggcaacatcctggtgatcgtgagcttcaaggtgaacaagcagctgaagaccgtgaacaactacttcctgctgagcctggcctgcgccgacctgatcatcggcgtgatcagcatgaacctgttcaccacctacatcatcatgaacagatgggccctgggcaacctggcctgcgacctgtggctggccatcgactacgtggccagcaacgccagcgtgatgaacctgctggtgatcagcttcgacagatacttcagcatcaccagacccctgacctacagagccaagagaaccaccaagagagccggcgtgatgatcggcctggcctgggtgatcagcttcgtgctgtgggcccccgccatcctgttctggcagtacttcgtgggcaagagaaccgtgccccccggcgagtgcttcatccagttcctgagcgagcccaccatcaccttcggcaccgccatcgccgccttctacatgcccgtgaccatcatgaccatcctgtactggagaatctacaaggagaccgagaagagaaccaaggagctggccggcctgcaggccagcggcaccgaggccgagaccgagaacttcgtgcaccccaccggcagcagcagaagctgcagcagctacgagctgcagcagcagagcatgaagagaagcaacagaagaaagtacggcagatgccacttctggttcaccaccaagagctggaagcccagcagcgagcagatggaccaggaccacagcagcagcgacagctggaacaacaacgacgccgccgccagcctggagaacagcgccagcagcgacgaggaggacatcggcagcgagaccagagccatctacagcatcgtgctgaagctgcccggccacagcaccatcctgaacagcaccaagctgcccagcagcgacaacctgcaggtgcccgaggaggagctgggcatggtggacctggagagaaaggccgacaagctgcaggcccagaagagcgtggacgacggcggcagcttccccaagagcttcagcaagctgcccatccagctggagagcgccgtggacaccgccaagaccagcgacgtgaacagcagcgtgggcaagagcaccgccaccctgcccctgagcttcaaggaggccaccctggccaagagattcgccctgaagaccagaagccagatcaccaagagaaagagaatgagcctggtgaaggagaagaaggccgcccagaccctgagcgccatcctgctggccttcatcatcacctggaccccctacaacatcatggtgctggtgaacaccttctgcgacagctgcatccccaagaccttctggaacctgggctactggctgtgctacatcaacagcaccgtgaaccccgtgtgctacgccctgtgcaacaagaccttcagaaccaccttcaagatgctgctgctgtgccagtgcgacaagaagaagagaagaaagcagcagtaccagcagagacagagcgtgatcttccacaagagagcccccgagcaggccctgtag

SEQ ID NO: 15024 - DNA, 333 bp, Artificial Sequence
  derived and/or modified sequence
atgaccctgcacaacaacagcaccaccagccccctgttccccaacatcagcagcagctggatccacagccccagcgacgccggcctgccccccggcaccgtgacccacttcggcagctacaacgtgagcagagccgccggcaacttcagcagccccgacggcaccaccgacgaccccctgggcggccacaccgtgtggcaggtggtgttcatcgccttcctgaccggcatcctggccctggtgaccatcatcggcaacatcctggtgatcgtgagcttcaaggtgaacaagcagctgaagaccgtgaacaactacttcctgctgagcctgtag

SEQ ID NO: 15025 - protein, 479 aa, Artificial Sequence
  derived and/or modified sequence
MANFTPVNGSSGNQSVRLVTSSSHNRYETVEMVFIATVTGSLSLVTVVGNILVMLSIKVNRQLQTVNNYFLFSLACADLIIGAFSMNLYTVYIIKGYWPLGAVVCDLWLALDYVVSNASVMNLLIISFDRYFCVTKPLTYPARRTTKMAGLMIAAAWVLSFVLWAPAILFWQFVVGKRTVPDNQCFIQFLSNPAVTFGTAIAAFYLPVVIMTVLYIHISLASRSRVHKHRPEGPKEKKAKTLAFLKSPLMKQSVKKPPPGEAAREELRNGKLEEAPPPALPPPPRPVADKDTSNESSSGSATQNTKERPATELSTTEATTPAMPAPPLQPRALNPASRWSKIQIVTKQTGNECVTAIEIVPATPAGMRPAANVARKFASIARNQVRKKRQMAARERKVTRTIFAILLAFILTWTPYNVMVLVNTFCQSCIPDTVWSIGYWLCYVNSTINPACYALCNATFKKTFRHLLLCQYRNIGTAR

SEQ ID NO: 15026 - DNA, 1440 bp, Artificial Sequence
  derived and/or modified sequence
atggccaacttcaccccagtaaacggatctagcgggaaccagtccgtaaggcttgttacaagtagctcccacaacaggtacgaaacagtcgaaatggttttcatagctaccgttacaggatcactgagtttggtgacagtagttggcaacattttagttatgctctccattaaggtcaaccgtcagctgcagaccgtaaataactatttcctctttagcttggcttgcgccgacctgataattggagccttttcaatgaatctgtataccgtgtacataatcaagggctattggcctctcggagctgtggtttgtgacctatggttggcactggactacgtggtctccaacgccagcgtaatgaatttacttataatcagttttgaccgctacttctgcgtcaccaagcccctcacgtacccagcacgacgaaccaccaagatggcggggttgatgatagcagccgcgtgggtgctttcatttgtgttgtgggccccagccattctgttttggcaattcgttgtgggcaagcggacggtccctgacaatcagtgcttcatccagtttctgtctaacccagctgtgactttcggtacggctatcgcagcattctatctgcccgtggtaattatgacagtcctttacatccacattagtctcgcgtctcgcagtcgggtacacaagcatcgacccgagggacccaaggagaaaaaagcgaaaacactggcctttctcaaatctcctctcatgaaacagagcgtaaagaagcctccaccaggagaggcggcacgagaggagctgaggaacgggaagctcgaggaagctccccctcccgccttgcctccgcccccaagacctgtggcagataaggatactagcaatgagtctagctctggctccgccacacagaacacaaaggaaagacctgccaccgaactgtccacaactgaagctaccacccctgctatgcctgctcctccactccaaccacgtgcattaaatcccgctagtcgttggtcaaaaatccaaatcgtcactaagcagaccggcaatgagtgcgtgactgccatcgaaatcgtgcctgcaacccccgctggaatgaggccggccgccaacgttgctcggaagttcgcatcaatcgccagaaatcaggtgaggaagaaaaggcagatggccgctcgcgagcgcaaggtgactcgaacgatcttcgctatactgctcgctttcatccttacctggacgccctacaatgttatggtcttagtgaatactttttgtcagagttgcatacctgataccgtctggtccatcggctactggctgtgttatgtaaatagcactattaacccagcctgctatgctctgtgcaacgccaccttcaagaaaacttttcggcacctgctgctgtgccagtacagaaatatagggactgcgcgctag

SEQ ID NO: 15027 - DNA, 1440 bp, Artificial Sequence
  derived and/or modified sequence
atggccaacttcacccctgtgaatggcagcagcggcaaccagagcgtgcggctggtgaccagcagcagccacaacagatatgaaacagtggagatggtgttcatcgccaccgtgacaggcagcctgagcctggtgacagtggtgggcaacatcctggtgatgctgagcatcaaggtgaaccggcagctgcagacagtgaacaactacttcctgttcagcctggcctgtgccgacctgatcattggagccttctccatgaacctgtacacagtgtacatcatcaagggctactggcccctgggcgctgtggtgtgtgacctgtggctggccctggactatgtggtgtccaatgcctctgtgatgaacctgctgatcatcagctttgaccgctacttctgtgtgaccaagcccctgacctacccagcccggaggaccaccaagatggccggcctgatgattgctgctgcctgggtgctgagctttgtgctgtgggccccagccatcctcttctggcagtttgtggtgggcaagaggacagtgcctgacaaccagtgcttcatccagttcctgagcaacccagctgtgacctttggaacagccatcgccgccttctacctgcctgtggtgatcatgacagtgctgtacatccacatcagcctggccagccgcagccgggtgcacaagcacaggcctgagggccccaaggagaagaaggccaagaccctggccttcctgaagagccccctgatgaagcagagcgtgaagaagcccccacctggagaggccgcccgggaggagctgagaaatggcaagctggaggaggcccctcctccagccctgcccccaccacccaggcctgtggccgacaaggacaccagcaatgaaagcagcagcggcagcgccacccagaacaccaaggagaggcctgccacagagctgagcaccacagaggccaccaccccagccatgcctgccccacccctgcagccccgggccctgaacccagccagccgctggagcaagatccagatcgtgaccaagcagacaggaaatgaatgtgtgacagccattgaaattgtgcctgccaccccagctggcatgaggcctgctgccaacgtggccaggaagtttgccagcatcgccaggaaccaggtgaggaagaagaggcagatggccgcccgggagaggaaggtgaccaggaccatctttgccatcctgctggccttcatcctgacctggaccccctacaacgtgatggtgctggtgaacaccttctgccagagctgcatcccagacacagtgtggagcatcggctactggctgtgctacgtgaacagcaccatcaacccagcctgctacgccctgtgcaatgccaccttcaagaagaccttccgccacctgctgctgtgccagtacagaaatattggaacagccaggtag

SEQ ID NO: 15028 - DNA, 1440 bp, Artificial Sequence
  derived and/or modified sequence
atggccaacttcacccccgtgaacggcagcagcggcaaccagagcgtccgcctggttacttcatcctcccacaacagatacgaaaccgtcgagatggtctttatcgcaactgtgaccgggtcactgtccttagtcactgtagtgggcaacatcctggtgatgctgagcataaaggtcaatcgccagttgcagactgtgaacaattacttcctgttttcactggcatgcgctgacttaatcatcggcgcattttcaatgaacctttatacagtatatatcataaaaggctattggcctctgggagctgtcgtgtgtgacctgtggctggctcttgactatgtggtctctaacgcaagcgttatgaacctcctgattattagcttcgacaggtacttctgcgtgacaaaaccgctgacctaccctgcgaggcggacaaccaaaatggccggactcatgatcgcagccgcctgggtgctcagcttcgttctctgggctccagcgatactgttctggcagtttgtagttgggaaacgaacagtgcctgataaccaatgttttatccaatttctgagtaaccctgctgtcacttttggcactgctatcgccgcgttttatctgccagtcgtgatcatgacagtcctgtatatccacatatccctggcctcccgcagccgcgtgcacaaacatcgacccgaaggacccaaggaaaaaaaagccaaaaccctggcatttctgaagtcgccactgatgaagcaatccgtgaagaaaccaccccccggcgaagcagcccgagaggaactgaggaatggcaaacttgaggaggcccctccccctgcccttccacctcccccaagaccagtggcggacaaggacacctccaatgagtctagtagcggctcggcaacacaaaacacaaaggagaggcccgcaacagagttatccacaacggaagccacaacccccgccatgcctgcgccgcctctccagcctagagcgctgaatcctgcctctaggtggtccaagatccaaatcgtgactaagcagacagggaatgaatgcgtcactgccattgagattgtgcccgcgacacccgctggcatgagacctgccgctaatgtggcccggaagtttgcaagtatcgccagaaaccaggttcgaaaaaagcgtcagatggccgccagggaacgtaaagtgacccgcacaatatttgccattttactggcctttattctgacctggaccccttataacgtgatggtgctggtcaacacattctgccagagttgtattcccgatacagtttggagcatcggctactggctctgttacgtgaattctacaatcaatccagcatgctatgcactctgtaatgcgacctttaagaaaacattccgccatttgctcttgtgccagtataggaatattggcacagcacggtag

SEQ ID NO: 15029 - DNA, 1440 bp, Artificial Sequence
  derived and/or modified sequence
atggccaactttaccccagtcaacggctcttcgggaaatcagtcagtacggctagtcacttcctcctcacacaaccgctacgagaccgtggagatggtttttatcgccaccgtcacaggaagcctctcactggtgactgtggttggcaacattctcgtcatgctgagcataaaggtaaatagacagctacagacggtgaataattactttcttttctcactcgcgtgtgcagacctgatcatcggcgcatttagcatgaacctgtatactgtctacattattaaaggatactggcccctgggcgcagtcgtgtgcgacctatggttagccctggattatgtggtctccaacgctagtgtcatgaatttactcattatctcatttgacaggtacttctgcgtgaccaagccacttacatatccagcacgccgaaccactaagatggcaggattgatgatagcagctgcttgggtgctcagcttcgtgctatgggcacccgctatactgttctggcagttcgtcgtgggtaaaagaaccgtgccagataaccagtgttttatccagtttctgtcgaaccccgctgtgacattcgggacagccatagctgccttttacctccctgtggtgatcatgacagtcctgtatatccacatttcactcgcctcacgatcacgcgtccacaaacaccgccctgaaggaccgaaagaaaaaaaagctaaaactctcgcttttcttaagtcgccgctgatgaagcagagcgtcaaaaagccacccccaggggaagctgctcgggaggaacttagaaatggtaaacttgaagaagcaccgcctccagcattaccaccccctcccaggcctgtggctgacaaggacacttcaaacgaatcctccagtggctcagccacacagaatacgaaagaaagaccagccactgaactgtcaactacggaagccacaacccctgctatgcccgctcccccactgcagcccagagctctcaaccctgctagccgatggtccaagatccagatcgtcacgaagcagaccgggaatgaatgcgtcaccgctattgagatcgtgcccgctacgcccgcaggaatgagaccggctgcgaatgttgctcggaaattcgcatctatcgctcggaaccaggtgagaaaaaaacggcagatggctgcgagagaaaggaaggtcacaagaacaatttttgcgattctgctggcgttcattctgacatggaccccctacaatgtgatggtgttggttaatactttctgtcagagttgcatcccggacaccgtctggtcgattggttactggctgtgctacgttaattccacgattaatccggcttgttacgccctttgtaatgctacctttaaaaaaaccttcaggcatctgttgctgtgccagtacagaaatatcggaaccgcgagatag

SEQ ID NO: 15030 - DNA, 1468 bp, Artificial Sequence
  derived and/or modified sequence
atggccaacttcacacctgtcaatggcagctcgggcaatcagtccgtgcgcctggtcacgtcatcatcccacaatcgctatgagacggtggaaatggtcttcattgccacagtgacaggctccctgagcctggtgactgtcgtgggcaacatcctggtgatgctgtccatcaaggtcaacaggcagctgcagacagtcaacaactacttcctcttcagcctggcgtgtgctgatctcatcataggcgccttctccatgaacctctacaccgtgtacatcatcaagggctactggcccctgggcgccgtggtctgcgacctgtggctggccctggactacgtggtgagcaacgcctccgtcatgaaccttctcatcatcagctttgaccgctacttctgcgtcaccaagcctctcacctaccctgcccggcgcaccaccaagatggcaggcctcatgattgctgctgcctgggtactgtccttcgtgctctgggcgcctgccatcttgttctggcagtttgtggtgggtaagcggacggtgcccgacaaccagtgcttcatccagttcctgtccaacccagcagtgacctttggcacagccattgctgccttctacctgcctgtggtcatcatgacggtgctgtacatccacatctccctggccagtcgcagccgagtccacaagcaccggcccgagggcccgaaggagaagaaagccaagacgctggccttcctcaagagcccactaatgaagcagagcgtcaagaagcccccgcccggggaggccgcccgggaggagctgcgcaatggcaagctggaggaggcccccccgccagcgctgccaccgccaccgcgccccgtggctgataaggacacttccaatgagtccagctcaggcagtgccacccagaacaccaaggaacgcccagccacagagctgtccaccacagaggccaccacgcccgccatgcccgcccctcccctgcagccgcgggccctcaacccagcctccagatggtccaagatccagattgtgacgaagcagacaggcaatgagtgtgtgacagccattgagattgtgcctgccacgccggctggcatgcgccctgcggccaacgtggcccgcaagttcgccagcatcgctcgcaaccaggtgcgcaagaagcggcagatggcggcccgggagcgcaaagtgacacgaacgatctttgccattctgctagccttcatcctcacctggacgccctacaacgtcatggtcctggtgaacaccttctgccagagctgcatccctgacacggtgtggtccattggctactggctctgctacgtcaacagcaccatcaaccctgcctgctatgctctgtgcaacgccacctttaaaaagaccttccggcacctgctgctgtgccagtatcggaacatcggcactgccaggtaggcaggcaggagtgccctaggaggtgctg

SEQ ID NO: 15031 - DNA, 1440 bp, Artificial Sequence
  derived and/or modified sequence
atggccaacttcacccccgtgaacggcagcagcggcaaccagagcgtgagactggtgaccagcagcagccacaacagatacgagaccgtggagatggtgttcatcgccaccgtgaccggcagcctgagcctggtgaccgtggtgggcaacatcctggtgatgctgagcatcaaggtgaacagacagctgcagaccgtgaacaactacttcctgttcagcctggcctgcgccgacctgatcatcggcgccttcagcatgaacctgtacaccgtgtacatcatcaagggctactggcccctgggcgccgtggtgtgcgacctgtggctggccctggactacgtggtgagcaacgccagcgtgatgaacctgctgatcatcagcttcgacagatacttctgcgtgaccaagcccctgacctaccccgccagaagaaccaccaagatggccggcctgatgatcgccgccgcctgggtgctgagcttcgtgctgtgggcccccgccatcctgttctggcagttcgtggtgggcaagagaaccgtgcccgacaaccagtgcttcatccagttcctgagcaaccccgccgtgaccttcggcaccgccatcgccgccttctacctgcccgtggtgatcatgaccgtgctgtacatccacatcagcctggccagcagaagcagagtgcacaagcacagacccgagggccccaaggagaagaaggccaagaccctggccttcctgaagagccccctgatgaagcagagcgtgaagaagcccccccccggcgaggccgccagagaggagctgagaaacggcaagctggaggaggcccccccccccgccctgccccccccccccagacccgtggccgacaaggacaccagcaacgagagcagcagcggcagcgccacccagaacaccaaggagagacccgccaccgagctgagcaccaccgaggccaccacccccgccatgcccgccccccccctgcagcccagagccctgaaccccgccagcagatggagcaagatccagatcgtgaccaagcagaccggcaacgagtgcgtgaccgccatcgagatcgtgcccgccacccccgccggcatgagacccgccgccaacgtggccagaaagttcgccagcatcgccagaaaccaggtgagaaagaagagacagatggccgccagagagagaaaggtgaccagaaccatcttcgccatcctgctggccttcatcctgacctggaccccctacaacgtgatggtgctggtgaacaccttctgccagagctgcatccccgacaccgtgtggagcatcggctactggctgtgctacgtgaacagcaccatcaaccccgcctgctacgccctgtgcaacgccaccttcaagaagaccttcagacacctgctgctgtgccagtacagaaacatcggcaccgccagatag

SEQ ID NO: 15032 - protein, 529 aa, Artificial Sequence
  derived and/or modified sequence
MGPSCPVFLSFTKLSLWWLLLTPAGGEEAKRPPPRAPGDPLSSPSPTALPQGGSHTETEDRLFKHLFRGYNRWARPVPNTSDVVIVRFGLSIAQLIDVDEKNQMMTTNVWLKQEWSDYKLRWNPTDFGNITSLRVPSEMIWIPDIVLYNNADGEFAVTHMTKAHLFSTGTVHWVPPAIYKSSCSIDVTFFPFDQQNCKMKFGSWTYDKAKIDLEQMEQTVDLKDYWESGEWAIVNATGTYNSKKYDCCAEIYPDVTYAFVIRRLPLFYTINLIIPCLLISCLTVLVFYLPSDCGEKITLCISVLLSLTVFLLLITEIIPSTSLVIPLIGEYLLFTMIFVTLSIVITVFVLNVHHRSPSTHTMPHWVRGALLGCVPRWLLMNRPPPPVELCHPLRLKLSPSYHWLESNVDAEEREVVVEEEDRWACAGHVAPSVGTLCSHGHLHSGASGPKAEALLQEGELLLSPHMQKALEGVHYIADHLRSEDADSSVKEDWKYVAMVIDRIFLWLFIIVCFLGTIGLFLPPFLAGMI

SEQ ID NO: 15033 - DNA, 1590 bp, Artificial Sequence
  derived and/or modified sequence
atgggccctagctgtcccgtcttcctcagtttcaccaaactctcactgtggtggttgctgctcactccggctggtggagaggaagccaagcgaccgccgcccagagcgcccggtgaccctctgagctcgcccagccctacagctttgccccagggaggatctcatacggagaccgaggaccggttatttaagcacctgttccgaggatataatcgatgggctcgcccagtgccaaacacttcagacgtagtgattgttaggttcggtctctctatagcccagctcattgacgtggatgagaaaaaccagatgatgacaactaatgtttggctcaagcaagaatggagcgattacaaacttaggtggaaccctactgatttcgggaacattactagtctgagggtcccctctgagatgatttggatccccgatattgtactctacaataacgccgacggcgaattcgcggtcacacacatgacgaaggcacatctttttagcaccggaaccgtgcactgggtaccacctgctatttataaaagtagttgtagcatcgatgtcaccttttttccattcgatcaacagaactgtaaaatgaagtttggtagctggacctatgacaaagccaagattgatcttgagcaaatggagcagaccgtggacctgaaggattactgggagagcggcgagtgggccatagtcaacgctactgggacatacaacagcaaaaagtatgactgttgcgctgaaatctaccccgatgtgacttacgccttcgttattaggagacttcccctgttctatacaatcaacttgatcattccatgtctcctgatctcatgcttaacagtgctggtcttttatctccctagcgattgcggagaaaaaatcacgctgtgtatctccgttttgctgagcctaactgtattcctccttttaattacagagatcatcccctcgaccagcctcgtgattccactgattggcgaatacttgctctttacaatgattttcgtgacactgtccatagtaatcactgtatttgtcttaaatgttcaccataggtcacccagcacccacaccatgcctcactgggtccggggggccctgttaggatgcgtgccccggtggcttttaatgaatcggccccccccccccgtggagctttgccaccctctcagattaaaattatcaccttcttatcactggctggagagcaatgtggacgctgaagagcgggaagttgtggtagaagaggaagaccgttgggcatgcgcgggccacgtggctccctccgtcggaaccctttgttcgcacggtcacttgcactcaggtgcttcaggaccaaaagccgaggcgctgttgcaggagggggaattactcctgtctccccacatgcagaaagcccttgagggcgtccattacattgcagaccatcttcggagcgaggacgctgacagtagtgtcaaagaagattggaagtacgtcgctatggttatcgaccgaatatttctctggttgttcatcattgtttgctttctgggcacgataggattgtttctccctcccttcctagccggcatgatctag

SEQ ID NO: 15034 - DNA, 1590 bp, Artificial Sequence
  derived and/or modified sequence
atgggcccaagttgccccgtcttcttgtccttcactaaacttagcctgtggtggcttctcctaacacctgccgggggtgaagaagccaagaggcctccccccagggcgccaggcgatccgctttcctctccctcacccactgctctcccgcagggaggaagccacacagagacagaagatagactctttaaacatctcttcaggggatataaccggtgggcaaggcctgttccgaataccagtgatgtggtcatagtgcgcttcggcctgagcattgcgcagctcatcgacgttgatgagaagaaccagatgatgactactaacgtctggttgaaacaggagtggagtgactacaaactccgctggaaccctactgatttcggcaatattaccagtctccgcgtcccttccgagatgatttggatccccgacatcgtattgtacaataacgccgacggcgaatttgccgtgacacatatgactaaagcccatctgttctccaccggaacggtccattgggtgccacctgcaatttacaagagctcttgtagcatagacgttacattctttccatttgatcaacagaattgtaaaatgaaatttggctcttggacctatgataaggctaaaatcgacctagaacaaatggagcagaccgtcgacctgaaagactactgggagtctggcgagtgggctattgtaaacgctactgggacttataacagtaaaaagtacgactgttgcgctgaaatttaccccgacgtaacatacgcctttgtcattcgacgccttcccctcttttacactattaatttgattatcccatgtctcctgatctcatgcttaacggtcctggtgttctatcttccaagcgactgcggggaaaagattactctgtgcatcagcgtcctcctgtctctcaccgttttcctccttctgatcacagaaattatcccttccacatccttggttattccacttatcggcgagtatctgttatttacaatgatctttgtgacactctccatcgtgataacagtctttgtactgaacgtacaccatcgttcacccagcacacataccatgccccattgggttagaggtgctctcctggggtgcgtgccaaggtggctcctgatgaaccggccaccccccccagtcgaactgtgtcaccctcttagattgaagctctcacctagctatcactggcttgaatcaaacgtagacgcggaagagcgggaagtggtggtggaggaggaggatcggtgggcttgcgcaggccatgtagccccatcggtaggaacactatgttcgcacggtcacctccattctggcgcgagcgggccgaaggctgaggccctgctgcaagagggagagctgctgttgtccccgcacatgcaaaaggcactggagggggttcattatatcgcagaccacctccggagtgaggatgccgactcctctgtgaaagaagattggaagtacgtcgcaatggttatcgatagaattttcttgtggctgttcataattgtgtgcttcttggggactattgggcttttcttaccacctttcctggctgggatgatatag

SEQ ID NO: 15035 - DNA, 1590 bp, Artificial Sequence
  derived and/or modified sequence
atgggccccagctgccctgtgttcctgtccttcaccaagctgagcctgtggtggctgctgctgaccccagctggaggagaggaggccaagaggcccccaccccgggcccctggggaccccctgagcagccccagccccacagccctgccccagggcggcagccacacagaaacagaagatagactcttcaagcacctgttccggggctacaaccgctgggcccggcctgtgcccaacaccagtgatgtggtgattgtgcgcttcggcctgagcatcgcccagctgattgatgtggatgagaagaaccagatgatgaccaccaacgtgtggctgaagcaggagtggagcgactacaagctgcgctggaaccccacagactttggaaacatcaccagcctgcgggtgcccagcgagatgatctggatcccagacatcgtgctgtacaacaatgctgatggagaatttgctgtgacccacatgaccaaggcccacctgttcagcacaggcaccgtgcactgggtgcccccagccatctacaagagcagctgcagcattgatgtgaccttcttcccctttgaccagcagaactgcaagatgaagtttggctcctggacctatgacaaggccaagattgacctggagcagatggagcagacagtggacctgaaggactactgggagagcggggagtgggccatcgtgaatgccaccggcacctacaacagcaagaagtatgactgctgtgccgagatctacccagatgtgacctacgcctttgtgatccggcggctgcccctcttctacaccatcaacctgatcatcccctgcctgctgatcagctgcctgactgtgctggtgttctacctgcccagcgactgtggggagaagatcaccctgtgcatctctgtgctgctgagcctgaccgtcttcctgctgctgatcacagagatcatccccagcaccagcctggtgatccccctcatcggggagtacctgctcttcaccatgatctttgtgaccctgagcatcgtcatcaccgtgtttgtgctgaatgtgcaccacaggagccccagcacccacaccatgccccactgggtgcggggggccctgctgggctgtgtgccccgctggctgctgatgaacagacctcctcctcctgtggagctgtgccaccccctgcggctgaagctgagccccagctaccactggctggagagcaatgtggatgctgaggagcgggaggtggtggtggaggaggaggaccgctgggcctgtgccggccacgtggcccccagcgtgggcaccctgtgcagccacggccacctgcacagcggggccagcggccccaaggccgaggccctgctgcaggagggggagctgctgctgagcccccacatgcagaaggccctggagggcgtgcactacatcgctgaccacctgcggagtgaagatgctgacagctctgtgaaggaggactggaagtatgtggccatggtgattgaccgcatcttcctgtggctgttcatcatcgtgtgcttcctgggcaccatcggcctcttcctgccccccttcctggccggcatgatctag

SEQ ID NO: 15036 - DNA, 1590 bp, Artificial Sequence
  derived and/or modified sequence
atgggccccagctgccccgtgttcctgagcttcaccaagctgagcctgtggtggctgctgctgacaccggctggcggagaagaggcgaagaggcctcctcctcgtgccccgggcgatcctctctcctctccatcacctaccgctctgccacaggggggtagccatacagaaaccgaggataggttgttcaagcacctctttcgcggctacaatagatgggctcggcccgtgccaaatacttccgatgttgtgatcgtaaggtttggactgtcgatagcacagcttattgacgttgacgaaaagaatcaaatgatgaccactaacgtgtggttaaagcaggagtggtccgactacaaattgcgctggaacccaactgattttggaaacatcacaagccttcgggtaccaagcgagatgatatggatcccggacattgtcctctataacaatgccgacggggaatttgccgtgacccatatgactaaggcccacttattcagcaccggtaccgtgcactgggtccctcccgctatttataagtcgtcttgcagcatcgacgtcactttttttccattcgaccaacagaactgcaagatgaaatttggatcctggacatatgacaaggcaaaaatcgaccttgagcagatggaacagactgtggatctcaaagactattgggagtcaggggaatgggcaattgtgaatgcaacaggaacctacaactcaaaaaaatatgattgttgcgctgagatctaccccgacgttacatacgccttcgtgatcagacgcttgcctttgttctacactatcaacctgatcataccatgcctgttgatttcgtgtctgacagtcctggtcttttatctgccgtccgattgcggcgagaaaattacactgtgcataagcgtacttctttcactgacagtcttcctcctcctaatcactgaaatcattcccagcactagtctggtgattcctctgattggcgagtaccttctttttacaatgatttttgtcacgctatcgatcgtgattacggtgtttgtgctgaatgtccaccaccggtctccatccacacacacaatgccccactgggtccggggagctctgctgggatgtgtcccaaggtggctgttaatgaatagacctcctcctccagtggaactgtgccatccgctcaggctcaaattgagtcctagttatcactggctggagtcaaatgtagatgcagaagagagagaggtggttgtggaagaggaagaccggtgggcctgtgcggggcatgtcgccccgtctgtgggcacactctgttcacatggacacctccactctggagcctctgggcctaaggcagaggcattgctgcaggagggtgaactacttcttagcccccatatgcagaaagcgttggagggtgttcattacattgcagatcatcttcggtccgaggatgcggactcctcagtgaaggaggactggaaatacgtggccatggtgatcgatcggatctttttgtggctatttatcattgtgtgctttcttggtactatcggtctgttcctgccgccatttcttgctggcatgatttag

SEQ ID NO: 15037 - DNA, 1590 bp, Artificial Sequence
  derived and/or modified sequence
atgggccccagctgccccgtgttcctgagcttcaccaagctgagcctgtggtggctgctgctgacacctgccggcggcgaggaagctaaaagaccacctccccgagctccgggcgacccgctttcatcccccagccctacagctctcccacaaggcggaagccacactgaaaccgaggataggttatttaaacatctgtttcgcggctacaatcgatgggcccgaccagtgcccaacactagtgacgtggtgatcgttcgcttcgggctgagcatcgcccagctgattgacgtggacgagaagaatcaaatgatgacaacaaacgtatggttaaagcaagaatggtccgactataagctcaggtggaacccaaccgacttcggaaacataaccagccttcgggtcccaagcgaaatgatttggattccagatatcgtgctttataacaacgcagatggcgagttcgccgtgacacacatgaccaaggctcaccttttttccaccgggactgtacattgggtccccccagcaatctacaaatcaagttgtagtatcgacgtgacattcttcccttttgaccagcagaattgtaagatgaagttcggaagctggacctacgataaggccaaaattgacctggagcagatggagcagacagtggatctcaaagactattgggagtccggcgaatgggctattgtcaacgccacagggacgtataactccaagaagtacgattgttgtgccgagatctaccctgacgtgacttacgcctttgtgattaggcgcctgccactgttctatacgatcaacctaattattccctgtctgctgataagctgcctgaccgtgttagtgttttacttacctagcgactgcggagagaagatcactctttgtatttccgtgttactaagtttgacagtctttctgctactgataacggaaatcatcccctctacgagcctcgtgatccctctgatcggagaatatctcctgttcacaatgatctttgtgacattatcgatagtgatcacggtgttcgttttgaacgttcaccatcgtagcccatccactcacactatgccacattgggtgcggggcgcactgctgggctgtgtgccgagatggctcttgatgaaccgaccccccccccctgtcgagctctgtcatccattgcgcttaaaactatcaccatcttatcattggctcgagagcaacgtcgatgccgaggagcgcgaggttgttgtcgaagaagaagacaggtgggcttgcgccggacacgtggcgcccagtgtggggactctgtgtagccacggacacctgcactcaggcgcgtcaggcccaaaagcagaagctctgctgcaggaaggtgagctcctccttagcccgcatatgcagaaggcgttagagggcgtgcattacatcgctgaccacctcagaagtgaagacgccgattcttccgtcaaagaggactggaagtacgtggccatggtcatcgacaggatctttctgtggctgtttattatagtttgcttccttgggacaatcgggctgtttctccccccttttttggctggcatgatttag

SEQ ID NO: 15038 - DNA, 1590 bp, Artificial Sequence
  derived and/or modified sequence
atggggccatcatgccctgtgtttctatcttttacaaaactgtcgctctggtggctcctactgactcccgcaggcggtgaggaggcgaaaagaccgccaccacgagcgccaggcgatcctctctcatcaccgtcaccgacagccctccctcaggggggttcacatacagagacagaggatagattgtttaagcatcttttcagggggtataataggtgggccagacccgtgcccaatacgtcagacgtcgtcatcgtccgcttcggcctgagtattgctcagctgatagatgtggacgagaagaaccagatgatgaccaccaatgtctggctgaagcaggagtggtcagattacaagttgaggtggaaccctacggatttcggaaatattacaagtctgagagtaccaagcgaaatgatctggattcccgatatagtcctttataataacgccgacggcgagttcgctgtcactcacatgacaaaggcccacctgttcagtactggcacagtgcattgggtgccaccagctatttacaaatcttcctgttccatagacgtgaccttttttccctttgaccagcagaactgtaagatgaagtttgggtcctggacttacgataaggccaagatagatcttgaacagatggaacaaaccgtagatctgaaggattattgggaaagtggagaatgggccatcgtcaatgcaacagggacatataactcaaagaaatacgattgttgcgctgagatttaccccgatgttacttacgctttcgtgattcggagactgccactgttttacacaattaatctgatcatcccctgcctgttaatctcgtgtttgaccgtattggtcttctaccttccctcagactgcggagagaagatcaccctatgtatctctgtgctcctctccctcacggtctttttgctgctaatcaccgagattattccatccacaagcctggtcattcctctcattggagagtacctcctcttcacaatgatctttgttaccctatctatcgtgattactgttttcgtacttaatgttcaccatagatccccttctactcatacaatgccacactgggtacggggagccctgcttgggtgtgttcccagatggctccttatgaaccggcctccccctcctgttgaactttgtcatccattacggctgaaactatctcccagttatcactggctggagagtaacgttgatgccgaagagcgggaggtggttgttgaagaggaagatcgatgggcgtgtgccggacacgttgctccaagtgtgggaacgctgtgttctcacggtcacctgcatagcggggcttccggacctaaagccgaagccctgctccaggaaggcgagctgttgctgagtccacacatgcagaaggccctcgagggtgttcactatattgccgatcatcttaggtccgaggacgctgactcctccgtgaaggaggactggaaatacgtggccatggtgattgatcggattttcttgtggttgttcattatcgtctgttttcttggcactataggcctgtttttgcccccttttctggctggaatgatttag

SEQ ID NO: 15039 - DNA, 1590 bp, Artificial Sequence
  derived and/or modified sequence
atgggcccttcatgtcccgtttttctgtctttcactaaactctccctgtggtggctgctgcttacaccggcaggcggagaagaagctaagcgaccaccaccacgggcacccggagaccccctctcttcgccctctcccacagccctccctcagggaggatctcatacagagaccgaggacagactatttaaacacctctttaggggctataaccggtgggccagacccgtgccaaacacgtctgacgtggtgattgttcgtttcggtctgagcattgcgcaactgatagatgtcgacgagaaaaaccaaatgatgactacaaacgtgtggttgaagcaggagtggagtgactataagctgcggtggaatcctacggattttggtaacattacttctctgcgggttccatccgagatgatctggatccctgacatcgtactatacaataacgctgatggagagtttgccgttacccatatgactaaggcacatctgttttcaactgggacagtgcactgggtgccacccgctatttacaagtcttcctgttccattgacgtcacattttttccattcgaccaacagaactgcaagatgaagttcggatcctggacctatgataaggctaagattgatctagagcagatggaacagaccgtcgatctgaaagactactgggagagtggcgaatgggccatagtaaacgcaactgggacttacaatagtaagaaatatgactgttgtgctgagatctatcccgacgtaacctacgcttttgtcatcagacggctgcctttgttctatacaatcaaccttatcattccctgcctgctgatttcttgccttacagtgctggtgttttacctgcccagtgattgtggtgaaaaaatcactctgtgtattagcgtcctactgtctttaaccgtttttcttttgctgatcaccgagatcatcccgagtacgtccttggtaatccctttgatcggcgaatatcttctattcactatgatcttcgttacattgagcattgtgatcaccgtgtttgtattgaatgtccaccatcgaagcccatctacccacacaatgccccactgggtgaggggagccctgctgggatgtgtccctcggtggctgctgatgaatagaccccctcctccggtggagctctgccaccctctccggcttaagctgtccccaagttatcattggctagaaagcaatgttgatgccgaagaaagagaggtagtcgtcgaagaggaggacaggtgggcttgtgctggtcacgtcgcacccagcgtcggaacgctctgctctcacggccatctccatagtggagcttcagggccaaaagctgaggcgctgctccaagaaggggaactgctactctccccacacatgcagaaagccttagaaggggttcattatatcgccgaccaccttcggagcgaggatgccgacagttccgtaaaggaggattggaagtatgtggctatggttatcgatcgcatttttctatggctgtttattatcgtctgtttcctcgggacaatcggactctttttgccaccatttcttgctggtatgatctag

SEQ ID NO: 15040 - DNA, 4066 bp, Artificial Sequence
  derived and/or modified sequence
agagaggctgtgtgtgtgtgtgtgtgtgtgtatgtgtgtgtgtgtgtgagagagagagagaacagcgtgagcctgtgtgcttgtgtgctgagccctcatcccctcctggggccaggcttgggtttcacctgcagaatcgcttgtgctgggctgcctgggctgtcctcagtggcacctgcatgaagccgttctggctgccagagctggacagccccaggaaaacccacctctctgcagagcttgcccagctgtccccgggaagccaaatgcctctcatgtaagtcttctgctcgacggggtgtctcctaaaccctcactcttcagcctctgtttgaccatgaaatgaagtgactgagctctattctgtacctgccactctatttctggggtgacttttgtcagctgcccagaatctccaagccaggctggttctctgcatcctttcaatgacctgttttcttctgtaaccacaggttcggtggtgagaggaagcctcgcagaatccagcagaatcctcacagaatccagcagcagctctgctggggacatggtccatggtgcaacccacagcaaagccctgacctgacctcctgatgctcaggagaagccatgggcccctcctgtcctgtgttcctgtccttcacaaagctcagcctgtggtggctccttctgaccccagcaggtggagaggaagctaagcgcccacctcccagggctcctggagacccactctcctctcccagtcccacggcattgccgcagggaggctcgcataccgagactgaggaccggctcttcaaacacctcttccggggctacaaccgctgggcgcgcccggtgcccaacacttcagacgtggtgattgtgcgctttggactgtccatcgctcagctcatcgatgtggatgagaagaaccaaatgatgaccaccaacgtctggctaaaacaggagtggagcgactacaaactgcgctggaaccccactgattttggcaacatcacatctctcagggtcccttctgagatgatctggatccccgacattgttctctacaacaatgcagatggggagtttgcagtgacccacatgaccaaggcccacctcttctccacgggcactgtgcactgggtgcccccggccatctacaagagctcctgcagcatcgacgtcaccttcttccccttcgaccagcagaactgcaagatgaagtttggctcctggacttatgacaaggccaagatcgacctggagcagatggagcagactgtggacctgaaggactactgggagagcggcgagtgggccatcgtcaatgccacgggcacctacaacagcaagaagtacgactgctgcgccgagatctaccccgacgtcacctacgccttcgtcatccggcggctgccgctcttctacaccatcaacctcatcatcccctgcctgctcatctcctgcctcactgtgctggtcttctacctgccctccgactgcggcgagaagatcacgctgtgcatttcggtgctgctgtcactcaccgtcttcctgctgctcatcactgagatcatcccgtccacctcgctggtcatcccgctcatcggcgagtacctgctgttcaccatgatcttcgtcaccctgtccatcgtcatcaccgtcttcgtgctcaatgtgcaccaccgctcccccagcacccacaccatgccccactgggtgcggggggcccttctgggctgtgtgccccggtggcttctgatgaaccggcccccaccacccgtggagctctgccaccccctacgcctgaagctcagcccctcttatcactggctggagagcaacgtggatgccgaggagagggaggtggtggtggaggaggaggacagatgggcatgtgcaggtcatgtggccccctctgtgggcaccctctgcagccacggccacctgcactctggggcctcaggtcccaaggctgaggctctgctgcaggagggtgagctgctgctatcaccccacatgcagaaggcactggaaggtgtgcactacattgccgaccacctgcggtctgaggatgctgactcttcggtgaaggaggactggaagtatgttgccatggtcatcgacaggatcttcctctggctgtttatcatcgtctgcttcctggggaccatcggcctctttctgcctccgttcctagctggaatgatctgactgcacctccctcgagctggctcccagggcacccccgctgaccatcttttgaccgtctctgctacagctgcctctggtgtcccctttgggatgagcaggtgcctctccgcggagtctggacactgacccagggattgcaggcttccatccagcttaacgttattgtaccagggctgacagcctgctgggtgcaaagccctgttttggatacggaggagctggggaagctctgcagaaggtcgcaatagtgtggtgaccaagtggggcagagtaagattctcctggaggagcagtgcagaccctaagtgacagaagggtcaaccagggggacagtggggccagggtgacgaggaagggaatgcagacctcaaaggaggggccgtgggggcaaaggggagggttcttggatgtggaagggctttgaacaatgtttagatttggagatgagcccaaagtgccagggagaacagccaggtgaggtgggaggttggagagccaggtgaggtctctgtaagtcaggctggggttgaagtttggagtctgtccgagtttgcagggtgctgagctgtatggtccagcaggggagtaataagggctcttctggaaggggaggaagcgggaggcagggcctgcacctgatgtggaggtacagggcagatcttccctaccggggagggatggatggttggatacaggtggctgggctattccatccatctggaagcacatttgagcctccaggcttctccttgacgtcattcctctccttccttgctgcaaaatggctctgcaccagccggcccccaggaggtctggcagagctgagagccatggcctgcaggggctccatatgtccctacgcgtgcagcaggcaaacaagaaagaccatcctgagctgctcctgacccacctcaaactcatctcatttggcctgtcctccctcccttcacccctccttccctccccaggaaccctgttccctgtgcctggctccatcaggaggaggcctcacttgggagttgaagatctttgcctttagttcctttgattctgaacttctcaaaggcaggtactctgcctgttatttttcccacccccagcacctagcacagcgccgggtgagtggggtcagcacttagggcgtttgttctgagtggttgaggggagcaagctggattgtttgggccccaggactgttgtgtagatggcaaagctgtggtcccgtcccttatcagcctgcctcgtctctcccagagccccgaggtgtgttgacctgctctgaacccttcagagcagcctgtgtgtgcaccttggaatgcaatgcaccaccccacagtctgaggctgcacccaggatcccaggccgagctgctgctcctgggatcgggcaacagacctccccccaactctgtccagactggagggtgggacattggcagctaacagatgtgggcatcgggttctcgggacagcatggaggctccaggcaggaagccgagcagggcgagcttccagtttccttttggtcctaggggtcccctccttccaaaccccaaaatgtctctccctgacactctcaggggaaaccagcctggctgtgacgccctggcccaggccctgccatgcctcacttctctcccacaacccccctgctcatggcacatctggtctctggctcctgtctactcgtgtgcatgcagcccccagcgccccctctcctcccacttgctctccggaggcctcagagctctcgggtccaggctcccagacccactctcctgagacagtgatgttcacttctgttatccatgtctcccatccatcttgcatgtgaataaagagattaaataaagctgcacctactgctg

SEQ ID NO: 15041 - DNA, 2245 bp, Artificial Sequence
  derived and/or modified sequence
tttcttgggcttgctcaggttcggtggtgagaggaagcctcgcagaatccagcagaatcctcacagaatccagcagcagctctgctggggacatggtccatggtgcaacccacagcaaagccctgacctgacctcctgatgctcaggagaagccatgggcccctcctgtcctgtgttcctgtccttcacaaagctcagcctgtggtggctccttctgaccccagcaggtggagaggaagctaagcgcccacctcccagggctcctggagacccactctcctctcccagtcccacggcattgccgcagggaggctcgcataccgagactgaggaccggctcttcaaacacctcttccggggctacaaccgctgggcgcgcccggtgcccaacacttcagacgtggtgattgtgcgctttggactgtccatcgctcagctcatcgatgtggatgagaagaaccaaatgatgaccaccaacgtctggctaaaacaggagtggagcgactacaaactgcgctggaaccccactgattttggcaacatcacatctctcagggtcccttctgagatgatctggatccccgacattgttctctacaacaatgcagatggggagtttgcagtgacccacatgaccaaggcccacctcttctccacgggcactgtgcactgggtgcccccggccatctacaagagctcctgcagcatcgacgtcaccttcttccccttcgaccagcagaactgcaagatgaagtttggctcctggacttatgacaaggccaagatcgacctggagcagatggagcagactgtggacctgaaggactactgggagagcggcgagtgggccatcgtcaatgccacgggcacctacaacagcaagaagtacgactgctgcgccgagatctaccccgacgtcacctacgccttcgtcatccggcggctgccgctcttctacaccatcaacctcatcatcccctgcctgctcatctcctgcctcactgtgctggtcttctacctgccctccgactgcggcgagaagatcacgctgtgcatttcggtgctgctgtcactcaccgtcttcctgctgctcatcactgagatcatcccgtccacctcgctggtcatcccgctcatcggcgagtacctgctgttcaccatgatcttcgtcaccctgtccatcgtcatcaccgtcttcgtgctcaatgtgcaccaccgctcccccagcacccacaccatgccccactgggtgcggggggcccttctgggctgtgtgccccggtggcttctgatgaaccggcccccaccacccgtggagctctgccaccccctacgcctgaagctcagcccctcttatcactggctggagagcaacgtggatgccgaggagagggaggtggtggtggaggaggaggacagatgggcatgtgcaggtcatgtggccccctctgtgggcaccctctgcagccacggccacctgcactctggggcctcaggtcccaaggctgaggctctgctgcaggagggtgagctgctgctatcaccccacatgcagaaggcactggaaggtgtgcactacattgccgaccacctgcggtctgaggatgctgactcttcggtgaaggaggactggaagtatgttgccatggtcatcgacaggatcttcctctggctgtttatcatcgtctgcttcctggggaccatcggcctctttctgcctccgttcctagctggaatgatctgactgcacctccctcgagctggctcccagggcacccccgctgaccatcttttgaccgtctctgctacagctgcctctggtgtcccctttgggatgagcaggtgcctctccgcggagtctggacactgacccagggattgcaggcttccatccagcttaacgttattgtaccagggctgacagcctgctgggtgcaaagccctgttttggatacggaggagctggggaagctctgcagaaggtcgcaatagtgtggtgaccaagtggggcagagtaagattctcctggaggagcagtgcagaccctaagtgacagaagggtcaaccagggggacagtggggccagggtgacgaggaagggaatgcagacctcaaaggaggggccgtgggggcaaaggggagggttcttggatgtggaagggctttgaacaatgtttagatttggagatgagcccaaagtgccagggagaacagccaggtgaggtgggaggttggagagccaggt

SEQ ID NO: 15042 - DNA, 1590 bp, Artificial Sequence
  derived and/or modified sequence
atgggccccagctgccccgtgttcctgagcttcaccaagctgagcctgtggtggctgctgctgacccccgccggcggcgaggaggccaagagacccccccccagagcccccggcgaccccctgagcagccccagccccaccgccctgccccagggcggcagccacaccgagaccgaggacagactgttcaagcacctgttcagaggctacaacagatgggccagacccgtgcccaacaccagcgacgtggtgatcgtgagattcggcctgagcatcgcccagctgatcgacgtggacgagaagaaccagatgatgaccaccaacgtgtggctgaagcaggagtggagcgactacaagctgagatggaaccccaccgacttcggcaacatcaccagcctgagagtgcccagcgagatgatctggatccccgacatcgtgctgtacaacaacgccgacggcgagttcgccgtgacccacatgaccaaggcccacctgttcagcaccggcaccgtgcactgggtgccccccgccatctacaagagcagctgcagcatcgacgtgaccttcttccccttcgaccagcagaactgcaagatgaagttcggcagctggacctacgacaaggccaagatcgacctggagcagatggagcagaccgtggacctgaaggactactgggagagcggcgagtgggccatcgtgaacgccaccggcacctacaacagcaagaagtacgactgctgcgccgagatctaccccgacgtgacctacgccttcgtgatcagaagactgcccctgttctacaccatcaacctgatcatcccctgcctgctgatcagctgcctgaccgtgctggtgttctacctgcccagcgactgcggcgagaagatcaccctgtgcatcagcgtgctgctgagcctgaccgtgttcctgctgctgatcaccgagatcatccccagcaccagcctggtgatccccctgatcggcgagtacctgctgttcaccatgatcttcgtgaccctgagcatcgtgatcaccgtgttcgtgctgaacgtgcaccacagaagccccagcacccacaccatgccccactgggtgagaggcgccctgctgggctgcgtgcccagatggctgctgatgaacagaccccccccccccgtggagctgtgccaccccctgagactgaagctgagccccagctaccactggctggagagcaacgtggacgccgaggagagagaggtggtggtggaggaggaggacagatgggcctgcgccggccacgtggcccccagcgtgggcaccctgtgcagccacggccacctgcacagcggcgccagcggccccaaggccgaggccctgctgcaggagggcgagctgctgctgagcccccacatgcagaaggccctggagggcgtgcactacatcgccgaccacctgagaagcgaggacgccgacagcagcgtgaaggaggactggaagtacgtggccatggtgatcgacagaatcttcctgtggctgttcatcatcgtgtgcttcctgggcaccatcggcctgttcctgccccccttcctggccggcatgatctag

SEQ ID NO: 15043 - protein, 505 aa, Artificial Sequence
  derived and/or modified sequence
MGSGPLSLPLALSPPRLLLLLLLSLLPVARASEAEHRLFERLFEDYNEIIRPVANVSDPVIIHFEVSMSQLVKVDEVNQIMETNLWLKQIWNDYKLKWNPSDYGGAEFMRVPAQKIWKPDIVLYNNAVGDFQVDDKTKALLKYTGEVTWIPPAIFKSSCKIDVTYFPFDYQNCTMKFGSWSYDKAKIDLVLIGSSMNLKDYWESGEWAIIKAPGYKHDIKYNCCEEIYPDITYSLYIRRLPLFYTINLIIPCLLISFLTVLVFYLPSDCGEKVTLCISVLLSLTVFLLVITETIPSTSLVIPLIGEYLLFTMIFVTLSIVITVFVLNVHYRTPTTHTMPSWVKTVFLNLLPRVMFMTRPTSNEGNAQKPRPLYGAELSNLNCFSRAESKGCKEGYPCQDGMCGYCHHRRIKISNFSANLTRSSSSESVDAVLSLSALSPEIKEAIQSVKYIAENMKAQNEAKEIQDDWKYVAMVIDRIFLWVFTLVCILGTAGLFLQPLMAREDA

SEQ ID NO: 15044 - DNA, 1518 bp, Artificial Sequence
  derived and/or modified sequence
atgggttcagggccgctgtccctcccactggcactgtcccccccccgacttctcctgctactgctcctctctctgctgcctgttgctcgcgcatctgaagccgagcaccgcctctttgagagattattcgaagattacaatgagatcattcggccagtggcaaacgtgtctgaccccgttatcatccattttgaagtgtccatgagccagctggtaaaagtggacgaggtcaatcagataatggaaacaaacctgtggctgaaacaaatatggaacgactacaaactgaaatggaacccatcagactatggaggtgccgagttcatgcgggtgcccgctcaaaagatatggaagcccgacatcgttctctataacaatgctgtgggagacttccaggtggatgataagaccaaagctcttctcaagtatactggtgaagtgacatggattccaccagctatcttcaagagcagttgcaagatcgatgtgacatactttccctttgattaccaaaattgtaccatgaaattcgggtcctggagttatgataaagcaaaaatcgacctggtcctcatcggctcctccatgaatctgaaagactactgggagagtggagaatgggctattatcaaagctccaggttataagcacgacattaagtacaattgctgtgaggaaatctatcctgatatcacttatagcttatatatcagacgtctgcccctcttctacactatcaacctgattattccatgcctgttgatttcgttcctcaccgtattagttttttacctcccctctgactgcggggagaaggtgacactgtgcatttcggttctgctgtccctaactgtatttttactcgtcattacagaaaccattccctcgactagcttagtaatacccttaatcggtgaatatctgctcttcactatgatcttcgtgactttgagtattgtcattacagtgttcgtgctgaatgtgcactaccgaacgcctactacacacaccatgcccagctgggtgaagacagtgttcctgaatctactgcctcgtgtgatgttcatgacacgacccaccagcaacgagggcaacgcccagaaacctagaccactgtacggtgccgaattgagcaacttaaattgcttctccagagccgagagcaaaggatgcaaggaagggtacccctgtcaggacggaatgtgcgggtattgccatcatagaaggattaaaattagtaacttttcggccaacctgacccgctcctcttcatccgaatctgtggatgctgttctgagcctctctgcactttctcctgaaataaaagaggctattcagagcgtaaaatatattgccgagaacatgaaggcgcagaacgaggccaaagagatacaggacgactggaaatatgtcgccatggtgattgataggatttttctctgggtgtttacgcttgtgtgtatactgggtacagcaggtctgtttttgcagcccctgatggcccgggaggacgcttag

SEQ ID NO: 15045 - DNA, 1518 bp, Artificial Sequence
  derived and/or modified sequence
atggggagcggtcccttgtctcttcctcttgcattaagccctccccggttgttactcctgttactcctgagccttcttcccgtggcaagagcctctgaggccgagcaccggctgttcgaacgactgttcgaggattacaatgagatcattaggccagtagctaacgtgtccgaccccgtcatcatccacttcgaggtttccatgtctcagctcgtgaaagttgacgaggtcaatcagataatggaaaccaatctctggcttaagcagatctggaatgactacaagttgaagtggaatccctccgattatggtggtgctgaatttatgcgcgtgccggcacagaaaatctggaaacctgatattgtcctctacaacaatgcagtgggagattttcaggtggacgacaaaacaaaagccctgttgaagtacactggcgaggttacatggattcctcctgccatatttaagtcatcttgtaagattgacgttacgtatttccctttcgattaccaaaattgtacaatgaagtttggctcttggagctacgacaaggccaaaattgacctcgtgctgatcggaagtagcatgaatctcaaggactactgggaaagcggagagtgggccattattaaagccccaggctacaaacacgatattaaatacaactgttgcgaggagatctaccctgatataacctattcactctatatccgccgactgcccttgttttatacgatcaatctcatcatcccatgcttactgatctcatttctcactgtcttagtgttttacttgccaagcgattgtggggaaaaggtgactctgtgcatcagtgtcttgctcagtctaacggtgtttctcctcgttattactgaaaccattcctagcaccagcctggtcattccattgatcggggaatatctgctgttcaccatgatcttcgtcactctctctattgttattacagtgttcgttctgaatgttcactacaggacacccaccacgcacacaatgccttcatgggtcaaaaccgtgtttcttaatcttctgccgagagtgatgtttatgactagacccacttccaatgagggcaacgcccagaaaccccgccccctgtatggcgccgagctcagcaacctgaattgtttttccagagcagagtctaaaggatgcaaagaaggctatccttgtcaggatggcatgtgcggttattgtcaccacaggaggatcaaaatttctaatttttcagctaacctgaccagaagtagttcatccgagtctgtggatgctgtcctgtctctcagcgccctttccccagagatcaaagaagctattcagtcggtgaaatacatcgcagaaaacatgaaggcccagaatgaggctaaagaaattcaagatgactggaagtatgtagccatggtgatcgaccggatcttcctgtgggtctttaccctggtatgtatcttaggtactgccgggctgttcctgcaacctctgatggcacgtgaggacgcttag

SEQ ID NO: 15046 - DNA, 1518 bp, Artificial Sequence
  derived and/or modified sequence
atgggcagcggccccctgagcctgcccctggccctgagccccccccggctgctgctgctgctgctgctgagcctgctgcctgtggcccgggccagcgaggccgagcaccggctgtttgagcggctgtttgaggactacaatgagatcatccggcctgtggccaacgtgtctgaccctgtgatcatccactttgaggtgtccatgagccagctggtgaaggtggatgaggtgaaccagatcatggagaccaacctgtggctgaagcagatctggaatgactacaagctgaagtggaaccccagcgactatggaggagctgagttcatgagggtgcctgcccagaagatctggaagccagacatcgtgctgtacaacaatgctgtgggggacttccaggtggatgacaagaccaaggccctgctgaagtacaccggggaggtgacctggatccccccagccatcttcaagagcagctgcaagattgatgtgacctacttcccctttgactaccagaactgcaccatgaagtttggctcctggagctatgacaaggccaagattgacctggtgctgattggcagctccatgaacctgaaggactactgggagagcggggagtgggccatcatcaaggcccctggctacaagcatgacatcaagtacaactgctgtgaggagatctacccagacatcacctacagcctgtacatccggcggctgcccctcttctacaccatcaacctgatcatcccctgcctgctgatctccttcctgactgtgctggtgttctacctgcccagcgactgtggggagaaggtgaccctgtgcatctctgtgctgctgagcctgaccgtcttcctgctggtgatcacagagaccatccccagcaccagcctggtgatccccctcatcggggagtacctgctcttcaccatgatctttgtgaccctgagcatcgtcatcaccgtgtttgtgctgaatgtgcactaccgcacccccaccacccacaccatgcccagctgggtgaagacagtgttcctgaacctgctgccccgggtgatgttcatgacccggcccaccagcaatgaaggaaatgcccagaagccccggcccctgtatggagctgagctgagcaacctgaactgcttcagcagagctgagagcaagggctgcaaggagggctacccctgccaggacggcatgtgtggctactgccaccaccggcgcatcaagatcagcaacttcagcgccaacctgaccaggagcagcagcagcgagagcgtggatgctgtgctgagcctgagcgccctgagccctgagatcaaggaggccatccagagcgtgaagtacatcgccgagaacatgaaggcccagaatgaggccaaggagatccaggatgactggaagtatgtggccatggtgattgaccgcatcttcctgtgggtgttcaccctggtgtgcatcctgggcacagctggcctcttcctgcagcccctgatggccagagaagatgcctag

SEQ ID NO: 15047 - DNA, 1518 bp, Artificial Sequence
  derived and/or modified sequence
atgggcagcggccccctgagcctgcccctggccctgagcccccccaggctgctactcctgcttttgctcagcttgctgcccgtagcgagggcatctgaggctgagcaccgcctctttgaacggctgtttgaggactacaatgagatcattcggcctgtcgccaatgtgtccgaccccgtgataatacacttcgaggtcagcatgtcccagctagtcaaggtggacgaggtcaaccagataatggaaactaatctgtggctgaagcaaatctggaatgattataagctgaaatggaacccgtctgactacggcggggccgagtttatgagggtgccggcgcagaagatatggaaaccggacatagtcctgtataacaacgccgttggagacttccaggtggatgacaaaaccaaggccctgcttaaatatacaggcgaggtgacttggatccctcctgcgattttcaagagtagctgtaagatcgatgtgacgtatttcccattcgattaccagaattgcacgatgaagtttgggtcttggtcttacgataaggccaagatcgatttagtcttaatcggctcatccatgaacttgaaggattattgggagtccggcgagtgggccattatcaaggctcctggatataagcacgatatcaaatacaactgttgcgaggagatctaccccgacataacttatagtctgtatattcggcggctgcccctattctatacaattaacctgattatcccatgcttgctgatctcgttccttaccgtactggttttttatttaccctctgactgtggcgagaaagtgaccttgtgtatcagcgtgcttctgtccttgacagtttttctgctggtgattaccgaaacaattcccagtacttccctcgtaatccccctgatcggcgagtatctcctgttcactatgatttttgtgaccttatcaatagtgatcaccgtattcgttttgaacgtccattatcgcacacctactacccacaccatgccatcctgggtgaaaacagtgttcctaaatctactgccaagagttatgttcatgacacgtcctacatcaaatgagggcaacgctcaaaagccacggcccctctatggtgctgagctctccaacctgaactgttttagccgagctgagagcaagggctgtaaagaggggtatccatgtcaggacggtatgtgtggttactgccaccacaggcgtattaagattagcaatttttccgccaatctgacgcggagtagctcttcggagtccgtggacgccgtgttgtcactttcagccctttcaccagaaattaaagaggccatccagagtgtgaagtatatcgccgaaaatatgaaggcccagaatgaagccaaagagattcaggacgactggaagtacgtggccatggtcatcgatagaatattcctgtgggtgtttactttggtttgcatcttgggcaccgcaggactatttctgcagccacttatggctcgggaggacgcttag

SEQ ID NO: 15048 - DNA, 1518 bp, Artificial Sequence
  derived and/or modified sequence
atgggcagcggccccctgagcctgcccctggccctgagcccccccagactgctcttactcctgctcctttccctcctccccgtcgctcgggcttccgaagccgagcatcggttgtttgagagactgttcgaggactataacgaaatcattaggcccgtcgctaacgtatccgatcctgtgattatccattttgaggtcagtatgtcccagttggttaaggtcgatgaggtgaaccaaatcatggaaacaaacctatggctaaaacagatctggaatgactacaaactcaagtggaacccatctgattacggtggagctgagtttatgagggtgcccgctcagaaaatttggaaacctgacatagtgctgtataataacgccgtgggcgatttccaagtcgacgacaaaaccaaggctttacttaaatacactggggaggtcacctggattcccccagcaatttttaagtcatcttgtaagatcgatgttacatactttccctttgattatcaaaattgtacgatgaagttcgggtcatggtcctacgacaaagcaaagattgacttggttctcataggcagcagtatgaacctgaaagattactgggaatcaggggagtgggctattatcaaagctcctgggtacaagcacgacattaagtacaactgttgcgaggaaatctatcccgacatcacctattcactgtatatccggagactgccgctgttctacacaatcaatctgatcataccatgcttgttaatttcttttcttactgtgttggtcttctacctgccttcggattgtggcgaaaaagtgaccctgtgtatctccgtcctgttgagtctcacggtgtttctcctggttattactgaaactattccttccacgtcactggtcattcctttaataggtgagtatcttctttttaccatgatctttgtgacacttagtattgtgatcacggtattcgtgttgaatgtccattatcgcactccaactactcacactatgccaagctgggtcaaaacggtgtttctgaacctgctgcctcgggttatgtttatgactaggcctacctctaacgaggggaacgcacaaaaacccagacccttgtacggcgccgagctctccaatctcaactgtttcagtagagccgagagcaagggttgtaaagaaggatatccctgccaggacggaatgtgcgggtattgtcaccaccgccgaatcaaaatcagcaatttttctgctaatctgacccggtcttcatcgtcagagtccgttgatgccgtactgtctctgtccgcgcttagcccggaaattaaagaggccatccagtccgtcaaatacatcgcagagaatatgaaggcccagaatgaagctaaagaaatacaggatgactggaagtacgtagcgatggtaattgacaggatttttctatgggtgttcactctggtgtgcatcctgggaactgccggcttgtttctgcaaccgctcatggccagagaggacgcctag

SEQ ID NO: 15049 - DNA, 1518 bp, Artificial Sequence
  derived and/or modified sequence
atggggtccggccctctgagtctgcctctggctctgagcccccctagactgttactgctgctcctgctcagcctgctaccagtagccagagcatctgaagccgagcatcgactgtttgagcggctgtttgaagactataacgagattatccggccagtcgcaaatgtcagcgaccccgttattatccactttgaagtgagtatgtcacaactggtgaaagtcgatgaagtcaatcagatcatggaaaccaacctgtggcttaaacaaatctggaacgattataagctcaagtggaatcctagcgactatgggggagctgagttcatgcgggtgcccgcacagaaaatctggaagcccgacatcgtcctgtacaacaacgcagttggcgacttccaagtggacgataagaccaaggccctgttgaaatacacaggcgaggtcacctggatacctccggcaattttcaagtctagttgcaaaattgatgtgacctactttccttttgattaccagaactgcaccatgaagttcggatcctggagctatgataaagccaagatcgatctcgtcctgattggcagctccatgaatcttaaagactattgggagtccggggagtgggctatcataaaggcaccaggttacaagcatgacattaaatataattgctgcgaagagatttatccagacatcacttatagcttgtatatcaggcggctgcccttgttttatactatcaatctcatcatcccctgtttgctaatatctttcctgacagtcttggtgttttatctccccagtgactgtggggagaaagtgacgctgtgcatatcagtccttctgtccttgactgtgtttctgctggttattaccgaaaccatcccatctaccagtttagtaatccccctgattggcgagtaccttctgtttacaatgatctttgtcactttgtcaatcgtgattacggtcttcgtcctgaacgtacattaccgcacaccaaccacccacaccatgccgagctgggtcaaaaccgtgttcctgaatcttcttccacgcgtgatgttcatgactagaccgacttcaaatgaaggcaacgcccaaaaaccacgccctttatacggcgcagagttatctaacctgaattgcttctctcgtgcagaaagcaaaggttgcaaggagggctacccttgtcaggacggaatgtgcggttattgtcaccatcgccgtatcaaaatctctaatttttcagcgaatctgactcggtccagttccagcgaatctgtagacgcggtgttgagcttatctgcactgagccctgaaattaaagaggcaatccagtccgtgaaatatattgcagagaatatgaaagcacagaacgaggcgaaagaaatccaagatgattggaaatatgttgcaatggtgatagacagaatctttctgtgggtatttacattggtttgtatcctcggtaccgctggtctctttctgcagcctctgatggcacgcgaagacgcctag

SEQ ID NO: 15050 - DNA, 1518 bp, Artificial Sequence
  derived and/or modified sequence
atgggttcgggacccttgagcctgcctttggctctgagtcccccacgccttctgttgctgctgttgctaagcctgcttcctgttgccagggcttcagaagcagaacaccggctcttcgaacgcctcttcgaggattacaacgagatcattaggcccgtggccaacgtgtccgacccggtcatcatacatttcgaagtgagtatgtctcagctggttaaagtcgatgaagtgaaccagatcatggaaacaaatctatggcttaaacagatttggaacgattacaaattgaagtggaatccctctgattatggcggagccgaattcatgcgggtgcctgcacagaaaatctggaaacctgacatcgtcctgtataacaacgcagtcggtgatttccaggtagacgataaaacgaaagcattactgaaatatacgggtgaggttacttggatccccccagcgatctttaaatcttcgtgtaaaatcgacgttacgtacttccccttcgactaccagaattgcactatgaaattcggtagctggagttatgataaggcaaaaatcgacctggtcctgatcgggtcgtcaatgaacctgaaagattactgggaatctggagaatgggcaattattaaggcacccggttacaagcatgacattaagtacaactgctgcgaggagatctaccccgatataacatatagcttgtatatccggcgtctgcctttgttctacacgatcaacctgatcattccatgcctcctaatctcatttctgactgtgcttgtgttctaccttccaagcgactgcggggagaaagtgactctgtgcatatcggtgcttctttccctgaccgtgttcctgctcgtcatcacggaaaccattccttcaacatccctggtgatccctcttataggagaatatctgctatttacaatgatcttcgtaactctgagtattgtgattacagtgttcgtgctcaacgtacattaccgcacgcctaccactcacactatgcctagctgggtgaagacagtgttcctcaacctgctgcctcgggtcatgtttatgacgcgtcccacaagcaatgagggcaacgcccaaaagccacggccattgtacggcgcagaactgagcaaccttaactgtttttcaagagccgagagcaagggatgtaaggaaggatacccctgtcaggatggcatgtgtggctactgtcatcacaggagaatcaaaatttccaattttagcgcaaacctgacgaggtccagtagttctgagagcgtggatgcagtgctgagtctctccgctctgtccccggagatcaaagaggccatacagtctgttaaatacatcgcagaaaacatgaaggctcaaaacgaggccaaggagatacaggacgattggaagtacgttgccatggtgatcgaccggatcttcctgtgggtatttactcttgtatgtatccttggtactgcagggctgttcttacagcccctgatggccagagaagacgcatag

SEQ ID NO: 15051 - DNA, 3202 bp, Artificial Sequence
  derived and/or modified sequence
ccttcctggtggtggtgacagcacctgctcagatctggtcggacgccgccggccggagcacccagcccggcggagaaggagctcgcccggcgctggggactgggacctggagccccttcccctaccgcacgtacgccccgccccgcgcacgcccgcccgcccgcccgcgcctggcgcagcttcactccggatggttcctgtcctcccgcgggtccgagggcgctggaaacccagcggcggcgaagcggagaggagccccgcgcgtctccgcccgcacggctccaggtctggggtctgcgctggagccgcgcggggagaggccgtctctgcgaccgccgcgcccgctcccgaccgtccgggtccgcggccagcccggccaccagccatgggctctggcccgctctcgctgcccctggcgctgtcgccgccgcggctgctgctgctgctgctgctgtctctgctgccagtggccagggcctcagaggctgagcaccgtctatttgagcggctgtttgaagattacaatgagatcatccggcctgtagccaacgtgtctgacccagtcatcatccatttcgaggtgtccatgtctcagctggtgaaggtggatgaagtaaaccagatcatggagaccaacctgtggctcaagcaaatctggaatgactacaagctgaaatggaacccctctgactatggtggggcagagttcatgcgtgtccctgcacagaagatctggaagccagacattgtgctgtataacaatgctgttggggatttccaggtggacgacaagaccaaagccttactcaagtacactggggaggtgacttggatacctccggccatctttaagagctcctgtaaaatcgacgtgacctacttcccgtttgattaccaaaactgtaccatgaagttcggttcctggtcctacgataaggcgaaaatcgatctggtcctgatcggctcttccatgaacctcaaggactattgggagagcggcgagtgggccatcatcaaagccccaggctacaaacacgacatcaagtacaactgctgcgaggagatctaccccgacatcacatactcgctgtacatccggcgcctgcccttgttctacaccatcaacctcatcatcccctgcctgctcatctccttcctcactgtgctcgtcttctacctgccctccgactgcggtgagaaggtgaccctgtgcatttctgtcctcctctccctgacggtgtttctcctggtgatcactgagaccatcccttccacctcgctggtcatccccctgattggagagtacctcctgttcaccatgatttttgtaaccttgtccatcgtcatcaccgtcttcgtgctcaacgtgcactacagaaccccgacgacacacacaatgccctcatgggtgaagactgtattcttgaacctgctccccagggtcatgttcatgaccaggccaacaagcaacgagggcaacgctcagaagccgaggcccctctacggtgccgagctctcaaatctgaattgcttcagccgcgcagagtccaaaggctgcaaggagggctacccctgccaggacgggatgtgtggttactgccaccaccgcaggataaaaatctccaatttcagtgctaacctcacgagaagctctagttctgaatctgttgatgctgtgctgtccctctctgctttgtcaccagaaatcaaagaagccatccaaagtgtcaagtatattgctgaaaatatgaaagcacaaaatgaagccaaagagattcaagatgattggaagtatgttgccatggtgattgatcgtatttttctgtgggttttcaccctggtgtgcattctagggacagcaggattgtttctgcaacccctgatggccagggaagatgcataagcactaagctgtgtgcctgcctgggagacttccttgtgtcagggcaggaggaggctgcttcctagtaagaacgtactttctgttatcaagctaccagctttgtttttggcatttcgaggtttacttattttccacttatcttggaatcatgcaaaaaaaaaaatgtcaagagtatttattaccgataaatgaacatttaactagcctttttggtatggtaaagagatgtcaaaatgtgattctatgtgattagtatgctatgctatggaatatacatgtaaaaatgtttccttttagttgttgaaacaaaactggatagaaaaatgctgttcagaaatatgaaaagtcattcagttatcactacagatctcccagtaatttttcttatttagcccataatctctttgaaggtttatactaattcagcaatcccccatcgttacccatttcttaccatgcatttctcgttctttactgggtctaaagggctatgcctccatttcagagagcttcaactacttctcttgcatacttctaaattataccatgagaaatcatgcctagttattcattgttaatataactgtcttagtacaccataaactgggtggattataaacaacagaaacttctcagttttggaggttgggaggtccaaggtcaaggcaccagcaaatttggtgtctggtgagggtcctcttcctcaaagggtgccttctagctgtgtcctcacatgactgaagggactagctatctctgtggggtctattttataagggcactaaccccattcatgagagcagagcccccatggcctaatcacctttccaaggccccaccttctatctaagacaatcacgctgggaataggtttcaacatatgaattgggggaggacacatttggaccacagcatgaacctttagaacagggtttctcagccttagcactatggacattttgggctggataaatatgtgttggtacagaatgggggtatcctgtgcattgtaggatctttagcagtaccctagcctcaactcactagatgccaatgacataccttgcttcttcaccagttatgataaccaagaatgtctccattgttaaatgttcccttaggagcaaaattgcccctggttgagaaacattgctttagacaaattgttaagagtatcatgtactacacttctgaaacttaacgtgatcatcaccactgacagatgattcacagagactgtttgaatcttgtctcactagtttttcctgtgcaaaaataaaatggacagaattgcagccc

SEQ ID NO: 15052 - DNA, 1889 bp, Artificial Sequence
  derived and/or modified sequence
gaggccgtctctgcgaccgccgcgcccgctcccgaccgtccgggtccgcggccagcccggccaccagccatgggctctggcccgctctcgctgcccctggcgctgtcgccgccgcggctgctgctgctgctgctgctgtctctgctgccagtggccagggcctcagaggctgagcaccgtctatttgagcggctgtttgaagattacaatgagatcatccggcctgtagccaacgtgtctgacccagtcatcatccatttcgaggtgtccatgtctcagctggtgaaggtggatgaagtaaaccagatcatggagaccaacctgtggctcaagcaaatctggaatgactacaagctgaaatggaacccctctgactatggtggggcagagttcatgcgtgtccctgcacagaagatctggaagccagacattgtgctgtataacaatgctgttggggatttccaggtggacgacaagaccaaagccttactcaagtacactggggaggtgacttggatacctccggccatctttaagagctcctgtaaaatcgacgtgacctacttcccgtttgattaccaaaactgtaccatgaagttcggttcctggtcctacgataaggcgaaaatcgatctggtcctgatcggctcttccatgaacctcaaggactattgggagagcggcgagtgggccatcatcaaagccccaggctacaaacacgacatcaagtacaactgctgcgaggagatctaccccgacatcacatactcgctgtacatccggcgcctgcccttgttctacaccatcaacctcatcatcccctgcctgctcatctccttcctcactgtgctcgtcttctacctgccctccgactgcggtgagaaggtgaccctgtgcatttctgtcctcctctccctgacggtgtttctcctggtgatcactgagaccatcccttccacctcgctggtcatccccctgattggagagtacctcctgttcaccatgatttttgtaaccttgtccatcgtcatcaccgtcttcgtgctcaacgtgcactacagaaccccgacgacacacacaatgccctcatgggtgaagactgtattcttgaacctgctccccagggtcatgttcatgaccaggccaacaagcaacgagggcaacgctcagaagccgaggcccctctacggtgccgagctctcaaatctgaattgcttcagccgcgcagagtccaaaggctgcaaggagggctacccctgccaggacgggatgtgtggttactgccaccaccgcaggataaaaatctccaatttcagtgctaacctcacgagaagctctagttctgaatctgttgatgctgtgctgtccctctctgctttgtcaccagaaatcaaagaagccatccaaagtgtcaagtatattgctgaaaatatgaaagcacaaaatgaagccaaagagattcaagatgattggaagtatgttgccatggtgattgatcgtatttttctgtgggttttcaccctggtgtgcattctagggacagcaggattgtttctgcaacccctgatggccagggaagatgcataagcactaagctgtgtgcctgcctgggagacttccttgtgtcagggcaggaggaggctgcttcctagctggagtgcaatggcgtgatctcagctcaccgcaacctccgccacctgggttcaagcgattctcctgccgcagcctcccaggtagctgggattacaggaacaaaaagcccaagagatccaacaattgaaacgaaaagaaaagtccacagaaacatccgatcaagaacctgggctatgaatttccaatcttcaacaacctgttaggaaaaaaataaaaatgcattaaataattgtaaa

SEQ ID NO: 15053 - DNA, 1518 bp, Artificial Sequence
  derived and/or modified sequence
atgggcagcggccccctgagcctgcccctggccctgagcccccccagactgctgctgctgctgctgctgagcctgctgcccgtggccagagccagcgaggccgagcacagactgttcgagagactgttcgaggactacaacgagatcatcagacccgtggccaacgtgagcgaccccgtgatcatccacttcgaggtgagcatgagccagctggtgaaggtggacgaggtgaaccagatcatggagaccaacctgtggctgaagcagatctggaacgactacaagctgaagtggaaccccagcgactacggcggcgccgagttcatgagagtgcccgcccagaagatctggaagcccgacatcgtgctgtacaacaacgccgtgggcgacttccaggtggacgacaagaccaaggccctgctgaagtacaccggcgaggtgacctggatcccccccgccatcttcaagagcagctgcaagatcgacgtgacctacttccccttcgactaccagaactgcaccatgaagttcggcagctggagctacgacaaggccaagatcgacctggtgctgatcggcagcagcatgaacctgaaggactactgggagagcggcgagtgggccatcatcaaggcccccggctacaagcacgacatcaagtacaactgctgcgaggagatctaccccgacatcacctacagcctgtacatcagaagactgcccctgttctacaccatcaacctgatcatcccctgcctgctgatcagcttcctgaccgtgctggtgttctacctgcccagcgactgcggcgagaaggtgaccctgtgcatcagcgtgctgctgagcctgaccgtgttcctgctggtgatcaccgagaccatccccagcaccagcctggtgatccccctgatcggcgagtacctgctgttcaccatgatcttcgtgaccctgagcatcgtgatcaccgtgttcgtgctgaacgtgcactacagaacccccaccacccacaccatgcccagctgggtgaagaccgtgttcctgaacctgctgcccagagtgatgttcatgaccagacccaccagcaacgagggcaacgcccagaagcccagacccctgtacggcgccgagctgagcaacctgaactgcttcagcagagccgagagcaagggctgcaaggagggctacccctgccaggacggcatgtgcggctactgccaccacagaagaatcaagatcagcaacttcagcgccaacctgaccagaagcagcagcagcgagagcgtggacgccgtgctgagcctgagcgccctgagccccgagatcaaggaggccatccagagcgtgaagtacatcgccgagaacatgaaggcccagaacgaggccaaggagatccaggacgactggaagtacgtggccatggtgatcgacagaatcttcctgtgggtgttcaccctggtgtgcatcctgggcaccgccggcctgttcctgcagcccctgatggccagagaggacgcctag

SEQ ID NO: 15054 - protein, 533 aa, Artificial Sequence
  derived and/or modified sequence
APEPGEAPRLDRAHPGCACAELSLLWLCCCTFTSADGDFAVTHLTKAHLFHDGRVQWTPPAIYKSSCSIDVTFFPFDQQNCTMKFGSWTYDKAKIDLVNMHSRVDQLDFWESGEWVIVDAVGTYNTRKYECCAEIYPDITYAFVIRRLPLFYTINLIIPCLLISCLTVLVFYLPSECGEKITLCISVLLSLTVFLLLITEIIPSTSLVIPLIGEYLLFTMIFVTLSIVITVFVLNVHHRSPRTHTMPTWVRRVFLDIVPRLLLMKRPSVVKDNCRRLIESMHKMASAPRFWPEPEGEPPATSGTQSLHPPSPSFCVPLDVPAEPGPSCKSPSDQLPPQQPLEAEKASPHPSPGPCRPPHGTQAPGLAKARSLSVQHMSSPGEAVEGGVRCRSRSIQYCVPRDDAAPEADGQAAGALASRNTHSAELPPPDQPSPCKCTCKKEPSSVSPSATVKTRSTKAPPPHLPLSPALTRAVEGVQYIADHLKAEDTDFSVKEDWKYVAMVIDRIFLWMFIIVCLLGTVGLFLPPWLAGMI

SEQ ID NO: 15055 - protein, 627 aa, Artificial Sequence
  derived and/or modified sequence
MELGGPGAPRLLPPLLLLLGTGLLRASSHVETRAHAEERLLKKLFSGYNKWSRPVANISDVVLVRFGLSIAQLIDVDEKNQMMTTNVWVKQEWHDYKLRWDPADYENVTSIRIPSELIWRPDIVLYNNADGDFAVTHLTKAHLFHDGRVQWTPPAIYKSSCSIDVTFFPFDQQNCTMKFGSWTYDKAKIDLVNMHSRVDQLDFWESGEWVIVDAVGTYNTRKYECCAEIYPDITYAFVIRRLPLFYTINLIIPCLLISCLTVLVFYLPSECGEKITLCISVLLSLTVFLLLITEIIPSTSLVIPLIGEYLLFTMIFVTLSIVITVFVLNVHHRSPRTHTMPTWVRRVFLDIVPRLLLMKRPSVVKDNCRRLIESMHKMASAPRFWPEPEGEPPATSGTQSLHPPSPSFCVPLDVPAEPGPSCKSPSDQLPPQQPLEAEKASPHPSPGPCRPPHGTQAPGLAKARSLSVQHMSSPGEAVEGGVRCRSRSIQYCVPRDDAAPEADGQAAGALASRNTHSAELPPPDQPSPCKCTCKKEPSSVSPSATVKTRSTKAPPPHLPLSPALTRAVEGVQYIADHLKAEDTDFSVKEDWKYVAMVIDRIFLWMFIIVCLLGTVGLFLPPWLAGMI

SEQ ID NO: 15056 - DNA, 1884 bp, Artificial Sequence
  derived and/or modified sequence
atggagttaggtggccccggcgcacctcgccttctaccacccttgcttctgctgctcggcacgggtctgctccgcgcctcctcacacgtggaaaccagagcacatgccgaagagaggcttctgaaaaagttattctccgggtataataagtggtctcggccagttgcaaacatctccgatgtcgtccttgttcggtttgggctctccatcgcccagctgatcgacgtggacgaaaaaaatcagatgatgactaccaatgtctgggtgaagcaagaatggcacgactacaagctgagatgggatcctgcagactacgaaaatgtgacctctattaggatcccatccgagcttatctggaggcctgacatcgttttgtacaacaacgctgacggggacttcgctgtgactcacctgactaaagcccacctctttcacgatggaagggtgcagtggaccccaccggctatctataagtcctcatgctccattgacgtgacgtttttcccctttgaccaacagaattgtaccatgaagttcggctcttggacatatgacaaagcaaaaattgacctagtgaacatgcattctagggttgaccagctggatttttgggaatccggcgagtgggtgatagtggatgccgtaggaacttacaacacaagaaagtacgagtgttgcgccgagatttaccccgacatcacttacgcctttgtcatacgccgcttgcccctcttctacactatcaacttaatcatcccctgtttgctgatttcctgtctgaccgtgctggtgttttacctcccatccgaatgtggggaaaagatcactttgtgcataagcgtactgctgtctttaacagtgtttttgctcctcattacagagatcattccatccacaagcctagtcatcccactcattggagaatacttacttttcaccatgatcttcgtgaccttatcgatcgttattaccgtctttgtactgaatgtacaccatcgatcccctaggacgcatacaatgcctacttgggtaagaagagtgttcctcgatatcgttccacggctgctgttgatgaagaggccctctgtggtgaaagataattgcagaagattaatagaatcaatgcacaaaatggccagtgctcctaggttttggcctgaacctgaaggagagcctcccgccacctccgggactcagtccctgcaccccccctccccgtctttttgtgtgcccttggatgtgcccgcagagcctggccccagttgtaagtcccccagtgaccagctgccgcctcagcagccacttgaggcagagaaagcttccccacatcctagtccaggcccctgcagacctccacatggcacacaggccccaggtctggccaaggccagatcactaagtgtgcagcacatgagcagccccggggaggctgtcgaagggggcgttcgctgtcgatcacggagtatccagtattgtgtgccacgagacgacgctgcccccgaggccgacgggcaggccgccggcgctttggcgtctaggaacacccattccgcagagctgcctccccctgatcagcctagtccttgcaagtgcacttgcaagaaggagccttcatcggtcagtccctcggctaccgtaaaaacaagatctaccaaggccccgccaccgcatctgcctctatccccggcactcactagagccgtagaaggcgtccagtatattgccgatcacctcaaggccgaggacaccgacttttcagtcaaagaggattggaaatatgttgccatggtgatcgatcggatctttctctggatgtttattattgtttgcttactggggacagtgggcctgtttctgccaccctggcttgcgggaatgatctag

SEQ ID NO: 15057 - DNA, 78 bp, Artificial Sequence
  derived and/or modified sequence
atgcgggcaaagtggcgcaaaaaacgaatgaggcggcttaaaaggaagcggcgaaaaatgaggcagagatcgaagtag

SEQ ID NO: 15058 - DNA, 1884 bp, Artificial Sequence
  derived and/or modified sequence
atggagctgggcggccctggggccccccggctgctgccccccctgctgctgctgctgggcaccggcctgctgcgggccagcagccacgtggagacccgggcccacgccgaggagcggctgctgaagaagctgttcagcggctacaacaagtggagcaggcctgtggccaacatcagtgatgtggtgctggtgcgcttcggcctgagcatcgcccagctgattgatgtggatgagaagaaccagatgatgaccaccaacgtgtgggtgaagcaggagtggcatgactacaagctgcgctgggaccctgctgactatgaaaatgtgaccagcatccgcatccccagcgagctgatctggaggccagacatcgtgctgtacaacaatgctgatggagactttgctgtgacccacctgaccaaggcccacctgttccatgatggccgggtgcagtggaccccaccagccatctacaagagcagctgcagcattgatgtgaccttcttcccctttgaccagcagaactgcaccatgaagtttggctcctggacctatgacaaggccaagattgacctggtgaacatgcacagccgggtggaccagctggacttctgggagagcggggagtgggtgattgtggatgctgtgggcacctacaacaccaggaaatatgagtgctgtgccgagatctacccagacatcacctacgcctttgtgatccggcggctgcccctcttctacaccatcaacctgatcatcccctgcctgctgatcagctgcctgactgtgctggtgttctacctgcccagtgaatgtggggagaagatcaccctgtgcatctctgtgctgctgagcctgaccgtcttcctgctgctgatcacagagatcatccccagcaccagcctggtgatccccctcatcggggagtacctgctcttcaccatgatctttgtgaccctgagcatcgtcatcaccgtgtttgtgctgaatgtgcaccacaggagccccaggacccacaccatgcccacctgggtgagaagagtcttcctggacatcgtgccccggctgctgctgatgaagaggcccagcgtggtgaaggacaactgcagaagactcatcgagagcatgcacaagatggccagcgccccccgcttctggccagagcctgagggggagcccccagccaccagcggcacccagagcctgcacccccccagccccagcttctgtgtgcccctggatgtgcctgctgagcccggccccagctgcaagagccccagcgaccagctgcccccccagcagcccctggaggccgagaaggccagcccccaccccagccctggcccctgcaggcctcctcatggcacccaggcccctggcctggccaaggcccggagcctgtctgtgcagcacatgagcagccctggagaggccgtggagggcggcgtgcgctgccgcagccgcagcatccagtactgtgtgcccagagatgatgctgcccctgaggctgatggccaggccgccggggccctggccagcaggaacacccacagcgctgagctgcccccaccagaccagcccagcccctgcaagtgcacctgcaagaaggagcccagctctgtgagccccagcgccaccgtgaagaccaggagcaccaaggcccccccaccccacctgcccctgagccctgccctgaccagggctgtggagggcgtgcagtacatcgctgaccacctgaaggccgaggacacagacttctctgtgaaggaggactggaagtatgtggccatggtgattgaccgcatcttcctgtggatgttcatcatcgtgtgcctgctgggcaccgtgggcctcttcctgcccccctggctggccggcatgatctag

SEQ ID NO: 15059 - DNA, 1884 bp, Artificial Sequence
  derived and/or modified sequence
atggagctgggcggccccggcgccccccggctgctgccccccctgctgctgctcctggggacagggcttctgcgcgcctcaagccatgttgagacacgcgcccatgctgaggaaaggctgctgaaaaagctgttttcaggttacaataagtggtccaggcccgtggcaaacataagcgacgtcgtactggtgcggttcggactgagcatagcacagctgattgacgtcgacgagaaaaaccaaatgatgaccactaacgtatgggtgaagcaggagtggcatgattataagctgaggtgggatccagctgattacgaaaacgtcacatccatccgcatcccatcggagctcatttggagaccagacatcgtgttgtacaacaacgctgatggggattttgccgtgacccatctgactaaggcacacctgttccatgatggacgggtgcagtggactccaccggccatctataaatcctcctgcagcatcgatgtgacatttttcccatttgatcaacagaattgtacaatgaaatttgggagctggacttatgacaaggcaaagatcgacctcgtgaacatgcacagccgggtggatcagctggacttttgggagtccggcgagtgggtgatagtcgatgccgtaggtacatacaatacccggaaatatgaatgctgcgctgaaatctaccctgacataacctacgccttcgtcattagaagactgcccctgttttacaccattaatttaatcataccctgcttactcatttcctgtctgacagtcctcgtcttctatctgcctagcgagtgcggtgagaagatcactctgtgtatttcagtcctcctctcactgaccgtcttcttactgctgattacggagattatcccgtccacttcactagttatcccacttatcggcgaatacctgctgtttaccatgatatttgttacactgagcatcgtgataacagtgtttgttctgaatgtccaccatagatctcccagaacccacacaatgcccacttgggtacggcgtgtgttcctggacatcgtgccccggcttctgctcatgaaacgcccaagcgttgtcaaagataattgtcgcaggctcatcgaatcaatgcacaagatggccagcgccccccgcttctggccggagcccgagggagaacccccggccacatccggcacccaatccctgcaccctccctccccctccttctgtgtgcctctagatgtgccggccgaacccgggcccagttgcaagtcccccagcgaccagctgccgccacagcagcctttggaagccgagaaggcatccccccatcctagcccaggaccatgcagaccccctcacggaacccaagcccctggactcgccaaagcacgctccctgtccgtgcaacacatgagttcgcctggagaagccgtggagggcggcgttcgttgcaggagccgctccatccagtactgtgtgcccagagacgacgcggcacccgaagccgatggacaggccgctggggctctggcatctcgcaatacacacagtgcagaactgccgcctcctgatcagccctctccttgtaaatgtacctgtaaaaaagagccctcatccgtctcgcctagcgccaccgttaagacgagatctaccaaggcacctcccccacacttacccttgtctcccgccttaacacgtgcggtggagggcgtccagtatatcgcggatcatttgaaagccgaggatacagacttcagcgtcaaggaagattggaaatacgtggccatggtcatcgatcgcattttcctgtggatgtttataatcgtatgccttttgggcactgtgggcctttttctcccaccctggctggccggaatgatctag

SEQ ID NO: 15060 - DNA, 1884 bp, Artificial Sequence
  derived and/or modified sequence
atggagcttggaggacccggagcaccacgccttctgccccctcttctgctgctcttgggcacagggttactgagagcttcttcacatgtagagacccgggcacacgccgaggagaggctcttaaagaagctattctcgggttacaacaaatggtcccgccctgtggccaatatctctgatgttgttttagtacgttttggactaagtatcgcgcagctcattgatgtggacgaaaaaaatcagatgatgacaacgaatgtctgggtcaagcaagagtggcacgattataaattgcgatgggatcccgcagactatgaaaacgtgacctctatccggatacccagtgagctcatatggcgccctgacatcgttctgtataataacgcagacggggacttcgccgtgacacatttaacgaaggcgcacctatttcatgacggccgagtccagtggactcctcctgctatctacaagtcttcttgttctatcgacgtcaccttttttcccttcgatcagcagaactgtactatgaagtttggttcttggacctacgataaagccaagattgacctagtgaatatgcattcacgtgtggaccaactcgacttttgggagtcgggagaatgggtaattgtcgatgcagtgggaacttataataccagaaaatacgaatgttgcgccgagatctatcctgacattacttatgcttttgttatccgcagattgccacttttctacacaattaatctcattatcccgtgtctgcttatctcatgtctgactgttctcgtgttttacctcccatctgagtgtggcgagaagattacgctctgcatttctgtgcttctctctctcaccgtctttttgcttctgatcacagaaatcattccttccacctccctggttataccgttaattggcgagtatctcttgttcacaatgatatttgtaacgctgagtatagtcattaccgtgtttgtcctcaacgtccaccatcggtccccaagaacacacaccatgcccacatgggtgcggagagttttcctggatattgtcccgaggctgctgctgatgaagcgcccaagcgtagtgaaggataactgcagaagattgatagaatcaatgcacaagatggcatccgcccctcgcttctggcccgaaccagagggggagccgccagcaacttccggcactcaaagcctgcatcctccctcaccctccttctgtgttccactcgacgtgccagccgaacccggaccctcgtgcaagtccccctcggatcaattgcctccacagcagcctttagaggccgaaaaagccagcccccacccttcccctggcccttgccgtcctcctcatggtacacaagccccagggctcgcaaaagctcggagtcttagtgtgcagcatatgtcctctcccggagaggcagttgaaggtggggtccgctgtagaagtcgctccatccagtactgtgttccgagagatgatgcggctccagaagccgacgggcaggccgcaggggcacttgccagccgaaacacacactcagcagaactgccccctcccgatcagccaagcccatgcaaatgcacctgtaaaaaggagcctagcagcgtttctccgtccgcaaccgtaaaaactcgttctacgaaggcccctccaccacacctccccttgagccctgcacttactagagccgttgaaggggtgcaatacatcgctgatcatttgaaggccgaagataccgactttagcgtgaaagaagactggaaatatgtggccatggtcatcgatagaatttttttgtggatgtttattatcgtgtgtctcctggggactgtgggtctttttctcccaccttggctggccggaatgatttag

SEQ ID NO: 15061 - DNA, 4776 bp, Artificial Sequence
  derived and/or modified sequence
gctgaggcgggcagggccgggcggggccgcgccacggagcccacagcccggcgctccctgccgcgccgccgccgcaccgcgccccacaggagaagacgaaccgggcccggcggccgaagcggcccgcgaggcgcgggaggcatgaagttgggcgcgcacgggcctcgaagcggcggggagccgggagccgcccgcatctagagcccgcgaggtgcgtgcgccatggagctagggggccccggagcgccgcggctgctgccgccgctgctgctgcttctggggaccggcctcctgcgcgccagcagccatgtggagacccgggcccacgccgaggagcggctcctgaagaaactcttctccggttacaacaagtggtcccgacccgtggccaacatctcggacgtggtcctcgtccgcttcggcctgtccatcgctcagctcattgacgtggatgagaagaaccagatgatgaccacgaacgtatgggtgaagcaggagtggcacgactacaagctgcgctgggacccagctgactatgagaatgtcacctccatccgcatcccctccgagctcatctggcggccggacatcgtcctctacaacaatgctgacggggacttcgcggtcacccacctgaccaaggcccacctgttccatgacgggcgggtgcagtggactcccccggccatttacaagagctcctgcagcatcgacgtcaccttcttccccttcgaccagcagaactgcaccatgaaattcggctcctggacctacgacaaggccaagatcgacctggtgaacatgcacagccgcgtggaccagctggacttctgggagagtggcgagtgggtcatcgtggatgccgtgggcacctacaacaccaggaagtacgagtgctgtgccgagatctacccggacatcacctatgccttcgtcatccggcggctgccgctcttctacaccatcaacctcatcatcccctgcctgctcatctcctgcctcaccgtgctggtcttctacctgccctccgagtgtggcgagaagatcacgctgtgcatctccgtgctgctgtcgctcaccgtcttcctgctgctcatcaccgagatcatcccgtccacctcactggtcatcccactcatcggcgagtacctgctgttcaccatgatcttcgtcaccctgtccatcgtcatcacggtcttcgtgctcaacgtgcaccaccgctcgccacgcacgcacaccatgcccacctgggtacgcagggtcttcctggacatcgtgccacgcctgctcctcatgaagcggccgtccgtggtcaaggacaattgccggcggctcatcgagtccatgcataagatggccagtgccccgcgcttctggcccgagccagaaggggagccccctgccacgagcggcacccagagcctgcacccgccctcaccgtccttctgtgtccccctggatgtgccggctgagcctgggccttcctgcaagtcaccctccgaccagctccctcctcagcagcccctggaagctgagaaagccagcccccacccctcgcctggaccctgccgcccgccccacggcacccaggcaccagggctggccaaagccaggtccctcagcgtccagcacatgtccagccctggcgaagcggtggaaggcggcgtccggtgccggtctcggagcatccagtactgtgttccccgagacgatgccgcccccgaggcagatggccaggctgccggcgccctggcctctcgcaacacccactcggctgagctcccacccccagaccagccctctccgtgcaaatgcacatgcaagaaggagccctcttcggtgtccccgagcgccacggtcaagacccgcagcaccaaagcgccgcccccgcacctgcccctgtcgccggccctgacccgggcggtggagggcgtccagtacattgcagaccacctgaaggccgaagacacagacttctcggtgaaggaggactggaagtacgtggccatggtcatcgaccgcatcttcctctggatgttcatcatcgtctgcctgctggggacggtgggcctcttcctgccgccctggctggctggcatgatctaggaagggaccgggagcctgcgtggcctggggctgccgtgcacggggccagcatccatgcggccggcctggggccgggctggcttctccctggactctgtggggccacacgtttgccaaattttccttcctgttctgtgtctgctgtaagacggccttggacggggacacggcctctggggagaccgagtgtggagctgcttccagttggactgtggcctcaggaggcagtggcttggagcagaggtgggggtcggcgccttctacctgcaggactcgggctaagtccagttcaagagtctcctgagctcccctgcagatggaactcactcctcccagtctctcagcagatctggtgatggtcccgaccgccccaaggggcccttgaagggagttcacgccccttcagccccaagcgccccgtcttctggaggcccggccgcctctcccacccaccgtgtcctgcgcctgtgtgggcttcaacttctcccccagggtccttgagcctctcgggccccatgagggtgagccagcagcgctccaatctgcttcgctaggagagggtccaggcagggattgtgtttggttgtgttttgggtaagttagtgagaactcaagtcttgtgcctaaggagccttggagaacagagttttgtggagctggttccgcgtggggagaatcgggaggcccacgcgggaccagctctcccctgcgcaggccctccgcgggggacaggaacacccagccccagcgagtctggagaccaggactctgccttccaggcgtagggccagggctctggcaggtggccagggctccacgggggcctagtggcttcagcccctggggtacttctgtgttgtgattccccggagctgggaaggtcccgaatggagtccagacctgggccctggttcccccaggaccctgagggtttccaccttggcgcgcagcccgggagatccgccctgggctctgggttcgggaagaaggacttcctgctacagtagctgtggggagctggtgggggcatccttgaggacctccacctgggagatgctgggaccctcggggcaggaagtccctgagaagcctcatgggagtcagggagccctggggtttccacacaggcccatgccctccgtcctggcagggcaggcagagctcagcacagcctcacccctgcaggcggtatccagaggtgagggaggcctgaaatgtttccaggcatgaccctggagcccggcagtgcaccccctaaagatggcgcacccggcagccccccagtgtccccaggggcacacttccccttgggatgggcacaggctgccccacccctccatgattccaagggcccagaggggcggggccaggatggcgtgtcccctgcctgtgagtgacatcggttcaggaggagacagtcaggaagcctcctgctgagtggtccacattctgctgcccccagaccccatccagccaggggtggggatggggttgggctctgcgtcccactgagtctcattcctctgtccccgagccgagctctcctgggccagggtctcgtcaggaggtgcctgagagcagaatgaataattgaggttaggaacccggcatgccgagtgccccagaaatgccgctgtgtccccgcgggcagtgacgtgagtggggaggagactcaggcccacattgcccacacctgcctctgaactgctgctggtcacccccacccccgggtgcctgtgaccggggtcctgaggctggggcttttgtgccaggagtgggtgggacacagagacccccgtgccaaatcctgggcatccccagccccctggcccctcccacatcccccgtgtattcaggaccccatctgctgagctctgacctgcccccgctctgccatcagcccctgctgctcctcggccagagctcccaggacgcagggagaccctgggagagtgaggtcatcccggggccatggaagctggcaggagacactggtctcagaggagggatagagacgcagatttcagatgtaagaagcccgatccacattgcataagtggacccagctgccagatgtgtgggcagctgcagggagtggcccggggtgctgggcccagctgtggttgttcttttctgggtcaggagtgactgcggagtggctgggacgctcctgccgggggaccctcctgccgggggtggccgcttgcctgggggaagacccctttccctttctttttttttttgaggctcaaaaaaaaaatccaaataaagcaccatattcccaccacgccaaattaaccttgacaacaatgttggcgtatttgcgtccagtgctgtttttattaattaaggtaaaatttacatatggtgagatgcatgctcttcagtggagacccagcccctagaaggtccctccagcccttcctgtcggcgtccctccccatctgtggctctgacttaagcaccgtggattgacctctccggctcacgaccttcgaggagtcagaatcctgcagttggagcctttgatgtctggcttcttcatcctatgacttagagcttcatccgtgctgttgtgtgtgtccgtagctccttgctgtctgttccttcgtttttaattgtgagcagtgttcttctgtctgaataaactaagacgcagtttgtccatca

SEQ ID NO: 15062 - DNA, 1884 bp, Artificial Sequence
  derived and/or modified sequence
atggagctgggcggccccggcgcccccagactgctgccccccctgctgctgctgctgggcaccggcctgctgagagccagcagccacgtggagaccagagcccacgccgaggagagactgctgaagaagctgttcagcggctacaacaagtggagcagacccgtggccaacatcagcgacgtggtgctggtgagattcggcctgagcatcgcccagctgatcgacgtggacgagaagaaccagatgatgaccaccaacgtgtgggtgaagcaggagtggcacgactacaagctgagatgggaccccgccgactacgagaacgtgaccagcatcagaatccccagcgagctgatctggagacccgacatcgtgctgtacaacaacgccgacggcgacttcgccgtgacccacctgaccaaggcccacctgttccacgacggcagagtgcagtggaccccccccgccatctacaagagcagctgcagcatcgacgtgaccttcttccccttcgaccagcagaactgcaccatgaagttcggcagctggacctacgacaaggccaagatcgacctggtgaacatgcacagcagagtggaccagctggacttctgggagagcggcgagtgggtgatcgtggacgccgtgggcacctacaacaccagaaagtacgagtgctgcgccgagatctaccccgacatcacctacgccttcgtgatcagaagactgcccctgttctacaccatcaacctgatcatcccctgcctgctgatcagctgcctgaccgtgctggtgttctacctgcccagcgagtgcggcgagaagatcaccctgtgcatcagcgtgctgctgagcctgaccgtgttcctgctgctgatcaccgagatcatccccagcaccagcctggtgatccccctgatcggcgagtacctgctgttcaccatgatcttcgtgaccctgagcatcgtgatcaccgtgttcgtgctgaacgtgcaccacagaagccccagaacccacaccatgcccacctgggtgagaagagtgttcctggacatcgtgcccagactgctgctgatgaagagacccagcgtggtgaaggacaactgcagaagactgatcgagagcatgcacaagatggccagcgcccccagattctggcccgagcccgagggcgagccccccgccaccagcggcacccagagcctgcacccccccagccccagcttctgcgtgcccctggacgtgcccgccgagcccggccccagctgcaagagccccagcgaccagctgcccccccagcagcccctggaggccgagaaggccagcccccaccccagccccggcccctgcagacccccccacggcacccaggcccccggcctggccaaggccagaagcctgagcgtgcagcacatgagcagccccggcgaggccgtggagggcggcgtgagatgcagaagcagaagcatccagtactgcgtgcccagagacgacgccgcccccgaggccgacggccaggccgccggcgccctggccagcagaaacacccacagcgccgagctgcccccccccgaccagcccagcccctgcaagtgcacctgcaagaaggagcccagcagcgtgagccccagcgccaccgtgaagaccagaagcaccaaggccccccccccccacctgcccctgagccccgccctgaccagagccgtggagggcgtgcagtacatcgccgaccacctgaaggccgaggacaccgacttcagcgtgaaggaggactggaagtacgtggccatggtgatcgacagaatcttcctgtggatgttcatcatcgtgtgcctgctgggcaccgtgggcctgttcctgcccccctggctggccggcatgatctag

SEQ ID NO: 15063 - protein, 468 aa, Artificial Sequence
  derived and/or modified sequence
MAARGSGPRALRLLLLVQLVAGRCGLAGAAGGAQRGLSEPSSIAKHEDSLLKDLFQDYERWVRPVEHLNDKIKIKFGLAISQLVDVDEKNQLMTTNVWLKQEWIDVKLRWNPDDYGGIKVIRVPSDSVWTPDIVLFDNADGRFEGTSTKTVIRYNGTVTWTPPANYKSSCTIDVTFFPFDLQNCSMKFGSWTYDGSQVDIILEDQDVDKRDFFDNGEWEIVSATGSKGNRTDSCCWYPYVTYSFVIKRLPLFYTLFLIIPCIGLSFLTVLVFYLPSNEGEKICLCTSVLVSLTVFLLVIEEIIPSSSKVIPLIGEYLVFTMIFVTLSIMVTVFAINIHHRSSSTHNAMAPLVRKIFLHTLPKLLCMRSHVDRYFTQKEETESGSGPKSSRNTLEAALDSIRYITRHIMKENDVREVVEDWKFIAQVLDRMFLWTFLFVSIVGSLGLFVPVIYKWANILIPVHIGNANK

SEQ ID NO: 15064 - DNA, 1407 bp, Artificial Sequence
  derived and/or modified sequence
atggccgctcgagggagcggacctcgcgcactccggcttctcctgctggtgcagttagttgcggggcggtgcggactggccggtgcagcaggtggagcccagagaggcttgtcggaaccttccagtatcgcaaaacacgaggactcactgttaaaggatctgtttcaggactacgagcgatgggtaagaccagtggagcacctcaacgacaaaatcaaaataaagtttggactggcaatctcccagttggtggatgtggatgaaaagaatcaactgatgacgacaaacgtctggctgaaacaggaatggatcgacgtcaaactgcggtggaatcctgatgattatggcggcattaaggtgatcagagttcccagtgattcagtctggactcccgatattgtcctattcgataatgccgatggcaggttcgaaggcacctctactaaaactgtaatccggtacaacgggaccgtaacttggacacccccagctaactacaaatcatcctgtacaatcgatgtgaccttcttcccttttgacctccaaaactgcagcatgaagttcgggtcctggacttatgatggctcacaggtggatatcattctcgaggaccaggatgtggataaaagagatttctttgataatggcgagtgggagattgtcagcgctactggtagcaaaggcaataggacggacagctgttgttggtacccctatgttacctactcatttgtgatcaagcgtctccccctgttctatacattattcttgattatcccatgcatcggattgtcattcctgacagtgcttgtcttctaccttccctccaatgagggagagaagatttgtttatgtactagcgtgctggtgagcctcaccgtcttcctgttagtgatcgaggagatcatccccagttcatcaaaggtaatcccgctaataggagaatacctggtgttcaccatgatctttgtaaccctttcaataatggtcaccgttttcgctataaatattcaccaccgctcttctagcactcacaacgctatggcaccactcgtgcgaaaaattttcctacatacccttcccaagctcctgtgtatgcggagccacgtggatcgctactttacccagaaagaggagaccgagtcgggcagcggacccaaaagttcacggaacacattggaagcggcactcgacagtattagatacatcacccgccacattatgaaagagaatgacgtacgcgaagtggtagaggattggaagtttattgcccaggttctggatcggatgttcttatggaccttcctcttcgtgtcaatcgtgggatcgctgggactgttcgtccccgttatttataagtgggcgaatattctgatccccgtgcacattggtaacgcaaataaatag

SEQ ID NO: 15065 - DNA, 1407 bp, Artificial Sequence
  derived and/or modified sequence
atggccgcccggggcagcggcccccgggccctgcggctgctgctgctggtgcagctggtggccggccgctgtggcctggccggggccgccggcggggcccagaggggcctgtctgagcccagcagcatcgccaagcatgaggacagcctgctgaaggacctcttccaggactatgagcgctgggtgcggcctgtggagcacctgaatgacaagatcaagatcaagtttggcctggccatcagccagctggtggatgtggatgagaagaaccagctgatgaccaccaacgtgtggctgaagcaggagtggattgatgtgaagctgcgctggaacccagatgattatggaggcatcaaggtgatccgggtgcccagcgacagcgtgtggaccccagacatcgtgctgtttgacaatgctgatggccgctttgagggcaccagcaccaagacagtcatccgctacaatggaacagtgacctggaccccaccagccaactacaagagcagctgcaccattgatgtgaccttcttcccctttgacctgcagaactgcagcatgaagtttggctcctggacctatgatggcagccaggtggacatcatcctggaggaccaggatgtggacaagagggacttctttgacaatggagagtgggagatcgtgtctgccaccggcagcaaaggaaacagaacagacagctgctgctggtacccctacgtgacctacagctttgtgatcaagaggctgcccctcttctacaccctcttcctgatcatcccctgcatcggcctgtccttcctgactgtgctggtgttctacctgcccagcaatgaaggagagaagatctgcctgtgcacctctgtgctggtgtccctgactgtgttcctgctggtgattgaggagatcatccccagcagcagcaaggtgatccccctgattggagagtacctggtgttcaccatgatctttgtgaccctgagcatcatggtgacagtgtttgccatcaacatccaccacaggagcagcagcacccacaatgccatggcccccctggtgaggaagatcttcctgcacaccctgcccaagctgctgtgcatgaggagccacgtggaccgctacttcacccagaaggaggagacagagagcggcagcggccccaagagcagcaggaacaccctggaggccgccctggacagcatccgctacatcaccaggcacatcatgaaggaaaatgatgtgcgggaggtggtggaggactggaagttcatcgcccaggtgctggacaggatgttcctgtggaccttcctgtttgtgtccatcgtgggcagcctgggcctgtttgtgcctgtgatctacaagtgggccaacatcctgatccctgtgcacatcggaaatgccaacaagtag

SEQ ID NO: 15066 - DNA, 1407 bp, Artificial Sequence
  derived and/or modified sequence
atggccgcccggggcagcggcccccgggccctgcggctgctgctgctggtccagctggtcgcaggtcgttgcgggctagcaggggccgccggcggtgcccagagggggctgtccgagccgagtagcatcgccaagcacgaggattcattgctcaaagatctttttcaggattatgagaggtgggtacggcctgtggaacatctcaacgacaagataaaaattaaatttggactcgccatctcccagctggttgacgtggacgaaaagaatcagcttatgactaccaacgtgtggctgaagcaggagtggatcgatgttaagttgcgctggaaccctgatgactatggcgggattaaggtgatacgcgtcccatcagatagtgtctggacacctgacatagtgctgttcgataacgccgatggacgctttgaagggacttccacaaagacagtcattcgttataatggtaccgtaacttggactcccccagctaactacaagtccagttgcacgatagacgtcacattcttcccgttcgacctgcagaactgtagcatgaagtttgggagttggacttacgatggttctcaggtagacatcattctggaagaccaggatgtggacaaacgggactttttcgataacggggaatgggagattgtctctgcaaccggaagcaaaggcaaccgcacggatagctgttgttggtacccatacgtcacctacagttttgtgattaaaaggttgcccctcttctatacgctgtttttgatcattccttgcatcggccttagctttctgacggtgctggtcttttacttgcccagcaatgagggggaaaaaatttgtctgtgtacatctgtcctcgtttccctgacagtttttctcctggtgatagaggagattattcctagtagctcaaaagtaatccctctgatcggggagtaccttgttttcacaatgatttttgtgactttgagcattatggttacggtgttcgccattaacattcatcaccgcagctcgtctacacacaatgcaatggcaccattagtgagaaagatcttcctgcacacactgcctaagctactgtgcatgcgcagccacgtggatcgctactttacacagaaggaggaaacagagagtggttcggggccgaagtcatcgcgaaacacactggaagccgcgctcgacagtataagatacattacccggcacataatgaaggagaatgatgtccgagaggtcgtggaggattggaagtttatcgctcaggtcctcgatcggatgttcttgtggacatttctgttcgtgagcattgtgggatccctgggtctctttgtcccagtgatttataagtgggccaatattctcattccagtgcatatagggaacgcgaataagtag

SEQ ID NO: 15067 - DNA, 1407 bp, Artificial Sequence
  derived and/or modified sequence
atggctgccagaggcagtggcccacgggcactgcgtttactgctcttggtgcagttagttgctggtaggtgcggacttgcaggagctgccggaggagctcaacggggtctgtccgagccttccagcatcgccaagcatgaagatagcctgcttaaagacttgtttcaggactatgaaagatgggttcgtccggtggaacatctaaatgataaaattaagatcaagtttggcctcgccatttcccagttggtggacgtcgacgagaagaatcagctgatgaccaccaacgtctggctgaagcaggaatggattgacgtaaagttgaggtggaacccggatgactacggcggaatcaaggtgatccgcgtcccctcggattccgtgtggacaccagatatagtcttgtttgataacgccgatgggcgttttgaaggaacatcgaccaagaccgtgatccgctacaatgggaccgttacttggacgcctcctgccaattacaaatccagctgcactatcgacgtcactttcttcccctttgacttgcagaattgttcaatgaagtttggtagctggacgtatgatgggtcacaggttgatatcatcttggaggaccaggatgtggataaaagggacttctttgataacggcgaatgggaaattgttagcgccaccgggagtaagggaaatagaaccgacagttgttgctggtatccatacgtgacctacagttttgttatcaagagactgccactcttctacactctgttcctgatcataccttgtattggcttgagctttctaactgtcttagttttttatctgcccagcaatgagggggagaagatctgtctgtgtacttcagtcctggtatccctgacagtcttcctcctcgtgatcgaggagattatcccttcttccagcaaggtgattcctctgatcggtgagtacctagtgttcaccatgattttcgttaccctctctattatggtgactgtgtttgctatcaacatacaccatcgatcctctagcacccacaacgctatggcgccactggtgcggaagatctttctccacactctcccaaaacttctttgtatgcgatcacacgtggatcgttacttcactcaaaaggaagagaccgaatccggctctggacctaagtcttctcgaaataccctcgaggccgcactggacagtatccgctacatcaccagacacattatgaaagagaacgatgtgcgcgaggttgttgaggattggaagtttatcgcacaagtcttggatcggatgtttctatggacgtttctctttgtgtcaatcgttggctccctgggactctttgttccggtgatttataagtgggcgaacatcctgatacctgttcacatcggcaatgctaataaatag

SEQ ID NO: 15068 - DNA, 3623 bp, Artificial Sequence
  derived and/or modified sequence
acatgcgtcccgagcccgccagaagctgctaggctgaggctgctgtcccggcgggagctgtggcgcggagcggcccctctgctgcgtctgccctcgttttgtctcacgactcacactcagtgctccattccccaagagttcgcgttccccgcgcggcggtcgagaggcggctgcccgcggtcccgcgcgggcgcggggcgatggcggcgcgggggtcagggccccgcgcgctccgcctgctgctcttggtccagctggtcgcggggcgctgcggtctagcgggcgcggcgggcggcgcgcagagaggattatctgaaccttcttctattgcaaaacatgaagatagtttgcttaaggatttatttcaagactacgaaagatgggttcgtcctgtggaacacctgaatgacaaaataaaaataaaatttggacttgcaatatctcaattggtggatgtggatgagaaaaatcagttaatgacaacaaacgtctggttgaaacaggaatggatagatgtaaaattaagatggaaccctgatgactatggtggaataaaagttatacgtgttccttcagactctgtctggacaccagacatcgttttgtttgataatgcagatggacgttttgaagggaccagtacgaaaacagtcatcaggtacaatggcactgtcacctggactccaccggcaaactacaaaagttcctgtaccatagatgtcacgtttttcccatttgaccttcagaactgttccatgaaatttggttcttggacttatgatggatcacaggttgatataattctagaggaccaagatgtagacaagagagatttttttgataatggagaatgggagattgtgagtgcaacagggagcaaaggaaacagaaccgacagctgttgctggtatccgtatgtcacttactcatttgtaatcaagcgcctgcctctcttttataccttgttccttataataccctgtattgggctctcatttttaactgtacttgtcttctatcttccttcaaatgaaggtgaaaagatttgtctctgcacttcagtacttgtgtctttgactgtcttccttctggttattgaagagatcataccatcatcttcaaaagtcatacctctaattggagagtatctggtatttaccatgatttttgtgacactgtcaattatggtaaccgtcttcgctatcaacattcatcatcgttcttcctcaacacataatgccatggcgcctttggtccgcaagatatttcttcacacgcttcccaaactgctttgcatgagaagtcatgtagacaggtacttcactcagaaagaggaaactgagagtggtagtggaccaaaatcttctagaaacacattggaagctgcgctcgattctattcgctacattacaagacacatcatgaaggaaaatgatgtccgtgaggttgttgaagattggaaattcatagcccaggttcttgatcggatgtttctgtggacttttcttttcgtttcaattgttggatctcttgggctttttgttcctgttatttataaatgggcaaatatattaataccagttcatattggaaatgcaaataagtgaagcctcccaagggactgaagtatacatttagttaacacacatatatctgatggcacctataaaattatgaaaatgtaagttatgtgttaaatttagtgcaagctttaacagactaagttgctaacctcaatttatgttaacagatgatccatttgaacagttggctgtatgactgaagtaataactgatgagatacatttgatcttgtaaaaatagcaaaatattatctgaactggactagtgaaaaatctagtatttgtatcctggcaaataatactaatttataatccacagtaaagttcatcctttgactgtgctggagaattccagttgtatttgaagactgattttaaaacttttctgcatttggtaaaggtatgtaaactttcctgtactcactgagtaacagctaatctttaatataatattatactgctatatttaaaaagctgactacttgatataattacttaatgtgatgcttgatataataattacttaatgtggccgggcacggtggctcacacctgtaatcccagcactttgggaggtcgaggtgggcgtatcacctgaggttgggagttcgagaccagcctgaccaacgtggagaaaccccgtctctactaaaaatatgaaattagccagggtggtggtgcacacctgtaatcccagctacctgggaggctgcggcaggagaatcgcttgaacccaggtggcggaggttgcggtgagctgagatcacgccattgcactccagcctgggcaacaagagcaaaactcagtctcaaataataataataacaacaacttaatgtgctgctgcttttccataaccaacattttaaaaataaatgaaaaacaggaattgggaactcctttaaggcttactttattctttagatgcttaattattgtgttaactatttctgtagcttagcttccactgtaaagtcatacagtagacaactcctgtggacacgcagtagcatatccttaacattaatttcagtcctcttgtccacatttcccacaattaatagaaccatcttctatataaattgtggtagtatctctttatccttgatcttagaatagtcagtccactacaattacatgaaccccatttaaaaaacatatttagggccgggggcagtggctcacatctgtaatccaagcactttgggaggctgaggcaggtggatcaccagaggttaggagttcgagactagcctgaccaacatggtgaagccccgtctctactaagaatacaaaaaattagtcgggcatggtagcaggcgcctgtagtcccagctactcaagaggctgaggcaggagaatcgcttgaacctgggaggtggaggctgcagtgagccgagactgcgccattgcactccagcctggcaacaagagcaaaactctgtctcaaacatattttggtctaaatcattctgtgagaaaacaatcttctaatatgaaacacagtattctaatttggtatatgcacactgttatatacctgtaatatttcagttttctctccttcattctaacaattacaataatagaatcttagagttgcaagggcctttagatgtaatcaatcttagcctattactagtacagcgtaaatgatttagtacagtataatgtatcacagttaaaacagttaaattccatctctaaatgtcaccacttcaggtgtgaccaggtagcaaacactgacagaaaccctcgttcaatttagaactcttagctgttgagatcacaaacacctcatttatttataataagtaacctatctaagttcaagccaatgctctttggaaggcggaggagaccctatctaatttgcatttaatcgtaggcaggtgtttaatgccatttaatgagtgaaagcctggtgtgatgaatttagattgcctgccagctacctaccttagttcgtatacatccctgatccctcttatactaccattactgttacttatgatttttatatataaatttttatcgaca

SEQ ID NO: 15069 - DNA, 1407 bp, Artificial Sequence
  derived and/or modified sequence
atggccgccagaggcagcggccccagagccctgagactgctgctgctggtgcagctggtggccggcagatgcggcctggccggcgccgccggcggcgcccagagaggcctgagcgagcccagcagcatcgccaagcacgaggacagcctgctgaaggacctgttccaggactacgagagatgggtgagacccgtggagcacctgaacgacaagatcaagatcaagttcggcctggccatcagccagctggtggacgtggacgagaagaaccagctgatgaccaccaacgtgtggctgaagcaggagtggatcgacgtgaagctgagatggaaccccgacgactacggcggcatcaaggtgatcagagtgcccagcgacagcgtgtggacccccgacatcgtgctgttcgacaacgccgacggcagattcgagggcaccagcaccaagaccgtgatcagatacaacggcaccgtgacctggaccccccccgccaactacaagagcagctgcaccatcgacgtgaccttcttccccttcgacctgcagaactgcagcatgaagttcggcagctggacctacgacggcagccaggtggacatcatcctggaggaccaggacgtggacaagagagacttcttcgacaacggcgagtgggagatcgtgagcgccaccggcagcaagggcaacagaaccgacagctgctgctggtacccctacgtgacctacagcttcgtgatcaagagactgcccctgttctacaccctgttcctgatcatcccctgcatcggcctgagcttcctgaccgtgctggtgttctacctgcccagcaacgagggcgagaagatctgcctgtgcaccagcgtgctggtgagcctgaccgtgttcctgctggtgatcgaggagatcatccccagcagcagcaaggtgatccccctgatcggcgagtacctggtgttcaccatgatcttcgtgaccctgagcatcatggtgaccgtgttcgccatcaacatccaccacagaagcagcagcacccacaacgccatggcccccctggtgagaaagatcttcctgcacaccctgcccaagctgctgtgcatgagaagccacgtggacagatacttcacccagaaggaggagaccgagagcggcagcggccccaagagcagcagaaacaccctggaggccgccctggacagcatcagatacatcaccagacacatcatgaaggagaacgacgtgagagaggtggtggaggactggaagttcatcgcccaggtgctggacagaatgttcctgtggaccttcctgttcgtgagcatcgtgggcagcctgggcctgttcgtgcccgtgatctacaagtgggccaacatcctgatccccgtgcacatcggcaacgccaacaagtag

SEQ ID NO: 15070 - protein, 321 aa, Artificial Sequence
  derived and/or modified sequence
MQEADISGYIPNGEWDLVGIPGKRSERFYECCKEPYPDVTFTVTMRRRTLYYGLNLLIPCVLISALALLVFLLPADSGEKISLGITVLLSLTVFMLLVAEIMPATSDSVPLIAQYFASTMIIVGLSVVVTVIVLQYHHHDPDGGKMPKWTRVILLNWCAWFLRMKRPGEDKVRPACQHKQRRCSLASVEMSAVAPPPASNGNLLYIGFRGLDGVHCVPTPDSGVVCGRMACSPTHDEHLLHGGQPPEGDPDLAKILEEVRYIANRFRCQDESEAVCSEWKFAACVVDRLCLMAFSVFTIICTIGILMSAPNFVEAVSKDFA

SEQ ID NO: 15071 - protein, 502 aa, Artificial Sequence
  derived and/or modified sequence
MRCSPGGVWLALAASLLHVSLQGEFQRKLYKELVKNYNPLERPVANDSQPLTVYFSLSLLQIMDVDEKNQVLTTNIWLQMSWTDHYLQWNVSEYPGVKTVRFPDGQIWKPDILLYNSADERFDATFHTNVLVNSSGHCQYLPPGIFKSSCYIDVRWFPFDVQHCKLKFGSWSYGGWSLDLQMQEADISGYIPNGEWDLVGIPGKRSERFYECCKEPYPDVTFTVTMRRRTLYYGLNLLIPCVLISALALLVFLLPADSGEKISLGITVLLSLTVFMLLVAEIMPATSDSVPLIAQYFASTMIIVGLSVVVTVIVLQYHHHDPDGGKMPKWTRVILLNWCAWFLRMKRPGEDKVRPACQHKQRRCSLASVEMSAVAPPPASNGNLLYIGFRGLDGVHCVPTPDSGVVCGRMACSPTHDEHLLHGGQPPEGDPDLAKILEEVRYIANRFRCQDESEAVCSEWKFAACVVDRLCLMAFSVFTIICTIGILMSAPNFVEAVSKDFA

SEQ ID NO: 15072 - protein, 148 aa, Artificial Sequence
  derived and/or modified sequence
MRCSPGGVWLALAASLLHVSLQGEFQRKLYKELVKNYNPLERPVANDSQPLTVYFSLSLLQIMDVDEKNQVLTTNIWLQMSWTDHYLQWNVSEYPGVKTVRFPDGQIWKPDILLYNSSYDQQQEVLAYGMHCWSPQFGPTSSSMFPVV

SEQ ID NO: 15073 - DNA, 1509 bp, Artificial Sequence
  derived and/or modified sequence
atgcgttgcagccctggcggagtttggctcgccctagccgcgagcctgttacacgtgtccttacagggagagttccagagaaagctctacaaggagctggtgaaaaattacaatcccctggaaagaccagtcgcgaacgactctcagcctctaactgtctacttcagcctatctctgcttcaaataatggatgtggacgagaagaaccaggtgcttacaactaacatttggctccagatgtcttggacagatcactacctgcagtggaacgtgagcgagtatccgggggtaaaaaccgtgcggtttcctgacggtcagatatggaaacccgatattctgttatacaactccgccgatgagcggttcgacgcaaccttccacaccaacgtgttggtgaatagtagcggccactgccagtatttaccgccagggatcttcaagtcatcctgttacatcgatgtacgctggtttccattcgatgtccagcactgtaagctgaaattcggatcctggtcctacggcggctggtccctggatctgcagatgcaggaagcagacatcagcgggtacatccctaatggcgagtgggatttggtgggcatccccggcaaacggtctgaacgcttttacgagtgctgcaaggaaccatatcccgatgttacattcacagttacgatgcggaggcgcacactctactatgggctgaacctcctgatcccttgcgtgctgatttctgccctggccttactcgtctttctcctcccggcagattctggagaaaagattagcctgggaatcaccgtgctgctcagtctgacagtctttatgctcttagtcgctgaaatcatgccggccacctctgactccgtaccccttatagcccagtattttgcctcgacgatgattatcgtcgggctcagcgttgtagtgaccgtcatcgttttgcaataccatcatcacgaccccgatggcggcaaaatgcccaagtggactcgagtaattctgctgaattggtgcgcctggtttctgcgtatgaagcggcccggagaagataaagtgcgcccagcttgccagcacaaacagcgtcgctgctctctggccagtgtggagatgtcagctgtggcccctccacccgctagcaacggcaacttgctgtatatcggatttcggggcctggatggggttcactgcgttcccaccccagattctggagtggtatgcggccgcatggcttgctcgcccacccacgacgaacatttgcttcatggtggccagccaccagaaggagatcccgatctggcgaagatcctggaggaagtgaggtatatagcaaaccggttccggtgtcaggacgagtctgaggctgtgtgctctgaatggaaattcgccgcctgcgttgtcgaccggctatgtttgatggcattcagcgtgttcacaattatatgcacaattggaatcctcatgtccgcccccaacttcgtcgaggctgtcagtaaggactttgcatag

SEQ ID NO: 15074 - DNA, 1509 bp, Artificial Sequence
  derived and/or modified sequence
atgcgctgcagccctggaggagtgtggctggccctggccgccagcctgctgcacgtgtccctgcagggcgagttccagaggaagctgtacaaggagctggtgaagaactacaaccccctggagaggcctgtggccaatgacagccagcccctgactgtgtacttcagcctgagcctgctgcagatcatggatgtggatgagaagaaccaggtgctgaccaccaacatctggctgcagatgtcctggacagaccactacctgcagtggaatgtgtctgagtacccaggagtgaagacagtgcgcttcccagatggccagatctggaagccagacatcctgctgtacaacagcgcagatgaaagatttgatgccaccttccacaccaacgtgctggtgaacagcagcggccactgccagtacctgcccccaggcatcttcaagagcagctgctacattgatgtgcgctggttcccctttgatgtgcagcactgcaagctgaagtttggctcctggagctatggaggctggagcctggacctgcagatgcaggaggccgacatcagcggctacatccccaatggagagtgggacctggtgggcatccctgggaagaggtctgagcgcttctatgagtgctgcaaggagccctacccagatgtgaccttcaccgtgaccatgagaagaaggaccctgtactacggcctgaacctgctgatcccctgtgtgctgatcagcgccctggccctgctggtgttcctgctgcctgctgacagcggggagaagatcagcctgggcatcaccgtgctgctgagcctgactgtgttcatgctgctggtggccgagatcatgcctgccaccagtgacagcgtgcccctgattgcccagtactttgccagcaccatgatcatcgtgggcctgtctgtggtggtgacagtgattgtgctgcagtaccaccaccacgaccctgatggcggcaagatgcccaagtggaccagggtcatcctgctgaactggtgtgcctggttcctgaggatgaagaggcctggagaggacaaggtgcggcctgcctgccagcacaagcagaggcgctgcagcctggcctctgtggagatgtctgctgtggcccctcctccagccagcaatggaaacctgctgtacatcggcttccggggcctggatggagtgcactgtgtgcccaccccagattctggagtggtgtgtggccgcatggcctgcagccccacccatgatgagcacctgctgcacggcggccagcccccagagggggaccctgacctggccaagatcctggaggaggtgcgctacatcgccaaccgcttccgctgccaggatgaaagtgaagctgtgtgcagcgagtggaagtttgctgcctgtgtggtggaccggctgtgcctgatggccttcagcgtcttcaccatcatctgcaccatcggcatcctgatgtctgcccccaactttgtggaggccgtgtccaaggactttgcctag

SEQ ID NO: 15075 - DNA, 1509 bp, Artificial Sequence
  derived and/or modified sequence
atgcggtgcagccccggcggcgtgtggctggccctggccgccagcctgctgcatgttagcctgcagggtgaattccagaggaaactgtataaagaactggtcaagaactacaacccactggaacgaccggtggccaatgattcccagcccctcacggtgtacttttccctgtcgcttctgcaaattatggatgtggacgagaagaaccaggtcctaacaacaaatatttggctgcagatgtcatggacagatcactacctgcagtggaacgtaagcgaataccccggagtcaagaccgtgcgattccctgacggacaaatctggaagcctgatatcctgttgtataactctgccgatgaacggttcgatgcaacctttcacaccaacgtgttagtgaactcctccggacattgtcagtacctgccccccggtatcttcaagtcctcctgctacattgacgtccgttggtttccgtttgatgtccagcactgcaagcttaaatttggatcatggtcctacggcggctggtccttagacctgcaaatgcaggaagccgatatcagcgggtatattcccaacggtgaatgggatttggtgggaattccaggaaaacggagcgaaagattttacgaatgctgtaaggaaccatacccggacgtgacattcaccgtgacgatgagacggcgtactctgtattacggactgaacctccttatcccttgcgtccttattagcgcattggctctgctggtgttcctgctgcccgcggacagcggagagaagatttctttaggtatcaccgtattgctctccctaaccgtgtttatgttactggttgccgaaataatgcccgctaccagtgacagcgtccccctgattgctcagtatttcgccagcacaatgattattgtagggctctctgtcgtggtcaccgtgatagtgctacagtaccaccaccacgatcccgatggcggtaaaatgcctaagtggacccgggtcatactccttaattggtgcgcatggttcctgaggatgaaacgcccaggcgaggataaggtgaggccagcctgtcagcacaaacaaaggagatgtagtctggctagtgtggagatgtcagccgtggccccccccccggcaagcaacggaaatctgctctatatagggttcagggggttagacggggtccactgcgttccaaccccagattccggggttgtttgtgggcggatggcctgctctcccacccacgatgaacacctgctgcacggaggtcaacccccagaaggagacccagatttggctaaaattttggaagaagttcgttacattgcgaatcgatttcgttgtcaggatgagtccgaggccgtgtgttccgaatggaagtttgcggcgtgtgtcgttgaccgtctgtgcctgatggcctttagtgtgtttaccatcatttgcacaattggtattctcatgtccgcacctaactttgtggaggcagtatcaaaagactttgcctag

SEQ ID NO: 15076 - DNA, 1509 bp, Artificial Sequence
  derived and/or modified sequence
atgaggtgtagcccaggtggagtctggttggcccttgcggctagcctgctgcacgtgtccctgcagggagagtttcagagaaaactttacaaggagttagtgaaaaattacaatcccctggagagacctgttgcaaacgactctcagcctttgacagtgtacttctccttgtcactgttacagattatggacgtcgacgagaagaatcaggtgttaacaactaatatttggctccagatgagctggactgaccattatcttcagtggaatgtctccgagtaccccggtgtgaaaacagtgcgtttcccagatggccaaatatggaaacctgacattctcctgtacaacagcgcagatgagaggttcgatgctacatttcacactaacgtattggtcaattcttcaggccactgtcagtacctccccccaggtatcttcaagtcaagctgttacatcgatgtgcgctggttcccattcgacgtgcagcattgtaaactgaagttcggctcctggtcttatggtggctggagcttggacctgcagatgcaagaggcagacatcagtggctatattccaaacggtgagtgggacttagtgggtatcccaggaaaaaggagtgaacgtttctatgaatgctgcaaggaaccctaccccgatgtgacatttaccgtgacaatgcggcgtcgcaccttatattatggcctcaacctattgatcccatgcgtgctcattagtgctctcgctctcctggtcttcttgctgcccgctgatagtggtgagaagatatctctgggcataaccgtgttgctttcgctgaccgttttcatgctccttgttgcagaaattatgcccgcaacatcggacagcgttccactcattgcgcagtacttcgcttcgacaatgattatcgtaggcctgagcgtagtggtcactgtgatcgttttgcagtaccatcaccacgaccccgacggaggcaagatgcccaaatggacgcgagttattcttctcaactggtgcgcctggttcctgaggatgaaacgccctggcgaagataaggtacgcccagcatgccagcataagcaacgtagatgtagtctggcctctgttgagatgtcagccgtcgcgcctccgccagccagtaatgggaacctgctttacattggctttcggggtcttgacggtgtgcattgtgtcccaacccccgactctggtgtcgtttgtgggaggatggcctgcagtcccacccacgatgaacatctgctccacggcggtcaaccaccagagggagaccctgatctcgcaaagatcttggaggaagtgcgatacattgcaaacagatttaggtgccaggacgaatcagaggcagtttgcagcgaatggaaatttgcggcttgcgtcgtggatcgcctctgtctcatggctttctcagtgtttaccatcatctgcacaatagggattctaatgtcggctcccaacttcgtagaggcagtgagtaaggactttgcgtag

SEQ ID NO: 15077 - DNA, 5669 bp, Artificial Sequence
  derived and/or modified sequence
gagccgagcggcgaggtgcctctgtggccgcaggcgcaggcccgggcgacagccgagacgtggagcgcgccggctcgctgcagctccgggactcaacatgcgctgctcgccgggaggcgtctggctggcgctggccgcgtcgctcctgcacgtgtccctgcaaggcgagttccagaggaagctttacaaggagctggtcaagaactacaatcccttggagaggcccgtggccaatgactcgcaaccactcaccgtctacttctccctgagcctcctgcagatcatggacgtggatgagaagaaccaagttttaaccaccaacatttggctgcaaatgtcttggacagatcactatttacagtggaatgtgtcagaatatccaggggtgaagactgttcgtttcccagatggccagatttggaaaccagacattcttctctataacagtgctgatgagcgctttgacgccacattccacactaacgtgttggtgaattcttctgggcattgccagtacctgcctccaggcatattcaagagttcctgctacatcgatgtacgctggtttccctttgatgtgcagcactgcaaactgaagtttgggtcctggtcttacggaggctggtccttggatctgcagatgcaggaggcagatatcagtggctatatccccaatggagaatgggacctagtgggaatccccggcaagaggagtgaaaggttctatgagtgctgcaaagagccctaccccgatgtcaccttcacagtgaccatgcgccgcaggacgctctactatggcctcaacctgctgatcccctgtgtgctcatctccgccctcgccctgctggtgttcctgcttcctgcagattccggggagaagatttccctggggataacagtcttactctctcttaccgtcttcatgctgctcgtggctgagatcatgcccgcaacatccgattcggtaccattgatagcccagtacttcgccagcaccatgatcatcgtgggcctctcggtggtggtgacagtgatcgtgctgcagtaccaccaccacgaccccgacgggggcaagatgcccaagtggaccagagtcatccttctgaactggtgcgcgtggttcctgcgaatgaagaggcccggggaggacaaggtgcgcccggcctgccagcacaagcagcggcgctgcagcctggccagtgtggagatgagcgccgtggcgccgccgcccgccagcaacgggaacctgctgtacatcggcttccgcggcctggacggcgtgcactgtgtcccgacccccgactctggggtagtgtgtggccgcatggcctgctcccccacgcacgatgagcacctcctgcacggcgggcaaccccccgagggggacccggacttggccaagatcctggaggaggtccgctacattgccaaccgcttccgctgccaggacgaaagcgaggcggtctgcagcgagtggaagttcgccgcctgtgtggtggaccgcctgtgcctcatggccttctcggtcttcaccatcatctgcaccatcggcatcctgatgtcggctcccaacttcgtggaggccgtgtccaaagactttgcgtaaccacgcctggttctgtacatgtggaaaactcacagatgggcaaggcctttggcttggcgagatttgggggtgctaatccaggacagcattacacgccacaactccagtgttcccttctggctgtcagtcgtgttgcttacggtttctttgttactttaggtagtagaatctcagcactttgtttcatattctcagatgggctgatagatatccttggcacatccgtaccatcggtcagcagggccactgagtagtcattttgcccattagcccactgcctggaaagcccttcggagagctccccatggctcctcaccaccgagacagttggttttgcatgtctgcatgaaggtctacctgaaaattcaacatttgctttttgcttgtgtacaaacccagattgaagctaaaataaaccagactcactaaatcctttccaataattgactggtggaaggaaaacaaaaaacaaaaactaaaaacctcttagcttttctgcaattcaactttttatttttatttttatttctatcaaagacggtagagagaaacagcttgatgctgtttctacattaaaaaaaaaaaaaaaagacagactgttggtcttactaaggatgtttttaccagcctgcctgacttctgcaaacctaccctgtcaaggagatcaaagggacgcaggtttctgtttattctgaacaagggccaggccccgcggagtgtctttggtggatcccagataactcctaggtgctgctctcagacactgaggagttgagcaaatctgttctattctgcagaacccacaggacaaataagagttctactagaattaacagcccaaaagaatagctacagctaagtgaagccacttacgtgggctttaaaaaaataatgtgttagctgattcacatgcactggagttaattagtcttagaaatgtgtgcatccatacaaatgcacaacataaagtgaacatattcctaggccctttctgcctgtgtcagggccaggaagtagaggctgggaactcttctggtccccagtatggcaggcgccagggaggggatggtgtggcccatcccttctctggatacctggccagtggcaggcagcagggaggagctggccgaccctcagtgactgacaagccagcaattctgagttctggcctttgggagtctgcctgctccaagccagtccaccccagctgcagccccaaaagctggctcaaagtccttgggtggattcactggagatgggcaacttaaaacaagagaaactttaatttttaaacctaagtgatgatacagctcttcccttagattatcgcccaggctggagtgcagtggcatgatctcagctcactgcaagctccacctcctgggttcatgccattctcctgcctcagcctccccccgagtaactgggaatacaggcgcccgccaccatgcctggctaattttttgtatttttagtagagatagggtttcatcatgttagccaggatggtctcattcttattctttaatgagatcagagggtaattcaccaagaaagacctctcctgttccattgtgtcatccaacaactgctcagagctcaaaattatagaaggcttctgagcccctagagatttttaatttgcttctaatccctgaggtgggaacatcatgagggaagatttgattttcagagttaaataaattgtatgtgcttttccagccatctggctcactcatttctgggtaatgcacatgactttgtttgcactggaggaagatggaagcttgcgtgtgtgcggtgtgtgtgtgtgtgtaagtgtgaggtaccttgtgtgtgacaagagacctcacttacgagaaagttggtggatcaggacattccagcctcaggcggcttggagcaggatcattcctcagcaggcattccttccacatgctatggatgaaccatgcacaagattttcggtttttttttttttttctgttacagtgtctttagaaacaagtagaagtgttttgatatataaaaggaatgcttcatttcttatcattatcccaaaattgatccctcccacatttttgctttaaaaagaaacctttttggttttgtattttatacaggaacacaaaatgcaaacaagttgtgcatattttggactctcaaataacttctctgtcctttaataaagtaataataaggaatagatgtgcacatagttagaaaagtatgagtggttaaaaacaacagtctcccatactgcctgttttctctctcagaggggaccactaatgagcttctaagggcatttctagaaaggaagaaaagaagataagaggccaaagaaggagggacgggggttatggagagagaccttccctttccagcactaacgctctgtgaagggcgctgcaccttgcattcttcatgtggtgttttgtcttagaggtcgtcccataataacatataaagatctacctcattcctcctagtagctgcttagcattccattatctcagcggactatcatttatttgaatagccttttattggtgaacatatggatacttccagtttttatttttatatacaaatctataattggcatacttgtacatacatcttgacatagttttgtgactaaaacggtataaattccaacttagaaatggaattgctgggtttaaggctacatgtatttaaaattttgatagctattgccagattatcttctagaaactgatcgaaggatgtaactccatcaagagtacaataaaaggcccaatttctcagctttctataatagcactgggtattttcaaacttaatgtttttcccaatataattggtgaaacatgatatttacgaatattattctgattttggtttattttgtgtataaaatgggacatcttttaaaatttttttgtagttttaattttgatacatttatatattttacccagttcctaattgggttatttggctttttcttaatttgctcatgcactttgggacatttttgtcttatgtctttaaaatatttttatcatttgtctttcgatgttatttattgatttccttatttattggcatagagtttaaatttttatgttgtcaatttgtgagtatttttctttgtcgatcgtgggatttgtttccagtttttaaaagccttcctcattctgagattataaatagacttactcgcattttcttctgaaactttatggttttattggtttaccttcacatcttcagactccctggaattcatttgttgcaggacatgagggaaaaatccatactttttcctcgaaatggtggtcagcagtatcaataaatatgtaataatgcatttctaaaatacagtcatagtgttttccccagttgttcaaaatgcagccttatttgtaaactaaatttctttaagtgtttggttctgtttctgttctatttatctctatgaatgcctttcatttctaaagcattattcatactaatatcagtattttcaagtcaacactcccatcaactctgaatctctctctcatatgaatcttttttcaattagagtcacaatgaatttacagattgagtcttcctattcaaaagcatgaaatcttgtgtttaagtctaattttatgtaacttagtagtgttttatgattttgttcactaaggtgctttgaatttatagtttatttctagatgttttatcatttggctatcattttcaatagaatgatttattccactttattttctattttatcccattgtataagaaagtagttggtttttatgtatgaatgttataatcaaccacaaattgtgattcctacttgtttctaaggtatacttttgacttctcctttccaatgtgtctcttatttctttcttgtatctagttgatttgagatcagtgttgagtcacagtgattcaggtggcatgcttatcttgttcgtgacatcagtgggacgttttaatgtctcagcgtttaacttgtatgaagacatgtattttccttgccataataaaaaagtatctgtgtgttctcaaa

SEQ ID NO: 15078 - DNA, 1509 bp, Artificial Sequence
  derived and/or modified sequence
atgagatgcagccccggcggcgtgtggctggccctggccgccagcctgctgcacgtgagcctgcagggcgagttccagagaaagctgtacaaggagctggtgaagaactacaaccccctggagagacccgtggccaacgacagccagcccctgaccgtgtacttcagcctgagcctgctgcagatcatggacgtggacgagaagaaccaggtgctgaccaccaacatctggctgcagatgagctggaccgaccactacctgcagtggaacgtgagcgagtaccccggcgtgaagaccgtgagattccccgacggccagatctggaagcccgacatcctgctgtacaacagcgccgacgagagattcgacgccaccttccacaccaacgtgctggtgaacagcagcggccactgccagtacctgccccccggcatcttcaagagcagctgctacatcgacgtgagatggttccccttcgacgtgcagcactgcaagctgaagttcggcagctggagctacggcggctggagcctggacctgcagatgcaggaggccgacatcagcggctacatccccaacggcgagtgggacctggtgggcatccccggcaagagaagcgagagattctacgagtgctgcaaggagccctaccccgacgtgaccttcaccgtgaccatgagaagaagaaccctgtactacggcctgaacctgctgatcccctgcgtgctgatcagcgccctggccctgctggtgttcctgctgcccgccgacagcggcgagaagatcagcctgggcatcaccgtgctgctgagcctgaccgtgttcatgctgctggtggccgagatcatgcccgccaccagcgacagcgtgcccctgatcgcccagtacttcgccagcaccatgatcatcgtgggcctgagcgtggtggtgaccgtgatcgtgctgcagtaccaccaccacgaccccgacggcggcaagatgcccaagtggaccagagtgatcctgctgaactggtgcgcctggttcctgagaatgaagagacccggcgaggacaaggtgagacccgcctgccagcacaagcagagaagatgcagcctggccagcgtggagatgagcgccgtggcccccccccccgccagcaacggcaacctgctgtacatcggcttcagaggcctggacggcgtgcactgcgtgcccacccccgacagcggcgtggtgtgcggcagaatggcctgcagccccacccacgacgagcacctgctgcacggcggccagccccccgagggcgaccccgacctggccaagatcctggaggaggtgagatacatcgccaacagattcagatgccaggacgagagcgaggccgtgtgcagcgagtggaagttcgccgcctgcgtggtggacagactgtgcctgatggccttcagcgtgttcaccatcatctgcaccatcggcatcctgatgagcgcccccaacttcgtggaggccgtgagcaaggacttcgcctag

SEQ ID NO: 15079 - protein, 501 aa, Artificial Sequence
  derived and/or modified sequence
MTPGALLMLLGALGAPLAPGVRGSEAEGRLREKLFSGYDSSVRPAREVGDRVRVSVGLILAQLISLNEKDEEMSTKVYLDLEWTDYRLSWDPAEHDGIDSLRITAESVWLPDVVLLNNNDGNFDVALDISVVVSSDGSVRWQPPGIYRSSCSIQVTYFPFDWQNCTMVFSSYSYDSSEVSLQTGLGPDGQGHQEIHIHEGTFIENGQWEIIHKPSRLIQPPGDPRGGREGQRQEVIFYLIIRRKPLFYLVNVIAPCILITLLAIFVFYLPPDAGEKMGLSIFALLTLTVFLLLLADKVPETSLSVPIIIKYLMFTMVLVTFSVILSVVVLNLHHRSPHTHQMPLWVRQIFIHKLPLYLRLKRPKPERDLMPEPPHCSSPGSGWGRGTDEYFIRKPPSDFLFPKPNRFQPELSAPDLRRFIDGPNRAVALLPELREVVSSISYIARQLQEQEDHDALKEDWQFVAMVVDRLFLWTFIIFTSVGTLVIFLDATYHLPPPDPFP

SEQ ID NO: 15080 - protein, 429 aa, Artificial Sequence
  derived and/or modified sequence
MSTKVYLDLEWTDYRLSWDPAEHDGIDSLRITAESVWLPDVVLLNNNDGNFDVALDISVVVSSDGSVRWQPPGIYRSSCSIQVTYFPFDWQNCTMVFSSYSYDSSEVSLQTGLGPDGQGHQEIHIHEGTFIENGQWEIIHKPSRLIQPPGDPRGGREGQRQEVIFYLIIRRKPLFYLVNVIAPCILITLLAIFVFYLPPDAGEKMGLSIFALLTLTVFLLLLADKVPETSLSVPIIIKYLMFTMVLVTFSVILSVVVLNLHHRSPHTHQMPLWVRQIFIHKLPLYLRLKRPKPERDLMPEPPHCSSPGSGWGRGTDEYFIRKPPSDFLFPKPNRFQPELSAPDLRRFIDGPNRAVALLPELREVVSSISYIARQLQEQEDHDALKEDWQFVAMVVDRLFLWTFIIFTSVGTLVIFLDATYHLPPPDPFP

SEQ ID NO: 15081 - DNA, 1506 bp, Artificial Sequence
  derived and/or modified sequence
atgacacctggagcactgttgatgctgctgggggccttaggtgctccactggcaccaggcgtgcgggggtctgaagccgagggccgcctgagagagaaactgttttctgggtacgattcatccgtaaggcctgcacgcgaagtgggggatcgcgtgagagtgtctgtgggccttatactggcccagctgatttctctgaatgaaaaagacgaggagatgagcaccaaggtgtacttggacctcgagtggaccgattatcggctgtcttgggaccctgctgagcacgacggcatcgatagcctgcgcataactgccgagagcgtctggctccccgatgtcgtgctgctcaacaataacgacggcaacttcgacgtggcactcgatatctctgtggtcgtctcaagtgacggatcagtcaggtggcagcctcccggtatctaccgaagcagttgctctatccaagtgacatattttcctttcgactggcagaactgtacgatggtcttctcatcatactcgtatgattcgagtgaggtgtctttacagacagggctgggcccggatggccaaggccaccaggaaatacacattcatgaaggcacatttattgaaaacggccaatgggagatcatacataagccttcccgcctcatccaaccacctggagatccacgagggggccgagagggacaacggcaagaagttatattttacttgatcatcagacggaagcccctattctacctcgtgaacgtgatcgcgccttgtatattgattaccctcctggccatctttgtgttttatcttccgccagatgctggagaaaaaatggggctctcaatttttgctttgttgaccctgaccgtctttctgcttctgctggcggacaaagtgcctgagactagcctctcagtcccaatcatcatcaagtacctgatgtttacaatggtcctggtgacgttcagcgttatccttagcgttgtcgtgctgaatcttcaccaccgtagcccacacactcaccagatgcccctgtgggtccggcagatcttcatccacaaattacccctatatttgaggctcaaaaggcccaagcctgagcgggatctcatgcctgagccaccacactgtagttccccgggttcgggctggggtcgcggcacggacgaatactttatcagaaaacctcccagtgattttctgtttcccaaaccaaatagattccaacctgagcttagcgcccccgacttgaggcggttcatcgacggaccaaacagagcggtagccttgttgcctgagctgagagaagttgtcagtagcatctcttatatcgccaggcagctccaggagcaggaggaccacgatgctctgaaagaagattggcagtttgtcgctatggtggtagatagactgtttctctggacattcattatattcacgagtgtggggacccttgtaattttcctcgacgctacttaccacttaccaccccccgatccctttccttag

SEQ ID NO: 15082 - DNA, 1290 bp, Artificial Sequence
  derived and/or modified sequence
atgtccactaaagtgtacctcgacctagagtggacagactataggctgtcttgggatccagccgaacatgatgggatagacagtctgaggattaccgctgaaagtgtgtggctgcctgacgtggtcctgctgaacaataatgacggaaacttcgacgtcgccttggatatctctgtggttgtgagcagcgatggctctgtgaggtggcagcccccgggaatttaccggtcatcctgtagtattcaagttacctacttccctttcgactggcagaattgtaccatggtattcagctcctattcttatgactcatctgaagtcagccttcagaccggtctgggtccagatggccagggacatcaggagattcacattcacgaaggaacattcatcgagaacggtcagtgggaaattatccataaaccatcaaggctgatacagcctcctggcgatccacgggggggccgcgagggacagcgacaagaggtgattttttatctgattattaggaggaagccccttttctacttggtaaatgtcatagcaccgtgtattctcataaccctgttggccatctttgttttttatctgcccccagacgccggagagaagatgggattgagtatatttgcactgctcactctcactgtgttcctgctgcttctagctgataaagtgcccgagaccagcctctccgttccgatcataattaaatacttgatgtttaccatggtgttagtgacgttctctgtcattctgtctgtggtagtattgaacctacatcatcggagtcctcacactcaccaaatgcccctgtgggtacgccagatattcatccacaagttacccttgtaccttagactgaaaaggcctaaacccgaaagggatctcatgccagagccgcctcactgttcctctccgggctctggttggggtcgcggcaccgatgagtactttatcagaaagccaccttccgatttcctcttccccaagcccaatcgattccaaccagagcttagtgctcccgatctccgaaggtttattgacggccctaaccgagccgtcgccctactccccgaattacgcgaggtggtcagctcgattagctatatcgcaaggcagctccaggaacaggaagatcacgatgccttaaaagaagattggcagttcgtggccatggtagtcgatcgcctgttcctgtggaccttcatcatttttacctcagttgggacactggtgattttcctggacgccacataccatctaccccctccagatccattcccctag

SEQ ID NO: 15083 - DNA, 1506 bp, Artificial Sequence
  derived and/or modified sequence
atgacccctggggccctgctgatgctgctgggcgccctgggcgcccccctggcccctggggtgcggggcagcgaggccgagggccgcctgcgggagaagctgttcagcggctatgacagctctgtgcggcctgcccgggaggtgggggacagagtgcgggtgtctgtgggcctcatcctggcccagctgatcagcctgaatgagaaggatgaggagatgagcaccaaggtgtacctggacctggagtggacagactaccgcctgtcctgggaccctgctgagcatgatggcatcgacagcctgcgcatcacagctgagagcgtgtggctgcctgatgtggtgctgctgaacaacaatgatggcaactttgatgtggccctggacatctctgtggtggtgtccagtgatggctctgtgcgctggcagcccccaggcatctaccgcagcagctgcagcatccaggtgacctacttcccctttgactggcagaactgcaccatggtgttcagcagctacagctatgacagcagcgaggtgtccctgcagacaggcctgggcccagatggccagggccaccaggagatccacatccacgagggcaccttcattgaaaatggccagtgggagatcatccacaagcccagccgcctcatccagcccccaggggacccccggggcggccgggagggccagaggcaggaggtgatcttctacctgatcatccggaggaagcccctcttctacctggtgaatgtgattgccccctgcatcctgatcaccctgctggccatctttgtgttctacctgcccccagatgctggggagaagatgggcctgagcatctttgccctgctgaccctgaccgtcttcctgctgctgctggccgacaaggtgcctgagaccagcctgtctgtgcccatcatcatcaagtacctgatgttcaccatggtgctggtgaccttcagcgtcatcctgtctgtggtggtgctgaacctgcaccacaggagcccccacacccaccagatgcccctgtgggtgcggcagatcttcatccacaagctgcccctgtacctgcggctgaagaggcccaagccagagcgggacctgatgcctgagcccccccactgcagcagccctggcagcggctggggccggggcacagatgagtacttcatcaggaagcccccaagtgacttcctgttccccaagcccaaccgcttccagcctgagctgagcgccccagacctgcggcgcttcattgatggccccaacagagctgtggccctgctgcctgagctgcgggaggtggtgagcagcatctcctacatcgcccggcagctgcaggagcaggaggaccatgatgccctgaaggaggactggcagtttgtggccatggtggtggacaggctcttcctgtggaccttcatcatcttcacctctgtgggcaccctggtgatcttcctggatgccacctaccacctgcccccaccagaccccttcccctag

SEQ ID NO: 15084 - DNA, 1290 bp, Artificial Sequence
  derived and/or modified sequence
atgagcaccaaggtgtacctggacctggagtggacagactaccgcctgtcctgggaccctgctgagcatgatggcatcgacagcctgcgcatcacagctgagagcgtgtggctgcctgatgtggtgctgctgaacaacaatgatggcaactttgatgtggccctggacatctctgtggtggtgtccagtgatggctctgtgcgctggcagcccccaggcatctaccgcagcagctgcagcatccaggtgacctacttcccctttgactggcagaactgcaccatggtgttcagcagctacagctatgacagcagcgaggtgtccctgcagacaggcctgggcccagatggccagggccaccaggagatccacatccacgagggcaccttcattgaaaatggccagtgggagatcatccacaagcccagccgcctcatccagcccccaggggacccccggggcggccgggagggccagaggcaggaggtgatcttctacctgatcatccggaggaagcccctcttctacctggtgaatgtgattgccccctgcatcctgatcaccctgctggccatctttgtgttctacctgcccccagatgctggggagaagatgggcctgagcatctttgccctgctgaccctgaccgtcttcctgctgctgctggccgacaaggtgcctgagaccagcctgtctgtgcccatcatcatcaagtacctgatgttcaccatggtgctggtgaccttcagcgtcatcctgtctgtggtggtgctgaacctgcaccacaggagcccccacacccaccagatgcccctgtgggtgcggcagatcttcatccacaagctgcccctgtacctgcggctgaagaggcccaagccagagcgggacctgatgcctgagcccccccactgcagcagccctggcagcggctggggccggggcacagatgagtacttcatcaggaagcccccaagtgacttcctgttccccaagcccaaccgcttccagcctgagctgagcgccccagacctgcggcgcttcattgatggccccaacagagctgtggccctgctgcctgagctgcgggaggtggtgagcagcatctcctacatcgcccggcagctgcaggagcaggaggaccatgatgccctgaaggaggactggcagtttgtggccatggtggtggacaggctcttcctgtggaccttcatcatcttcacctctgtgggcaccctggtgatcttcctggatgccacctaccacctgcccccaccagaccccttcccctag

SEQ ID NO: 15085 - DNA, 1506 bp, Artificial Sequence
  derived and/or modified sequence
atgacccccggcgccctgctgatgctgctgggcgccctgggcgccccactcgcgcccggggtgcgtggcagcgaggctgagggcagactgcgagaaaagttatttagtgggtatgactcatccgtacgcccggctcgggaggtcggggaccgcgtgagggtgagtgtgggcctcatccttgctcagttaatatctcttaacgagaaggacgaggaaatgagcacaaaagtgtacctggatttggagtggaccgattaccgcctgtcctgggaccccgccgagcacgacggaatagatagcctccgcattactgcggaaagtgtgtggctgccggacgtggtgctgttgaataataatgatgggaatttcgatgtcgccctggacataagcgtcgtagtcagcagcgacggctccgttcggtggcagccacccgggatctacagatcctcgtgttcaatccaagttacgtactttcccttcgactggcagaactgcaccatggtgttcagcagctacagttacgactcttccgaagtgagtctccagacagggctggggcctgacggtcagggtcaccaggaaattcacatccatgagggtaccttcatagagaatgggcagtgggagattattcataagccaagccgcctcattcagccaccaggcgaccccagaggaggcagagagggacagaggcaggaagtcattttttatctgattataaggaggaaacctctcttttacctggtgaatgttatcgcaccttgcattctgattacactgctggccatttttgtgttttacctgccacctgacgccggtgagaagatgggattaagtatcttcgcactgttgacccttaccgttttccttctgctgttggctgataaggtgccagaaactagtttaagtgtccccataattataaaatacttgatgtttaccatggtgctcgttacattttccgttatcctaagcgtggtggtgcttaacctccatcatcgatcccctcacactcaccaaatgccactgtgggtgcggcagatcttcatccataagctacccctctacctgcggctgaagcggccaaagcctgaaagggacttaatgcccgaaccgccacactgctctagccctggcagcggctggggaaggggcactgacgagtactttattcgcaaaccaccctctgacttcctctttccgaaacccaatcgattccaacccgagctgagcgctccagatctgcggcggttcatcgatggaccaaaccgtgctgtggctctcctccccgagctcagagaagtagtgtcctcaattagctacattgcaagacagttacaggaacaggaagatcacgacgctctgaaggaggactggcaattcgtggccatggtggtggacaggcttttcctctggacctttattattttcacaagtgttggaacactggtgatcttcttggatgcgacctatcacttaccacccccagacccgtttccatag

SEQ ID NO: 15086 - DNA, 1290 bp, Artificial Sequence
  derived and/or modified sequence
atgagcaccaaggtgtacctggacctggagtggaccgactaccggcttagctgggaccccgccgagcatgatggtatcgacagccttcgcatcacagccgaaagcgtgtggctgcctgatgtggtcctgctgaataataacgacgggaactttgatgtcgcactggacatatccgtggttgtctcttcagacgggagtgtaaggtggcagccacctggaatttaccggtcatcttgctcgatccaggtgacatacttcccctttgactggcagaattgtacaatggttttcagttcttattcctacgattcgtctgaggtttctctgcagacaggcttgggtcccgacggccaagggcatcaggaaattcacattcacgagggcactttcatcgaaaatggtcagtgggagatcatccacaaaccgtctagacttatccagccacccggcgatccaagaggtggccgcgagggccagcgacaggaggtgatcttctacctgatcatccgccgaaagcctctgttttacctggttaacgtgatcgctccatgcatcctcatcacattgctggccatatttgttttttacctgccgcccgacgccggagaaaagatgggactgtccatctttgctctgctgaccctgacagtcttcctgctgttgctcgcagacaaggtgccagagacctcactgagtgtccccataatcatcaaatatttaatgtttacaatggttctggtgaccttcagtgtcatcctgtcagtcgtagtactgaatctccatcatcggtctccccacacccaccagatgcccctttgggtacgccagatctttattcacaaactgcccctctatcttagactgaagaggcccaagcccgagcgcgacctgatgccggaaccgccccactgctcgagccctgggtccggctggggcaggggaacggacgaatatttcataaggaagccaccctctgacttcctatttcctaaacccaatcggttccaaccagagctgtccgcacctgacctccgacgctttatcgatgggcccaatagagctgtcgcgcttctgccagagcttagagaggttgtgtcctcaatttcctatattgctcggcagctccaggaacaagaagatcatgatgctcttaaagaggattggcagtttgtagccatggtcgtggaccggctgttcctgtggacatttatcatctttactagtgtgggcacacttgtgatattccttgacgccacataccacttaccccccccagacccttttccttag

SEQ ID NO: 15087 - DNA, 1506 bp, Artificial Sequence
  derived and/or modified sequence
atgactccaggggcactactcatgcttctgggcgctctgggggcacctctcgcccctggggttagaggctctgaggccgagggacgcctgagggagaaactgttttcaggatatgactcttccgtgagaccagccagggaggtgggagacagggtgagggtgtctgtggggttaattctcgcccagcttatttccctgaatgaaaaggatgaagagatgtctaccaaggtgtacttggacttagagtggaccgattaccggctctcctgggaccctgcggaacacgatggaattgacagcttaagaatcactgcagaatcggtgtggctgccagatgttgtacttctgaacaacaatgatggcaactttgatgttgctctcgacatctctgtggtggtgtcaagcgacggcagcgttaggtggcagcccccagggatctaccggtcgtcctgtagtatacaggtcacatactttccttttgactggcagaactgtaccatggtgttctcctcttacagctatgactctagcgaagtgtctctgcagaccggcctgggcccagatggacaggggcaccaggaaattcacatccacgaaggtacattcattgagaacggacagtgggagattattcacaaaccgtcccgactgattcagcctccaggcgatccacgaggaggacgcgagggacagagacaagaggtcatcttctacctgattattcgccgtaaaccactgttctatctggttaatgtgatagcaccatgtatactgatcacactgttagcaatattcgtgttctatctaccccctgatgcaggggagaagatgggtctgagcattttcgcactcctcacactgaccgtattcctcctactcctagcggataaggtccccgaaacgtcactgagtgtgcctataatcatcaagtatctcatgtttactatggtactggtcaccttctctgtgattttatccgtggtcgttctgaacctgcaccacaggtcaccacacacccaccagatgccattgtgggtgcggcagatctttatacataaacttcctctttacttacgcttgaagcggcctaaacccgagagagacctgatgcccgaacctccccactgtagttctcccggttccggttggggcagaggcactgacgaatactttataagaaaacctcccagtgatttcttatttcccaagcccaaccgattccagccagagttatccgcccctgatctccggagattcatcgacggcccaaacagagctgttgcccttctccccgagctcagagaagtggtcagtagcatctcgtacatcgccagacagctgcaggaacaagaggaccatgacgcgctcaaagaggactggcagtttgtggctatggtcgtcgataggctgtttctatggacctttattatctttacatcggtaggcaccctggtgatctttctggacgctacgtaccacttgccgccacccgacccctttccgtag

SEQ ID NO: 15088 - DNA, 1290 bp, Artificial Sequence
  derived and/or modified sequence
atgtctacaaaggtctacttggacctggaatggacagactacaggctgagttgggacccagctgagcatgacgggatcgattctctgcgtattaccgccgaatcagtctggctgccagatgtggtgcttctgaataacaatgacggcaatttcgacgtggcgttggacatctctgtagtggtgagctccgacggcagtgtgcgttggcagccacccggtatttataggagcagttgttccatccaggttacatatttcccgtttgattggcaaaactgtaccatggtattctctagctacagctacgactccagtgaggtgagtttacagacaggcctcggccctgacggacaggggcaccaggagatccatatccacgagggaactttcatcgaaaatggccagtgggagatcatccataagccgagcaggctcattcagccccctggcgacccgagaggcggtcgagaaggccagcgccaagaggtgatcttctacttgatcatccgccgaaaacctctgttttatctggtcaatgttatcgctccctgtatacttatcaccctactagcaatcttcgtcttctaccttccccctgatgcaggagagaaaatgggattgtccatctttgccttactgaccctgactgtatttctcttgctgcttgcagacaaagtcccggaaacttcactgtctgtgcccatcatcatcaaatatctgatgttcactatggttctagtgactttttcggttattttgagcgtcgttgtgctgaatctacaccaccgatccccccatacccaccagatgccactgtgggtcagacagatcttcatacacaagctgcctctgtacctccgactcaagagaccaaaaccagaaagagacctaatgccagagcctccacattgttcttccccaggatccggttggggacggggtacagacgaatacttcatccggaagcctccttctgatttcctgttccccaaacccaatagattccaaccagagctgtcagctccggatctgcggaggtttatcgatggtcccaatcgagccgttgctcttttaccagagctaagggaagtggtctcctccatttcttacattgccagacaattgcaggagcaggaggaccacgatgctcttaaggaagattggcaattcgtcgcaatggtggtggatcgcctatttttgtggactttcataattttcactagcgtggggacactcgtcatcttcttggacgccacatatcatttaccaccccctgacccattcccttag

SEQ ID NO: 15089 - DNA, 2557 bp, Artificial Sequence
  derived and/or modified sequence
gtcacttcccctgtgctggcggtcccagcggctctctgagcgaagtcactgagcgagccgccaggctatgaccccaggggctctgctgatgctgctgggggcgctgggggcgccgctcgccccaggcgtccgcggctcggaggcggagggtcgactccgggagaaacttttctctggctatgatagctccgtgcggccagcgcgggaggtgggagaccgtgtcagggtcagcgttggtctcatcctggcgcaactcatcagcctgaacgagaaggatgaagagatgagcacaaaggtgtacttagacctggagtggactgactacaggctgagctgggaccctgcggagcacgacggcatcgattcgctccgcatcacggcggaatccgtgtggctccctgacgtggtgctactgaacaacaatgatgggaattttgacgtggctctggacattagcgtcgtggtgtcctccgacggctccgtgcgttggcaacccccgggcatctatcgcagcagctgcagcatccaggtcacctacttccccttcgactggcagaattgcactatggtgttcagctcctacagctacgacagctcggaggtcagcctgcagacaggcctgggtcctgacgggcaagggcatcaggaaatccacattcatgaagggactttcattgagaatggccagtgggagattatccacaagccctctcggctaatccagcctccaggcgatcctaggggagggagggaaggacagcgccaggaagtcatcttctacctcatcatccgccgcaagcctctcttctacctggtcaacgtcattgccccatgcatcctcatcactcttctggccatcttcgtcttctacctgccaccagatgcaggagagaagatggggctctcaatctttgccctgctgacccttactgtgttcctgctgctgctggctgacaaagtacctgagacctcactatcagtacccattattatcaagtacctcatgtttaccatggtcctcgtcaccttctcagtcatccttagtgtcgtggttctcaacctgcaccaccgctcaccccacacccaccaaatgcccctttgggtccgtcagatcttcattcacaaacttccgctgtacctgcgtctaaaaaggcccaaacccgagagagacctgatgccggagccccctcactgttcttctccaggaagtggctggggtcggggaacagatgaatatttcatccggaagccgccaagtgattttctcttccccaaacccaataggttccagcctgaactgtctgcccctgatctgcggcgatttatcgatggtccaaaccgggctgtggccctgcttccggagctacgggaggtcgtctcctctatcagctacatcgctcgacagctgcaggaacaggaggaccacgatgcgctgaaggaggactggcagtttgtggccatggtagtggaccgcctcttcctgtggactttcatcatcttcaccagcgttgggaccctagtcatcttcctggacgccacgtaccacttgccccctccagacccctttccttgaagactggagggttgagacccaggccccctgccagttgaagtgagagtttggtgatactgtcaagccctatccttctctgcctcttaactccttcacgaggaatctgggcctcttatttcgtttctggggactgcattggactgagggctgggtaggcaggtgtcttggacccacctgaaatgcagtatcatctgatttactctttgggatcttgaagaagctcttttgggtatcaacacctaggtcgccagtgaaatagaacacagaacaggaactagattataagccttatgaggtcaagaaatgtgacttggccgggcgcggtggctcacgcctgtaatcccagcactttgggaggccaaggcgggcggatcacctgaggtcgggagtttgagaccagcccgaccaacatggagaaaccctgtctctactaaaaatacaaaattagccaggtgtggtggtacatgcctgtaatcccagctactagggaggctgaggcaggagaatcactcgaacccgggaggcagaggttgcagtgagtcaagatcacgccattgcactccagcctgggcaacaagagcgaaactccatctcaaaaaaaaaaaagtgtcttgttcactgcagcatgcccagtgccacgcacaggtgctgacctatagtaagtgcttaacatttgttgaataggggaaagaaatttccggaagtaaatacagcaattaataatgtttataagctgggcatggtcgctcaggccagtaatcccagtgacttaggaggctgaggtgggaggattacttgaaacccacagtttgagaccagcctgggcaacatagtgagaccctgtctctaaaaaaataaaaatagaaataaagtagtgcttattgtttgcatgttgggtcttgtggtcgttttctttttacctttctgtaatttattatgttttgtaatgtgtactatctctgggattaaaaaaagttatttcta

SEQ ID NO: 15090 - DNA, 1604 bp, Artificial Sequence
  derived and/or modified sequence
gagatggaccagcctttggtgaagattggatcgaaatcagaccaatggacaagctctggccgtgggtggtggacgggcctggagtagaactggaacgagaaggatgaagagatgagcacaaaggtgtacttagacctggagtggactgactacaggctgagctgggaccctgcggagcacgacggcatcgattcgctccgcatcacggcggaatccgtgtggctccctgacgtggtgctactgaacaacaatgatgggaattttgacgtggctctggacattagcgtcgtggtgtcctccgacggctccgtgcgttggcaacccccgggcatctatcgcagcagctgcagcatccaggtcacctacttccccttcgactggcagaattgcactatggtgttcagctcctacagctacgacagctcggaggtcagcctgcagacaggcctgggtcctgacgggcaagggcatcaggaaatccacattcatgaagggactttcattgagaatggccagtgggagattatccacaagccctctcggctaatccagcctccaggcgatcctaggggagggagggaaggacagcgccaggaagtcatcttctacctcatcatccgccgcaagcctctcttctacctggtcaacgtcattgccccatgcatcctcatcactcttctggccatcttcgtcttctacctgccaccagatgcaggagagaagatggggctctcaatctttgccctgctgacccttactgtgttcctgctgctgctggctgacaaagtacctgagacctcactatcagtacccattattatcaagtacctcatgtttaccatggtcctcgtcaccttctcagtcatccttagtgtcgtggttctcaacctgcaccaccgctcaccccacacccaccaaatgcccctttgggtccgtcagatcttcattcacaaacttccgctgtacctgcgtctaaaaaggcccaaacccgagagagacctgatgccggagccccctcactgttcttctccaggaagtggctggggtcggggaacagatgaatatttcatccggaagccgccaagtgattttctcttccccaaacccaataggttccagcctgaactgtctgcccctgatctgcggcgatttatcgatggtccaaaccgggctgtggccctgcttccggagctacgggaggtcgtctcctctatcagctacatcgctcgacagctgcaggaacaggaggaccacgatgcgctgaaggaggactggcagtttgtggccatggtagtggaccgcctcttcctgtggactttcatcatcttcaccagcgttgggaccctagtcatcttcctggacgccacgtaccacttgccccctccagacccctttccttgaagactggagggttgagacccaggccccctgccagttgaagtgagagtttggtgatactgtcaagccctatccttctctgcctcttaactccttcacgaggaatctgggcctcttatttcgtttctggggactgcattggactgagggctgggtaggcaggtgtcttggacccacctgaaatgcagtatcatctgatttactct

SEQ ID NO: 15091 - DNA, 1506 bp, Artificial Sequence
  derived and/or modified sequence
atgacccccggcgccctgctgatgctgctgggcgccctgggcgcccccctggcccccggcgtgagaggcagcgaggccgagggcagactgagagagaagctgttcagcggctacgacagcagcgtgagacccgccagagaggtgggcgacagagtgagagtgagcgtgggcctgatcctggcccagctgatcagcctgaacgagaaggacgaggagatgagcaccaaggtgtacctggacctggagtggaccgactacagactgagctgggaccccgccgagcacgacggcatcgacagcctgagaatcaccgccgagagcgtgtggctgcccgacgtggtgctgctgaacaacaacgacggcaacttcgacgtggccctggacatcagcgtggtggtgagcagcgacggcagcgtgagatggcagccccccggcatctacagaagcagctgcagcatccaggtgacctacttccccttcgactggcagaactgcaccatggtgttcagcagctacagctacgacagcagcgaggtgagcctgcagaccggcctgggccccgacggccagggccaccaggagatccacatccacgagggcaccttcatcgagaacggccagtgggagatcatccacaagcccagcagactgatccagccccccggcgaccccagaggcggcagagagggccagagacaggaggtgatcttctacctgatcatcagaagaaagcccctgttctacctggtgaacgtgatcgccccctgcatcctgatcaccctgctggccatcttcgtgttctacctgccccccgacgccggcgagaagatgggcctgagcatcttcgccctgctgaccctgaccgtgttcctgctgctgctggccgacaaggtgcccgagaccagcctgagcgtgcccatcatcatcaagtacctgatgttcaccatggtgctggtgaccttcagcgtgatcctgagcgtggtggtgctgaacctgcaccacagaagcccccacacccaccagatgcccctgtgggtgagacagatcttcatccacaagctgcccctgtacctgagactgaagagacccaagcccgagagagacctgatgcccgagcccccccactgcagcagccccggcagcggctggggcagaggcaccgacgagtacttcatcagaaagccccccagcgacttcctgttccccaagcccaacagattccagcccgagctgagcgcccccgacctgagaagattcatcgacggccccaacagagccgtggccctgctgcccgagctgagagaggtggtgagcagcatcagctacatcgccagacagctgcaggagcaggaggaccacgacgccctgaaggaggactggcagttcgtggccatggtggtggacagactgttcctgtggaccttcatcatcttcaccagcgtgggcaccctggtgatcttcctggacgccacctaccacctgcccccccccgaccccttcccctag

SEQ ID NO: 15092 - DNA, 1290 bp, Artificial Sequence
  derived and/or modified sequence
atgagcaccaaggtgtacctggacctggagtggaccgactacagactgagctgggaccccgccgagcacgacggcatcgacagcctgagaatcaccgccgagagcgtgtggctgcccgacgtggtgctgctgaacaacaacgacggcaacttcgacgtggccctggacatcagcgtggtggtgagcagcgacggcagcgtgagatggcagccccccggcatctacagaagcagctgcagcatccaggtgacctacttccccttcgactggcagaactgcaccatggtgttcagcagctacagctacgacagcagcgaggtgagcctgcagaccggcctgggccccgacggccagggccaccaggagatccacatccacgagggcaccttcatcgagaacggccagtgggagatcatccacaagcccagcagactgatccagccccccggcgaccccagaggcggcagagagggccagagacaggaggtgatcttctacctgatcatcagaagaaagcccctgttctacctggtgaacgtgatcgccccctgcatcctgatcaccctgctggccatcttcgtgttctacctgccccccgacgccggcgagaagatgggcctgagcatcttcgccctgctgaccctgaccgtgttcctgctgctgctggccgacaaggtgcccgagaccagcctgagcgtgcccatcatcatcaagtacctgatgttcaccatggtgctggtgaccttcagcgtgatcctgagcgtggtggtgctgaacctgcaccacagaagcccccacacccaccagatgcccctgtgggtgagacagatcttcatccacaagctgcccctgtacctgagactgaagagacccaagcccgagagagacctgatgcccgagcccccccactgcagcagccccggcagcggctggggcagaggcaccgacgagtacttcatcagaaagccccccagcgacttcctgttccccaagcccaacagattccagcccgagctgagcgcccccgacctgagaagattcatcgacggccccaacagagccgtggccctgctgcccgagctgagagaggtggtgagcagcatcagctacatcgccagacagctgcaggagcaggaggaccacgacgccctgaaggaggactggcagttcgtggccatggtggtggacagactgttcctgtggaccttcatcatcttcaccagcgtgggcaccctggtgatcttcctggacgccacctaccacctgcccccccccgaccccttcccctag

SEQ ID NO: 15093 - protein, 502 aa, Artificial Sequence
  derived and/or modified sequence
MARRCGPVALLLGFGLLRLCSGVWGTDTEERLVEHLLDPSRYNKLIRPATNGSELVTVQLMVSLAQLISVHEREQIMTTNVWLTQEWEDYRLTWKPEEFDNMKKVRLPSKHIWLPDVVLYNNADGMYEVSFYSNAVVSYDGSIFWLPPAIYKSACKIEVKHFPFDQQNCTMKFRSWTYDRTEIDLVLKSEVASLDDFTPSGEWDIVALPGRRNENPDDSTYVDITYDFIIRRKPLFYTINLIIPCVLITSLAILVFYLPSDCGEKMTLCISVLLALTVFLLLISKIVPPTSLDVPLVGKYLMFTMVLVTFSIVTSVCVLNVHHRSPTTHTMAPWVKVVFLEKLPALLFMQQPRHHCARQRLRLRRRQREREGAGALFFREAPGADSCTCFVNRASVQGLAGAFGAEPAPVAGPGRSGEPCGCGLREAVDGVRFIADHMRSEDDDQSVSEDWKYVAMVIDRLFLWIFVFVCVFGTIGMFLQPLFQNYTTTTFLHSDHSAPSSK

SEQ ID NO: 15094 - DNA, 1509 bp, Artificial Sequence
  derived and/or modified sequence
atggctcggcggtgcgggcccgttgcactgctcttgggatttggactcctccgtctgtgtagcggcgtgtggggtactgacacagaggagcgtctagtggagcaccttttagaccccagccgctataacaagctgattcggccggctaccaacggctctgaactggtgacagtccagctgatggtaagcttggcccaactcatctcagtccacgaacgggagcagattatgactacgaacgtttggctgactcaagagtgggaagattatcgcctcacttggaaaccagaggaatttgacaatatgaaaaaagtgcggctgccttctaaacatatctggctccccgatgtagtgctgtacaacaacgctgatggcatgtacgaggtttctttttatagtaatgcggtcgttagctatgacggctccattttttggctacctcccgctatctataagtctgcctgcaagatcgaggtgaagcactttccttttgaccaacagaactgcacaatgaaatttaggtcttggacatatgatcggacagaaatagacttagtgctcaagtccgaggtggctagtctcgatgacttcacacccagtggcgaatgggatatagtggctctcccaggcaggcggaatgagaaccccgacgatagcacctacgtggatattacctacgattttataattagaaggaagcctctgttctataccatcaacttgattattccctgcgtattaattacctcattggcaattttggtgttctacctgcccagcgattgtggcgaaaagatgaccctgtgtatctccgtgctgctagctttgacagtcttcctgcttctgattagcaagattgtgcctccgacatctctggatgtccctttggtgggcaagtatctaatgtttacaatggtgctggtgacgttctccatcgtgaccagcgtgtgtgttcttaatgtccatcaccggtcacctaccactcacaccatggccccatgggttaaagtggtctttctggaaaagctcccggcccttctttttatgcagcagccgagacatcactgcgctcggcagaggttgcgcctgcgacggcggcagcgggaaagggagggagcaggagccctttttttccgggaagcacccggcgctgactcctgcacctgctttgtgaaccgggcttctgtgcagggcctcgcgggcgctttcggggctgaacctgcgccggtagccgggccaggtaggtcaggcgagccatgtggttgtggactccgtgaagcagtggatggagtgcgtttcatcgctgaccacatgcgctccgaggatgatgaccagtcggtaagcgaggattggaaatacgtggccatggttatcgatagacttttcttgtggatattcgtattcgtctgtgtgttcggtaccattggcatgttcttgcagccactcttccagaactataccacaaccacattcctgcacagcgatcattcagcaccaagctccaagtag

SEQ ID NO: 15095 - DNA, 1509 bp, Artificial Sequence
  derived and/or modified sequence
atggcccggcgctgtggccctgtggccctgctgctgggcttcggcctgctgcggctgtgcagcggcgtgtggggcacagacacagaggagcggctggtggagcacctgctggaccccagccgctacaacaagctgatccggcctgccaccaatggaagtgagctggtgacagtgcagctgatggtgtccctggcccagctgatctctgtgcatgagcgggagcagatcatgaccaccaacgtgtggctgacccaggagtgggaggactaccgcctgacctggaagccagaggagtttgacaacatgaagaaggtgcggctgcccagcaagcacatctggctgcctgatgtggtgctgtacaacaatgctgatggcatgtatgaggtgtccttctacagcaatgctgtggtgtcctatgatggcagcatcttctggctgcccccagccatctacaagagcgcctgcaagattgaggtgaagcacttcccctttgaccagcagaactgcaccatgaagttccgctcctggacctatgacagaacagaaattgacctggtgctgaagtctgaggtggccagcctggatgacttcacccccagcggggagtgggacatcgtggccctgcctggaagaagaaatgaaaatccagatgacagcacctacgtggacatcacctatgacttcatcatccggaggaagcccctcttctacaccatcaacctgatcatcccctgtgtgctgatcaccagcctggccatcctggtgttctacctgcccagcgactgtggggagaagatgaccctgtgcatctctgtgctgctggccctgactgtgttcctgctgctgatcagcaagatcgtgccccccaccagcctggatgtgcccctggtgggcaagtacctgatgttcaccatggtgctggtgaccttcagcatcgtgacctctgtgtgtgtgctgaatgtgcaccacaggagccccaccacccacaccatggccccctgggtgaaggtggtgttcctggagaagctgcctgccctgctcttcatgcagcagcccaggcaccactgtgcccggcagaggctgcggctgcggcggcggcagcgggagcgggagggcgctggggccctcttcttccgggaggcccctggagctgacagctgcacctgctttgtgaacagagcctctgtgcagggcctggccggggcctttggagctgagcccgcccctgtggccggccctggccgcagcggggagccctgtggctgcggcctgcgggaggccgtggatggagtgcgcttcatcgctgaccacatgagaagtgaagatgatgaccagagcgtgtctgaggactggaagtatgtggccatggtgattgacaggctcttcctgtggatctttgtgtttgtgtgtgtgtttggcaccatcggcatgttcctgcagcccctcttccagaactacaccaccaccaccttcctgcacagcgaccacagcgcccccagcagcaagtag

SEQ ID NO: 15096 - DNA, 1509 bp, Artificial Sequence
  derived and/or modified sequence
atggcccggcggtgcggccccgtggccctgctgctgggcttcggccttctccggctgtgctctggcgtgtggggaactgatacagaggaaaggttggtggaacacttgctcgatcccagtaggtacaataaactgatccgcccggctacaaacggcagcgagctggtcactgtccagctaatggtgagtctggcccagctgatttcagtgcacgagagagaacagatcatgactacaaacgtgtggctgactcaggagtgggaggattatagactgacgtggaagcctgaagagttcgacaatatgaagaaggtcaggctgccatccaagcacatctggctaccagatgtggtcctttataacaacgcagatggcatgtatgaagtcagcttttattccaacgcggttgttagctacgatggctccatcttctggctcccgcctgcaatctacaagagcgcctgcaagatcgaggtgaaacatttcccgtttgaccagcagaactgcactatgaagttcagaagctggacctatgaccgtactgagattgacctggttttaaaatctgaggtagcgagtctggacgattttacgcccagtggcgagtgggacatagtggccctccccggccggagaaatgagaaccccgatgactctacgtatgtggacattacctacgatttcatcatccgtcgtaagcctctgttctacaccatcaacttgattattccctgcgtgttgatcacatcactagccatactcgtcttctacctgccctcagattgtggggaaaagatgactttatgtatctctgttctgctggctctcacagtgtttctgctgttgattagtaagatagtaccccccactagcctggacgtacctctcgtggggaagtacctgatgtttactatggttcttgtaacgttttctattgtcacatccgtttgcgtgctgaacgtacaccatcggagcccaaccactcacactatggcaccgtgggtgaaagtggttttcttggagaagctgccggccctcctctttatgcagcagccaagacaccattgtgctcgacaacgcctcaggcttcggcggcggcaaagggaacgggagggcgcaggggcacttttttttcgtgaggctccaggggcagatagctgcacgtgcttcgttaatagggcatccgttcaagggctcgcaggagccttcggggcggagcctgcccccgttgctggacctggccgctcgggtgaaccgtgtggatgcggcctcagagaggctgtcgacggggtgcgctttatcgctgatcatatgcgatcggaggatgacgatcaatccgtctcagaggattggaagtacgttgcgatggtgattgatcgtctcttcctctggattttcgtctttgtatgtgttttcgggaccatcggcatgttcctgcaaccccttttccagaattataccactactacattcctgcacagcgatcacagcgcaccgtcatccaagtag

SEQ ID NO: 15097 - DNA, 1509 bp, Artificial Sequence
  derived and/or modified sequence
atggccagaagatgtggacctgtagctctgctgctgggcttcggactcttgcgcctgtgcagtggagtgtgggggacagataccgaagagaggctggtggagcacctgctggatcccagtaggtataacaagctgattcggcctgccaccaacggatctgagctggtcacggtacagctcatggtgtccctggcacagttgatctcagtccacgagcgggagcaaatcatgaccactaacgtctggctcacccaagaatgggaagactacagactaacttggaaacctgaggagttcgataacatgaagaaggtcagactgccatcgaaacatatttggctgcccgatgtcgtgctgtataacaatgctgatggtatgtacgaagtgagcttttactccaatgcagttgtgtcgtatgacgggtctatcttttggttgcccccagccatctacaaaagcgcatgtaaaatcgaagtcaagcattttcccttcgaccaacaaaactgcacaatgaaattcaggtcctggacctatgaccggacagaaatcgacctagttctgaagtcagaggttgctagtttggacgatttcacaccctcaggagagtgggacatcgtggcactgcccggacgacggaacgaaaatcctgatgattctacttacgtcgatattacgtacgacttcatcatccgtcgcaaaccactcttctacaccattaacttgatcatcccttgtgtcctgatcacgtcactggctatactggtattttatctcccctcagactgcggtgaaaagatgacgctgtgcatctctgtcctactggctttgaccgtctttctgctgttgatcagtaaaatcgtgccacccactagcctagacgttcctttggttggtaagtatttgatgtttactatggtccttgtgactttttcaattgtgacctcggtgtgcgttttgaacgttcaccatcgaagccctaccactcacaccatggccccatgggtgaaagtggtatttctggaaaaactacctgcactgttgttcatgcaacagccacgtcaccattgcgcaagacagcggctgcggctgagacgacgccaacgagaacgcgagggggcaggagcattatttttcagggaagccccaggagcagattcctgtacctgtttcgtgaacagagcctctgtgcagggactggcaggcgcatttggagccgagcctgcaccagtggccggaccaggccgttccggtgaaccatgcgggtgtgggttgagagaggccgttgatggggttaggttcatagctgatcacatgcgatccgaagacgatgaccagtcggtgtcagaagattggaagtacgtcgccatggtaattgatcggctctttctttggatttttgtctttgtgtgtgtattcgggacgataggtatgttcctgcaaccattgtttcagaattacaccaccactacatttctgcattcagatcacagcgccccatcaagcaagtag

SEQ ID NO: 15098 - DNA, 5867 bp, Artificial Sequence
  derived and/or modified sequence
ctcctccccctcaccgtcccaattgtattccctggaagagcagccggaaaagcctccgcctgctcataccaggataggcaagaagctggtttctcctcgcagccggctccctgaggcccaggaaccaccgcggcggccggcaccacctggacccagctccaggcgggcgcggcttcagcaccacggacagcgccccacccgcggccctccccccggcggcgcgctccagccggtgtaggcgaggcagcgagctatgcccgcggcatggcccggcgctgcggccccgtggcgctgctccttggcttcggcctcctccggctgtgctcaggggtgtggggtacggatacagaggagcggctggtggagcatctcctggatccttcccgctacaacaagcttatccgcccagccaccaatggctctgagctggtgacagtacagcttatggtgtcactggcccagctcatcagtgtgcatgagcgggagcagatcatgaccaccaatgtctggctgacccaggagtgggaagattatcgcctcacctggaagcctgaagagtttgacaacatgaagaaagttcggctcccttccaaacacatctggctcccagatgtggtcctgtacaacaatgctgacggcatgtacgaggtgtccttctattccaatgccgtggtctcctatgatggcagcatcttctggctgccgcctgccatctacaagagcgcatgcaagattgaagtaaagcacttcccatttgaccagcagaactgcaccatgaagttccgttcgtggacctacgaccgcacagagatcgacttggtgctgaagagtgaggtggccagcctggacgacttcacacctagtggtgagtgggacatcgtggcgctgccgggccggcgcaacgagaaccccgacgactctacgtacgtggacatcacgtatgacttcatcattcgccgcaagccgctcttctacaccatcaacctcatcatcccctgtgtgctcatcacctcgctagccatccttgtcttctacctgccatccgactgtggcgagaagatgacgttgtgcatctcagtgctgctggcgctcacggtcttcctgctgctcatctccaagatcgtgcctcccacctccctcgacgtgccgctcgtcggcaagtacctcatgttcaccatggtgcttgtcaccttctccatcgtcaccagcgtgtgcgtgctcaacgtgcaccaccgctcgcccaccacgcacaccatggcgccctgggtgaaggtcgtcttcctggagaagctgcccgcgctgctcttcatgcagcagccacgccatcattgcgcccgtcagcgcctgcgcctgcggcgacgccagcgtgagcgcgagggcgctggagccctcttcttccgcgaagccccaggggccgactcctgcacgtgcttcgtcaaccgcgcgtcggtgcaggggttggccggggccttcggggctgagcctgcaccagtggcgggccccgggcgctcaggggagccgtgtggctgtggcctccgggaggcggtggacggcgtgcgcttcatcgcagaccacatgcggagcgaggacgatgaccagagcgtgagtgaggactggaagtacgtcgccatggtgatcgaccgcctcttcctctggatctttgtctttgtctgtgtctttggcaccatcggcatgttcctgcagcctctcttccagaactacaccaccaccaccttcctccactcagaccactcagcccccagctccaagtgaggcccttcctcatctccatgctctttcaccctgccaccctctgctgcacagtagtgttgggtggaggatggacgagtgagctaccaggaagaggggcgctgcccccacagatccatccttttgcttcatctggagtccctcctcccccacgcctccatccacacacagcagctccaacctggaggctggaccaactgctttgttttggctgctctccatctcttgtaccagcccaggcaatagtgttgaggaggggagcaaggctgctaagtggaagacagagatggcagagccatccaccctgaggagtgatgggcaaggggccaggaaggggacaggattgtctgctgcctccaagtcatgggagaagaggggtataggacaaggggtggaagggcaggagctcacaccgcaccgggctggcctgacacaatggtagctctgaagggaggggaagagagaggcctgggtgtgacctgacacctgccgctgcttgagtggacagcagctggactgggtgggccccacagtggtcagcgattcctgccaagtagggtttagccgggccccatggtcacagacccctgggggaggcttccagctcagtcccacagccccttgcttctaagggatccagagacctgctccagatcctctttccccactgaagaattctgcaccctctggacttccctcttcttccttcctttctcaggctcaaggtgtggggggcaaggctgagtattaggggagcttctgagttctgaatctttgggtgacctgcttggagtctcaggtccaaatacttgaaatctgtgagaagtccaagttcatgggcttttggaactggaagaactttgtacagccatggattccaacataagccatgttgcagatgaagaaactgacccacacggtgagacaagcacaggtgggtctgactcttcctccctgccctgagatccatctgtcgagtgccctgttttttccccactttgaactgactggttactctaaggaagtgaactgaggatgttagctttaagccaacccagcctctttgtccacagcagagctgaggtgaacagctggaaccctgctacatccgtgctgctccagtctgttctgctcatggctccatccttctggctgtcactcttcctcttccccttcccaaccaaacctgagcagctttgaagcagaacttgggaaggacagggctgctgctgccagcgacacctcagaaagcatagcctcggcttcctgccccatgtgtccctggaagctgtaccctgactctgcttccagaggccagcagatggtgggttacagacgggtcagcctgccaagtgcacctgagggacctgacctgacacaagccattttgtccctagagcccagctgggactcctgcttctctaggcagggcagagggaggagacacagcacaggcacagagcatgggacagggacccccgagtctggattcaagtcctggccctgctagtaactcatgtgagccagcttgagcaagtcccttcatcttgctagagctcagcttccttgcctataaaacgtaggtggcaatgccctcttcctgaggttgctgggaggataaggcagtgcttgtgaaaaagtctagcgctgtacctggcacagagtagatgcttcatgaatgttgagtctgacaggcaactggagctggtgagaatggggtcccctgactgtcatgccagcctccctcccaggcccactcttcccccctcttccctgaggaaaccaagtctcccttatcaggaagagctgggggagctgggaggaacattacaggaacaccagagggagtctagcgggtgggcaggcttctctctgcagccccctcagcagtttcattccattcctgggctgaacccttgccctggccctgcctcccttctgggtcagcacctcctgacacaggtgtgtgctcagggaccccaggctctagtcctgtactggctgtggaagcctatcactgggacaggaagccagtggctgcaggagacaggcctcagcgcatctcgtctgtcaggatgggctcacggacaccttttcttggtagcagggagtgtctctgcactatggaaactttccctcttctagagcggattgggagttgcctgtattatgcctgaaccctccttgaactcatggtcctggggaaggcgtcttggaaccagaaacagcaacaggaaaggagcctccctctgaagggtaggatgccggcctgaggccctccctcttggctctcccagggcctgggctaccccgaggccccagcagctgctgctgtggctgtacttgcttttaatatttcccatacatggctgttgtccaagttaagtcaccaaatggtgctagaggggatggcagagagcagcttgtccagctcctctccatgacccggttaacacacgagtaaacaggcctagagcttgtctgctgtttgacctcttttaagacccggctgtgctgcatctacaaaatgaagatgacagagctagccgaggtcttcagcaaggaagaaaggggtcagtgtatatgaaagggttacctgggcagtgtcattccctccatctctgtacgcagccctttgggaaccatcacaataaggaagaggtgagggcagaggtgaaggatccactgcccaggcaaggtgctaccatgtggtgggagagtgtgaaccctcaagtgcactgggaagctttggggaaccacagtctcttccacccttgggtcgtgtgtcgtcctcttctcttgatgtcagggaagcccctatgcctccttcccgtggtggggctatctctgcagagaatcgggtgcccagcttaatgctgggcaaggactggaggaagctccagatctggaggtggcagagatactggatggaaacctggagcaagggtttgggaggggaagtgaggaaacaggttgagactatctccatcagagatggcaaggccacaggtgatctgagaactatttttgtctgaaaagaaggcatgcacaggctctctgcttttgacaggtggcgttgcagtgggaggaaggcagcttcctggcggggagatagaaatactagaacagctggtaccaagttattgaaaatttaaaagcaaacaagacacagcagcccccaggtggtgtgttctactgaggaaggctacggcagaggaagggcaagaccgtttcccccaatggtcttgaaacggaagaggaaacagggagggctctttggatggtttggggacctggggctgtttgtatcccagtattagctcctgttactaagggtctgctctgcgccaggtcctcagcatgcgttgtctttattccgcgtgacaatcctatgggaaggggcctccacctacgtaacagaaatgcggctcagaaagaccaagtgacagctagtgagtagtgctgggcctgaaccccaaagtccacactcttgctatagccgctgaggcaggcagaagagctccttgggaggaaagtaaggggcattcaaagccttctctgaatcactccccaagccagagtagacctggttccagttgtcccccccttgtttccgggcagagtcaggcaggtgtcataccatccctccccgcccaaccagtgctggccagactcccattcaccgaccttgactagacagcgaacagccaccttttagtattcatcccaacaggtccaggcggtcagtgtgatagccacgcagttcctaagggactgtaggtctaggaatcattaggacactcactcagccaccctcgatgcccccatcttccccacactgcccttggcctccccgctctgcacgcctggagtatttgcactggtctagcctactccaggtcagactcattaggaactcaagattctcgtaaagaaagttgtttccaaagttgtcttgtcactctatttgggggttgggagagagcccgtgggggccagcgttggcgaatacaggaaaaagggagaatgctggagaaactggactcgtgagagcttaaagacatcacaagaatccaaagaaaaagtgagtggtgaca

SEQ ID NO: 15099 - DNA, 1509 bp, Artificial Sequence
  derived and/or modified sequence
atggccagaagatgcggccccgtggccctgctgctgggcttcggcctgctgagactgtgcagcggcgtgtggggcaccgacaccgaggagagactggtggagcacctgctggaccccagcagatacaacaagctgatcagacccgccaccaacggcagcgagctggtgaccgtgcagctgatggtgagcctggcccagctgatcagcgtgcacgagagagagcagatcatgaccaccaacgtgtggctgacccaggagtgggaggactacagactgacctggaagcccgaggagttcgacaacatgaagaaggtgagactgcccagcaagcacatctggctgcccgacgtggtgctgtacaacaacgccgacggcatgtacgaggtgagcttctacagcaacgccgtggtgagctacgacggcagcatcttctggctgccccccgccatctacaagagcgcctgcaagatcgaggtgaagcacttccccttcgaccagcagaactgcaccatgaagttcagaagctggacctacgacagaaccgagatcgacctggtgctgaagagcgaggtggccagcctggacgacttcacccccagcggcgagtgggacatcgtggccctgcccggcagaagaaacgagaaccccgacgacagcacctacgtggacatcacctacgacttcatcatcagaagaaagcccctgttctacaccatcaacctgatcatcccctgcgtgctgatcaccagcctggccatcctggtgttctacctgcccagcgactgcggcgagaagatgaccctgtgcatcagcgtgctgctggccctgaccgtgttcctgctgctgatcagcaagatcgtgccccccaccagcctggacgtgcccctggtgggcaagtacctgatgttcaccatggtgctggtgaccttcagcatcgtgaccagcgtgtgcgtgctgaacgtgcaccacagaagccccaccacccacaccatggccccctgggtgaaggtggtgttcctggagaagctgcccgccctgctgttcatgcagcagcccagacaccactgcgccagacagagactgagactgagaagaagacagagagagagagagggcgccggcgccctgttcttcagagaggcccccggcgccgacagctgcacctgcttcgtgaacagagccagcgtgcagggcctggccggcgccttcggcgccgagcccgcccccgtggccggccccggcagaagcggcgagccctgcggctgcggcctgagagaggccgtggacggcgtgagattcatcgccgaccacatgagaagcgaggacgacgaccagagcgtgagcgaggactggaagtacgtggccatggtgatcgacagactgttcctgtggatcttcgtgttcgtgtgcgtgttcggcaccatcggcatgttcctgcagcccctgttccagaactacaccaccaccaccttcctgcacagcgaccacagcgcccccagcagcaagtag

SEQ ID NO: 15100 - protein, 458 aa, Artificial Sequence
  derived and/or modified sequence
MLPDFMLVLIVLGIPSSATTGFNSIAENEDALLRHLFQGYQKWVRPVLHSNDTIKVYFGLKISQLVDVDEKNQLMTTNVWLKQEWTDHKLRWNPDDYGGIHSIKVPSESLWLPDIVLFENADGRFEGSLMTKVIVKSNGTVVWTPPASYKSSCTMDVTFFPFDRQNCSMKFGSWTYDGTMVDLILINENVDRKDFFDNGEWEILNAKGMKGNRRDGVYSYPFITYSFVLRRLPLFYTLFLIIPCLGLSFLTVLVFYLPSDEGEKLSLSTSVLVSLTVFLLVIEEIIPSSSKVIPLIGEYLLFIMIFVTLSIIVTVFVINVHHRSSSTYHPMAPWVKRLFLQKLPKLLCMKDHVDRYSSPEKEESQPVVKGKVLEKKKQKQLSDGEKVLVAFLEKAADSIRYISRHVKKEHFISQVVQDWKFVAQVLDRIFLWLFLIVSVTGSVLIFTPALKMWLHSYH

SEQ ID NO: 15101 - DNA, 1377 bp, Artificial Sequence
  derived and/or modified sequence
atgttgcctgattttatgctcgtgttaatcgtcttggggataccatccagcgccaccacgggatttaattcaattgccgagaacgaagatgcactgcttagacatctatttcaaggctaccaaaaatgggtgaggccggttctacatagcaacgatactattaaggtgtatttcgggctgaagataagccaactggtggatgtggacgagaaaaatcagcttatgactactaatgtgtggctgaaacaagagtggaccgatcacaaacttcgatggaacccggatgattacggcggcattcacagcatcaaagtcccaagtgaatccctgtggttgccagatatcgtgctgttcgaaaatgcggacggtcgcttcgagggaagtctgatgacaaaggtgatcgtcaagtccaacgggacagtcgtgtggacgccccccgcgtcatacaaatcaagttgtacaatggacgttaccttttttcctttcgataggcagaattgttccatgaagtttgggagttggacttacgacggtacaatggtggatctcattctgataaacgaaaatgtcgacagaaaagatttcttcgataatggggagtgggagattctcaacgccaaggggatgaagggtaacagaagggatggggtgtacagctacccctttattacctacagctttgtgcttagacggcttcctctcttttacactcttttcctaatcataccctgcttggggttgtcattcctgacagtcttggtgttctatttaccctccgatgagggtgagaaactcagtttgtctacttcagtccttgtttctttaacagtgttcctgctagtgatcgaagagatcatcccttcatcttcaaaggtgatccctctgatcggggagtatctcctcttcattatgatcttcgtgaccttgtctatcatcgtgactgtattcgtgatcaatgtgcatcatcgatcaagctccacataccatccgatggcaccctgggtgaaacggctgtttctgcaaaagctgcctaagctgctatgtatgaaagaccacgtcgatcgttacagctccccagagaaggaggaatctcaacccgtcgtgaagggaaaagttctagagaagaagaaacaaaagcagctgtcagatggagaaaaagtgttagtggcattcctggagaaagcagctgacagcatccgatatattagtagacacgtgaagaaggagcacttcatcagccaggtggtgcaggattggaagtttgttgcccaggtgctcgaccggatctttttgtggttgttcctaatcgtgagtgtgacagggtcagtgcttatctttaccccagccctaaagatgtggctccattcttatcattag

SEQ ID NO: 15102 - DNA, 1377 bp, Artificial Sequence
  derived and/or modified sequence
atgctgcctgacttcatgctggtgctgattgtgctgggcatccccagcagcgccaccaccggcttcaacagcattgctgaaaatgaagatgccctgctgcggcacctgttccagggctaccagaagtgggtgcggcctgtgctgcacagcaatgacaccatcaaggtgtacttcggcctgaagatcagccagctggtggatgtggatgagaagaaccagctgatgaccaccaacgtgtggctgaagcaggagtggacagaccacaagctgcgctggaacccagatgattatggaggcatccacagcatcaaggtgcccagcgagagcctgtggctgcctgacatcgtgctgtttgaaaatgctgatggccgctttgagggcagcctgatgaccaaggtgattgtgaagagcaatggcaccgtggtgtggaccccaccagccagctacaagagcagctgcaccatggatgtgaccttcttcccctttgaccggcagaactgcagcatgaagtttggctcctggacctatgatggcaccatggtggacctgatcctgatcaatgaaaatgtggacaggaaggacttctttgacaacggggagtgggagatcctgaatgccaagggcatgaagggcaacagaagagatggagtgtacagctaccccttcatcacctacagctttgtgctgcggcggctgcccctcttctacaccctcttcctgatcatcccctgcctgggcctgtccttcctgactgtgctggtgttctacctgcccagtgatgaaggagagaagctgagcctgagcacctctgtgctggtgtccctgaccgtcttcctgctggtgattgaggagatcatccccagcagcagcaaggtgatccccctcatcggggagtacctgctcttcatcatgatctttgtgaccctgagcatcatcgtgacagtgtttgtgatcaacgtgcaccacaggagcagcagcacctaccaccccatggccccctgggtgaagaggctcttcctgcagaagctgcccaagctgctgtgcatgaaggaccacgtggaccgctacagcagccctgagaaggaggagagccagcctgtggtgaagggcaaggtgctggagaagaagaagcagaagcagctgagtgatggagagaaggtgctggtggccttcctggagaaggctgctgacagcatccgctacatcagcagacatgtgaagaaggagcacttcatcagccaggtggtgcaggactggaagtttgtggcccaggtgctggaccgcatcttcctgtggctgttcctgattgtgtctgtgacaggctctgtgctgatcttcaccccagccctgaagatgtggctgcacagctaccactag

SEQ ID NO: 15103 - DNA, 1377 bp, Artificial Sequence
  derived and/or modified sequence
atgctgcccgacttcatgctggtgctgatcgtgctgggcatcccctcttcagccactactggctttaatagtattgccgagaatgaggacgcgctcttgcgacacttgttccagggttaccagaaatgggtgcgccctgtgctccactctaacgatactatcaaagtctactttggattgaagataagccagctggtggacgtagatgagaagaaccaattgatgacgaccaacgtttggctgaaacaggagtggacggaccacaagctgcgttggaacccagacgattatggcggaatccactctatcaaagtcccatctgagagtctgtggcttcctgacatcgtgctatttgagaacgctgacggacgcttcgagggatccctgatgactaaagtgatagttaagagtaacggcactgtggtgtggactcccccggcttcttataaatcatcctgcactatggacgtgacattttttccatttgatagacagaattgcagcatgaaattcgggtcctggacatatgatggaactatggttgatctgatactcatcaacgaaaacgtagacaggaaggatttctttgacaacggagaatgggagatactgaatgcgaagggtatgaaagggaatagaagagacggtgtatacagctaccctttcattacatattcattcgtgcttaggagactgcccctgttctatacattgttcctgatcataccctgccttgggttaagcttcctgaccgtgcttgtgttctacctcccctcagacgagggggagaaactgtcactctctacatcagtgctggtcagccttaccgttttcctgctggtgatagaggagattattcccagttcctcaaaggtgattccgcttatcggcgaatatctgctcttcatcatgatcttcgtgaccctgagcattatcgtgacagtgttcgtaattaacgtccatcataggagctcctccacctaccaccccatggccccatgggtgaagcgcttgttcttgcagaagttacccaagttgttatgcatgaaagatcacgtggatagatatagctccccagagaaggaggagtcacaaccagtggtgaaaggcaaggtgttagaaaaaaagaagcagaaacagttgtcagacggcgagaaggtgctggttgccttcttggagaaggctgcggactctatcagatatatatcccgccatgtgaagaaggagcatttcatttcccaagttgttcaggattggaaattcgtggcacaggtgttggacagaatttttttatggctcttcctaatagtcagcgtgactgggtcagtcttaatttttacccctgctctgaaaatgtggctacacagctatcactag

SEQ ID NO: 15104 - DNA, 1377 bp, Artificial Sequence
  derived and/or modified sequence
atgctcccagacttcatgctggtgcttatagtactgggcatcccgagcagcgccaccactgggtttaattcaattgctgagaatgaggatgcacttctgcgccatctattccaggggtaccagaaatgggtcaggccagtattgcactccaacgacacaatcaaggtttactttggactgaagatctcacagctcgtagacgtggacgaaaagaatcagctcatgacaacaaacgtttggctcaaacaagagtggaccgatcataagctgcggtggaatcctgatgactacgggggaattcatagtattaaagtcccatccgaatccctttggcttccggacatcgttcttttcgaaaatgctgatggaagatttgaggggagccttatgaccaaggtgattgtgaaatccaatgggacagtcgtatggaccccacctgcgtcctacaagtcttcatgcacgatggatgtgacattcttccctttcgaccgacaaaattgttccatgaagttcgggagctggacctatgacggcactatggtcgacctcatcctgattaacgagaacgtggatcgcaaggattttttcgataatggcgaatgggaaattctaaatgctaaaggtatgaaggggaatcggagggacggggtctacagctacccctttataacatattcttttgtgcttcgcagactgccacttttctacacactattccttataatcccctgtctggggttatcttttctgacagtcctggtcttttacttgccttctgacgaaggagagaagctgtccctaagtacaagtgtgctggtcagccttacagtgtttctcctggtcattgaagagatcatccccagctcctccaaggtaatccctctgatcggagaatacctactgtttatcatgatctttgtgacactgagcattatcgtaacagttttcgtgattaatgtacaccatcggagctcctcaacctaccatcccatggcaccatgggtcaaacgactgttcttacagaaactgccaaagctgttgtgcatgaaggaccacgttgatcggtattcaagcccggagaaggaagagagtcaaccggttgttaaaggaaaggtgctcgaaaagaagaaacagaaacagttgtcggatggcgagaaagttctagtcgcttttctcgagaaggccgcagattccatacgctacatctctagacacgttaagaaagaacacttcatctcacaagtcgtgcaggattggaagttcgtggctcaggtacttgaccgaatttttttgtggctgttccttatcgtttccgtgaccggcagcgtgctgatctttacgcctgcgcttaaaatgtggcttcactcttaccactag

SEQ ID NO: 15105 - DNA, 2294 bp, Artificial Sequence
  derived and/or modified sequence
tgttgctgtcctcttgggttccacttcggattttgaacccctgtattttcttttcaaaacccccttttccagtggaaatgctctgttgttaaaaaggaagaaactgtctttctgaaactgacatcacgatgctcccagattttatgctggttctcatcgtccttggcatcccttcctcagccaccacaggtttcaactcaatcgccgaaaatgaagatgccctcctcagacatttgttccaaggttatcagaaatgggtccgccctgtattacattctaatgacaccataaaagtatattttggattgaaaatatcccagcttgtagatgtggatgaaaagaatcagctgatgacaaccaatgtgtggctcaaacaggaatggacagaccacaagttacgctggaatcctgatgattatggtgggatccattccattaaagttccatcagaatctctgtggcttcctgacatagttctctttgaaaatgctgacggccgcttcgaaggctccctgatgaccaaggtcatcgtgaaatcaaacggaactgttgtctggacccctcccgccagctacaaaagctcctgcaccatggacgtcacgtttttcccgttcgaccgacagaactgctccatgaagtttggatcctggacttatgatggcaccatggttgacctcattttgatcaatgaaaatgtcgacagaaaagacttcttcgataacggagaatgggaaatactgaacgcaaaggggatgaaggggaacagaagggacggcgtgtactcctatccctttatcacgtattccttcgtcctgagacgcctgcctttattctataccctctttctcatcatcccctgcctggggctgtctttcctaacagttcttgtgttctatttaccttcggatgaaggagaaaaactttcattatccacatcggtcttggtttctctgacagttttccttttagtgattgaagaaatcatcccatcgtcttccaaagtcattcctctcattggagagtacctgctgttcatcatgatttttgtgaccctgtccatcattgttaccgtgtttgtcattaacgttcaccacagatcttcttccacgtaccaccccatggccccctgggttaagaggctctttctgcagaaacttccaaaattactttgcatgaaagatcatgtggatcgctactcatccccagagaaagaggagagtcaaccagtagtgaaaggcaaagtcctcgaaaaaaagaaacagaaacagcttagtgatggagaaaaagttctagttgcttttttggaaaaagctgctgattccattagatacatttcgagacatgtgaagaaagaacattttatcagccaggtagtacaagactggaaatttgtagctcaagttcttgaccgaatcttcctgtggctctttctgatagtgtcagtaacaggctcggttctgatttttacccctgctttgaagatgtggctacatagttaccattaggaatttaaaagacataagactaaattacaccttagacctgacatctggctatcacacagacagaatccaaatgcatgtgcttgttctacgaaccccgaatgcgttgtctttgtggaaatggaacatctcctcatgggagaaactctggtaaatgtgctcatttgtggttgccatgagagtgagctgcttttaaagaaagtggagcctcctcagacccctgccttggctttcccagacattcagggagggatcataggtccaggcttgagctcacatgtggccagagtgcacaaaaagctgttgctacttggtggaggaacacctcctagaagcagcaggcctcggtggtgggggaggggggattcacctggaattaaggaagtctcggtgtcgagctatctgtgtgggcagagcctggatctcccaccctgcactggcctccttggtggttttgtctgagctgcaaactggggccgtgttatgcttgttagcaatgggccaggcaaatctcaacaagggtttggggattacactggcaggatagctggcactgcacacttaacaataacacagattccaagttgcctggcctaccgaagcaggtgttattcatggtttattcccagcatgataaggctttcagatggtgaaactggagcccactgtgagctgtgacttcctttaaggtcatgcataccaaaataactcacaatagaaacaaagccctttgctaccagaagtggattcattaatacccattatcttttcctagtaaactagtgtacagaa

SEQ ID NO: 15106 - DNA, 1377 bp, Artificial Sequence
  derived and/or modified sequence
atgctgcccgacttcatgctggtgctgatcgtgctgggcatccccagcagcgccaccaccggcttcaacagcatcgccgagaacgaggacgccctgctgagacacctgttccagggctaccagaagtgggtgagacccgtgctgcacagcaacgacaccatcaaggtgtacttcggcctgaagatcagccagctggtggacgtggacgagaagaaccagctgatgaccaccaacgtgtggctgaagcaggagtggaccgaccacaagctgagatggaaccccgacgactacggcggcatccacagcatcaaggtgcccagcgagagcctgtggctgcccgacatcgtgctgttcgagaacgccgacggcagattcgagggcagcctgatgaccaaggtgatcgtgaagagcaacggcaccgtggtgtggaccccccccgccagctacaagagcagctgcaccatggacgtgaccttcttccccttcgacagacagaactgcagcatgaagttcggcagctggacctacgacggcaccatggtggacctgatcctgatcaacgagaacgtggacagaaaggacttcttcgacaacggcgagtgggagatcctgaacgccaagggcatgaagggcaacagaagagacggcgtgtacagctaccccttcatcacctacagcttcgtgctgagaagactgcccctgttctacaccctgttcctgatcatcccctgcctgggcctgagcttcctgaccgtgctggtgttctacctgcccagcgacgagggcgagaagctgagcctgagcaccagcgtgctggtgagcctgaccgtgttcctgctggtgatcgaggagatcatccccagcagcagcaaggtgatccccctgatcggcgagtacctgctgttcatcatgatcttcgtgaccctgagcatcatcgtgaccgtgttcgtgatcaacgtgcaccacagaagcagcagcacctaccaccccatggccccctgggtgaagagactgttcctgcagaagctgcccaagctgctgtgcatgaaggaccacgtggacagatacagcagccccgagaaggaggagagccagcccgtggtgaagggcaaggtgctggagaagaagaagcagaagcagctgagcgacggcgagaaggtgctggtggccttcctggagaaggccgccgacagcatcagatacatcagcagacacgtgaagaaggagcacttcatcagccaggtggtgcaggactggaagttcgtggcccaggtgctggacagaatcttcctgtggctgttcctgatcgtgagcgtgaccggcagcgtgctgatcttcacccccgccctgaagatgtggctgcacagctaccactag

SEQ ID NO: 15107 - protein, 498 aa, Artificial Sequence
  derived and/or modified sequence
MRRAPSLVLFFLVALCGRGNCRVANAEEKLMDDLLNKTRYNNLIRPATSSSQLISIKLQLSLAQLISVNEREQIMTTNVWLKQEWTDYRLTWNSSRYEGVNILRIPAKRIWLPDIVLYNNADGTYEVSVYTNLIVRSNGSVLWLPPAIYKSACKIEVKYFPFDQQNCTLKFRSWTYDHTEIDMVLMTPTASMDDFTPSGEWDIVALPGRRTVNPQDPSYVDVTYDFIIKRKPLFYTINLIIPCVLTTLLAILVFYLPSDCGEKMTLCISVLLALTFFLLLISKIVPPTSLDVPLIGKYLMFTMVLVTFSIVTSVCVLNVHHRSPSTHTMAPWVKRCFLHKLPTFLFMKRPGPDSSPARAFPPSKSCVTKPEATATSTSPSNFYGNSMYFVNPASAASKSPAGSTPVAIPRDFWLRSSGRFRQDVQEALEGVSFIAQHMKNDDEDQSVVEDWKYVAMVVDRLFLWVFMFVCVLGTVGLFLPPLFQTHAASEGPYAAQRD

SEQ ID NO: 15108 - DNA, 1497 bp, Artificial Sequence
  derived and/or modified sequence
atgagaagagctcccagccttgtcctctttttcttggttgccctgtgtggtcgaggaaattgtcgggttgcaaacgctgaagagaagctgatggacgacctcctaaacaaaacccgctataataacctgatccgcccagccacctcgagctctcaactgatcagcataaagctgcagctgtcccttgcgcagctcatctctgtgaacgagcgagagcagattatgacgacaaacgtctggctgaaacaggaatggaccgactataggctgacgtggaactcgtcgaggtatgaaggcgtcaacattttgcggatacccgctaagcgtatctggcttcctgacatcgtgctgtacaacaacgccgatggcacctatgaggtgtcggtgtacactaacttgattgtgaggagcaacgggagtgtgctatggttgccgcccgccatttacaagagcgcctgcaagatcgaggtgaagtatttccccttcgatcagcagaactgcactctgaaattccggtcctggacgtatgaccacacggaaatcgacatggtcctgatgaccccgactgccagcatggacgactttacgccatcaggtgagtgggatattgtcgcgctccctggtcgccggacggtaaacccccaggacccaagctatgtggacgttacctacgattttattattaaaaggaagccactcttttataccatcaatctgatcatcccgtgcgtcctgacgactctcctggccatcctggtgttttacctgccttcagactgtggcgaaaagatgacgctctgcatttcagtattgctggccctaacatttttccttctcttgatctcaaaaattgtgcccccgaccagcctggatgtcccgctgatcggaaagtacctgatgttcaccatggtcctggtgacattttctatcgttacttcagtgtgtgttctgaatgttcaccatcggtctcccagcacccacaccatggccccttgggtcaaacgttgttttctgcacaagctacccacctttttgtttatgaaaaggcctgggcccgattcatccccagccagggcctttcccccttctaagtcctgcgtgacaaaaccagaggcaaccgccacgtctactagtccttccaacttctatggcaatagcatgtattttgttaaccctgcctccgccgcttctaagtcccctgccggctccacccccgtcgctattccaagggacttttggctgagatcctctggccggtttaggcaggatgtacaggaggccctggagggcgtgtcattcatagctcaacacatgaagaacgacgacgaggaccagagcgtggttgaagactggaaatatgtggcaatggtagtggacagactgttcttgtgggtcttcatgttcgtatgcgtattgggtactgtgggacttttcttgccacccctgttccagactcacgctgcctcggaaggtccctatgcggcccagcgcgactag

SEQ ID NO: 15109 - DNA, 1497 bp, Artificial Sequence
  derived and/or modified sequence
atgaggcgggcccccagcctggtgctcttcttcctggtggccctgtgtggccggggcaactgccgggtggccaatgctgaggagaagctgatggatgacctgctgaacaagacccgctacaacaacctgatccggcctgccaccagcagcagccagctgatcagcatcaagctgcagctgagcctggcccagctgatctctgtgaatgaaagagagcagatcatgaccaccaacgtgtggctgaagcaggagtggacagactaccgcctgacctggaacagcagccgctatgaaggagtgaacatcctgcgcatcccagccaagaggatctggctgcctgacatcgtgctgtacaacaatgctgatggcacctatgaggtgtctgtgtacaccaacctgattgtgcgcagcaatggatctgtgctgtggctgcccccagccatctacaagagcgcctgcaagattgaggtgaagtacttcccctttgaccagcagaactgcaccctgaagttccgctcctggacctatgaccacacagaaattgacatggtgctgatgacccccacagcctccatggatgacttcacccccagcggggagtgggacatcgtggccctgcctggaagaagaacagtgaacccccaggaccccagctatgtggatgtgacctatgacttcatcatcaagaggaagcccctcttctacaccatcaacctgatcatcccctgtgtgctgaccaccctgctggccatcctggtgttctacctgcccagcgactgtggggagaagatgaccctgtgcatctctgtgctgctggccctgaccttcttcctgctgctgatcagcaagatcgtgccccccaccagcctggatgtgcccctgattggcaagtacctgatgttcaccatggtgctggtgaccttcagcatcgtgacctctgtgtgtgtgctgaatgtgcaccacaggagccccagcacccacaccatggccccctgggtgaagcgctgcttcctgcacaagctgcccaccttcctgttcatgaagaggcctggccctgacagcagccctgcccgggccttcccccccagcaagagctgtgtgaccaagccagaggccacagccaccagcaccagccccagcaacttctacggcaacagcatgtactttgtgaacccagccagcgctgccagcaagagccctgctggcagcacccctgtggccatcccccgggacttctggctgcggagcagcggccgcttccggcaggatgtgcaggaggccctggagggcgtgtccttcatcgcccagcacatgaagaatgatgatgaggaccagagcgtggtggaggactggaagtatgtggccatggtggtggacaggctcttcctgtgggtgttcatgtttgtgtgtgtgctgggcaccgtgggcctcttcctgcccccactcttccagacccatgctgccagcgagggcccctatgctgcccagagggactag

SEQ ID NO: 15110 - DNA, 1497 bp, Artificial Sequence
  derived and/or modified sequence
atgcggcgggcccccagcctggtgctgttcttcctggtggccctgtgtggtaggggcaactgcagggtcgcaaatgcagaggagaagttaatggatgacttgcttaataaaacacgttacaacaatctgattcggccagccaccagcagcagccagcttatctcaatcaagctgcagctcagcctagcacaactcatctccgtgaatgaacgggagcaaatcatgacaaccaatgtgtggctcaagcaagaatggaccgattacaggctcacttggaattcgagcaggtacgagggagtaaacatactgaggatcccagcaaagagaatctggcttcctgatatcgttctttataataacgcagacggcacatatgaggtgagcgtctacaccaatctcattgtccggtctaacgggtcggtgttgtggctccctcctgccatctacaagagtgcgtgcaagatcgaggtaaaatacttccccttcgatcagcagaattgtactctgaagttccgaagctggacctacgaccacaccgagattgacatggttttgatgactccaaccgcatcaatggatgacttcactccaagtggtgaatgggatatcgtcgcgctgccagggcgccgcactgtgaatccccaggacccaagctatgtggacgtgacgtacgactttataataaagcggaagcccctcttctacactattaatctgatcataccgtgcgtgctgacaacgctgctcgcaattcttgtgttttacctgccctctgactgcggagaaaagatgacactctgtatctccgttctgctggcactaactttctttttgctcttaattagcaagatcgtgccacctacctccctcgatgtgccactgattggcaagtatttgatgttcactatggtgttggtgacgttttcaatcgtaacttccgtatgtgtgcttaacgttcaccaccggtcccctagcacccacactatggcgccttgggtgaagagatgcttccttcacaagctccctacctttctgtttatgaagcggcctggaccggattcaagccctgcgcgggccttccccccgagcaaaagctgcgttaccaagcccgaagctactgctacttccactagcccatcaaatttttatggcaactctatgtattttgttaatccagcttccgctgcgtccaagtcgccggccggatctacgccagtggctatacccagggatttttggctccgcagctccggtcggtttcgccaggatgtccaggaggccctcgaaggcgtttctttcatagcccagcatatgaagaatgatgacgaagatcagtccgtggttgaggactggaagtatgttgccatggtcgtggaccgtttgtttctgtgggtgttcatgttcgtttgtgtgctcggcaccgtcggcctcttcttgcccccactatttcagacacatgcagcttcagaaggaccctacgctgcgcaacgcgattag

SEQ ID NO: 15111 - DNA, 1497 bp, Artificial Sequence
  derived and/or modified sequence
atgcgcagggccccatctttggttctgtttttcctggtggcactgtgtggaaggggcaattgccgggttgctaatgcagaggaaaaactgatggatgacctgctgaacaaaactcgctacaacaatctgatccgcccagccaccagctcttcccagctcatctctatcaagctgcagctctcacttgcacagctgattagcgtcaacgagagggagcagattatgaccaccaacgtgtggctgaaacaagagtggacagactaccgactgacatggaatagttctaggtacgaaggtgtaaacattctacgaatcccagcaaaacgaatttggttacccgacatcgtgctatacaataatgctgatggtacgtatgaggtctccgtgtacacgaatcttatcgtcagaagcaatggcagcgtactttggctgcccccagcgatctacaagagcgcttgtaaaattgaagtgaagtacttcccttttgatcagcaaaactgtactctgaagttccgaagttggacttacgaccataccgaaattgatatggtcctgatgactccgactgcctcaatggacgacttcactcctagtggggagtgggatatcgtcgcgcttccaggacgcaggaccgtcaatccccaggatcctagctatgtggacgtaacctatgactttattattaagagaaagcctctcttctatactatcaatttgatcatcccctgcgtgctaactacccttctggctatcttagtattctatctgccaagtgactgtggggagaagatgacgctgtgcatcagcgtgttgctggcgctcactttttttctgttactgatatctaagattgtccccccaacctctttagacgtccccctgatcggcaagtatttgatgtttaccatggtgctggtcacatttagtattgtaacgtccgtgtgtgtgctgaacgtgcaccatagatccccatctacccacaccatggcgccttgggtgaagcggtgctttcttcacaagctccccaccttcctgtttatgaagagaccgggtcctgactccagccccgctagagcctttcctcccagcaagtcttgtgttaccaagcccgaagccacagccacaagcacctcaccctcaaatttttacgggaacagtatgtactttgtgaaccctgcatccgcagccagtaagtcaccagctgggagtactcctgttgcaattccccgagacttttggctgcgctcctcaggcagatttaggcaggatgtccaggaggctctcgaaggagtcagcttcatcgctcaacacatgaaaaatgatgatgaagaccagtcagtcgtggaagactggaagtacgtggcaatggtcgtggatagactgtttctgtgggtgttcatgttcgtttgtgtactgggaaccgtcgggctctttctgcctcccctttttcagactcacgctgcctccgagggaccctatgctgcacagcgggattag

SEQ ID NO: 15112 - DNA, 2623 bp, Artificial Sequence
  derived and/or modified sequence
ccgccagcaaacctcgggggccaggaccggcgctcactcgaccgcgcggctcacgggtgccctgtgaccccacagcggagctcgcggcggctgccacccggccccgccggccatgaggcgcgcgccttccctggtccttttcttcctggtcgccctttgcgggcgcgggaactgccgcgtggccaatgcggaggaaaagctgatggacgaccttctgaacaaaacccgttacaataacctgatccgcccagccaccagctcctcacagctcatctccatcaagctgcagctctccctggcccagcttatcagcgtgaatgagcgagagcagatcatgaccaccaatgtctggctgaaacaggaatggactgattaccgcctgacctggaacagctcccgctacgagggtgtgaacatcctgaggatccctgcaaagcgcatctggttgcctgacatcgtgctttacaacaacgccgacgggacctatgaggtgtctgtctacaccaacttgatagtccggtccaacggcagcgtcctgtggctgccccctgccatctacaagagcgcctgcaagattgaggtgaagtactttcccttcgaccagcagaactgcaccctcaagttccgctcctggacctatgaccacacggagatagacatggtcctcatgacgcccacagccagcatggatgactttactcccagtggtgagtgggacatagtggccctcccagggagaaggacagtgaacccacaagaccccagctacgtggacgtgacttacgacttcatcatcaagcgcaagcctctgttctacaccatcaacctcatcatcccctgcgtgctcaccaccttgctggccatcctcgtcttctacctgccatccgactgcggcgagaagatgacactgtgcatctcagtgctgctggcactgacattcttcctgctgctcatctccaagatcgtgccacccacctccctcgatgtgcctctcatcggcaagtacctcatgttcaccatggtgctggtcaccttctccatcgtcaccagcgtctgtgtgctcaatgtgcaccaccgctcgcccagcacccacaccatggcaccctgggtcaagcgctgcttcctgcacaagctgcctaccttcctcttcatgaagcgccctggccccgacagcagcccggccagagccttcccgcccagcaagtcatgcgtgaccaagcccgaggccaccgccacctccaccagcccctccaacttctatgggaactccatgtactttgtgaaccccgcctctgcagcttccaagtctccagccggctctaccccggtggctatccccagggatttctggctgcggtcctctgggaggttccgacaggatgtgcaggaggcattagaaggtgtcagcttcatcgcccagcacatgaagaatgacgatgaagaccagagtgtcgttgaggactggaagtacgtggctatggtggtggaccggctgttcctgtgggtgttcatgtttgtgtgcgtcctgggcactgtggggctcttcctaccgcccctcttccagacccatgcagcttctgaggggccctacgctgcccagcgtgactgagggccccctgggttgtggggtgagaggatgtgagtggccgggtgggcactttgctgcttctttctgggttgtggctgatgaggccctaagtaaatatgtgagcattggccatcaaccccatcaaaccagccacagccgtggaacaggcaaggatgggggcctgggctgtcctctctgaatgccttggagggatcccaggaagccccagtaggagggagcttcagacagttcaattctggcctgtcttccttccctgcaccgggcaatggggataaagatgacttcgtagcagcacctactatgcttcaggcatggtgccggcctgcctctccatcaccatctctctccacttccccttgtccagttcctcacacacttctagattcttcccagctcagaggcttggcatttgccatatcatcatctttttttttttcttttaaacggagtcttgctatatcgcccaggctcaagtgattctcctgcctcaacctcccaagtagctgggattacagaaagccgccaccgtgcccagctaatttttgtatttttgttggccaggctgatttcgaactcctgacctcaaatgacccacctgcctcggcctcccaaagtgctaggattacaagtgtgagccactatgcctggccttccctatcttctacctgaaccttcttcctcttcccccagggcttcccaagctctttccacagccacatcagtcagggcatggctccaatccattctttgctccaatgtcacctcctctgagaggccttccctaaccacccaatcattctaaagcagcctccctacagtcacgttaccctgcctccttcctcgagcactcctgtgtacctgtcgctcttatctggtggcatgtatgtcatccacagctcacccactagagtgtgagctccatgagaacagggacctgctccttcacattcgtggtagtatccccagggcctaggacagagcttggcacacagtaggtgctcaataaatgtttgt

SEQ ID NO: 15113 - DNA, 1497 bp, Artificial Sequence
  derived and/or modified sequence
atgagaagagcccccagcctggtgctgttcttcctggtggccctgtgcggcagaggcaactgcagagtggccaacgccgaggagaagctgatggacgacctgctgaacaagaccagatacaacaacctgatcagacccgccaccagcagcagccagctgatcagcatcaagctgcagctgagcctggcccagctgatcagcgtgaacgagagagagcagatcatgaccaccaacgtgtggctgaagcaggagtggaccgactacagactgacctggaacagcagcagatacgagggcgtgaacatcctgagaatccccgccaagagaatctggctgcccgacatcgtgctgtacaacaacgccgacggcacctacgaggtgagcgtgtacaccaacctgatcgtgagaagcaacggcagcgtgctgtggctgccccccgccatctacaagagcgcctgcaagatcgaggtgaagtacttccccttcgaccagcagaactgcaccctgaagttcagaagctggacctacgaccacaccgagatcgacatggtgctgatgacccccaccgccagcatggacgacttcacccccagcggcgagtgggacatcgtggccctgcccggcagaagaaccgtgaacccccaggaccccagctacgtggacgtgacctacgacttcatcatcaagagaaagcccctgttctacaccatcaacctgatcatcccctgcgtgctgaccaccctgctggccatcctggtgttctacctgcccagcgactgcggcgagaagatgaccctgtgcatcagcgtgctgctggccctgaccttcttcctgctgctgatcagcaagatcgtgccccccaccagcctggacgtgcccctgatcggcaagtacctgatgttcaccatggtgctggtgaccttcagcatcgtgaccagcgtgtgcgtgctgaacgtgcaccacagaagccccagcacccacaccatggccccctgggtgaagagatgcttcctgcacaagctgcccaccttcctgttcatgaagagacccggccccgacagcagccccgccagagccttcccccccagcaagagctgcgtgaccaagcccgaggccaccgccaccagcaccagccccagcaacttctacggcaacagcatgtacttcgtgaaccccgccagcgccgccagcaagagccccgccggcagcacccccgtggccatccccagagacttctggctgagaagcagcggcagattcagacaggacgtgcaggaggccctggagggcgtgagcttcatcgcccagcacatgaagaacgacgacgaggaccagagcgtggtggaggactggaagtacgtggccatggtggtggacagactgttcctgtgggtgttcatgttcgtgtgcgtgctgggcaccgtgggcctgttcctgccccccctgttccagacccacgccgccagcgagggcccctacgccgcccagagagactag

SEQ ID NO: 15114 - protein, 517 aa, Artificial Sequence
  derived and/or modified sequence
MEGPVLTLGLLAALAVCGSWGLNEEERLIRHLFQEKGYNKELRPVAHKEESVDVALALTLSNLISLKEVEETLTTNVWIEHGWTDNRLKWNAEEFGNISVLRLPPDMVWLPEIVLENNNDGSFQISYSCNVLVYHYGFVYWLPPAIFRSSCPISVTYFPFDWQNCSLKFSSLKYTAKEITLSLKQDAKENRTYPVEWIIIDPEGFTENGEWEIVHRPARVNVDPRAPLDSPSRQDITFYLIIRRKPLFYIINILVPCVLISFMVNLVFYLPADSGEKTSVAISVLLAQSVFLLLISKRLPATSMAIPLIGKFLLFGMVLVTMVVVICVIVLNIHFRTPSTHVLSEGVKKLFLETLPELLHMSRPAEDGPSPGALVRRSSSLGYISKAEEYFLLKSRSDLMFEKQSERHGLARRLTTARRPPASSEQAQQELFNELKPAVDGANFIVNHMRDQNNYNEEKDSWNRVARTVDRLCLFVVTPVMVVGTAWIFLQGVYNQPPPQPFPGDPYSYNVQDKRFI

SEQ ID NO: 15115 - protein, 235 aa, Artificial Sequence
  derived and/or modified sequence
MEGPVLTLGLLAALAVCGSWGLNEEERLIRHLFQEKGYNKELRPVAHKEESVDVALALTLSNLISLKEVEETLTTNVWIEHGWTDNRLKWNAEEFGNISVLRLPPDMVWLPEIVLENNNDGSFQISYSCNVLVYHYGFVYWLPPAIFRSSCPISVTYFPFDWQNCSLKFRERGVGDSPPAGQGQRGPQSPSGQPQPPGHHLLPHHPPQAPLLHHQHPGALRAHLLHGQPGLLPTG

SEQ ID NO: 15116 - DNA, 1554 bp, Artificial Sequence
  derived and/or modified sequence
atggaaggccccgtactgaccctgggactcctcgccgcgctggccgtgtgtggcagctggggtctgaacgaggaggaacgtctcatccggcatctgtttcaggagaaagggtacaacaaagaactcaggccggtcgcacataaggaggaatcggtggacgtggcactggcattgacactgagcaacctgataagcctgaaggaagtggaggaaaccctgacaactaatgtgtggatcgaacacgggtggactgataacaggctgaaatggaacgcagaggaatttggcaacatatctgtgctgagactgcccccggacatggtgtggttgcccgaaattgtcttggagaataacaacgacgggtcgttccagatcagttattcatgcaatgtgctggtgtaccactatggattcgtgtactggctgcccccagccatcttccgcagctcatgtcctatatccgtgacctattttccgttcgactggcaaaactgctcactcaagttctcctccctcaagtacaccgctaaagagattacactgagtttaaaacaggacgcgaaggagaatcgcacttacccagtggagtggattatcatcgaccccgaagggtttacagaaaacggggaatgggagattgtccatagaccagctcgggtcaacgtggatcctcgagcgccgctcgacagtcctagtcgccaggacattacattctacttgattataaggaggaagccactgttttatatcatcaatattctagttccatgcgtgctgatctccttcatggtgaatcttgtcttttatttgcccgccgactctggcgaaaagacctccgtggccatatctgtcttacttgcccagagcgtattcctgctgcttatctccaagcggctgccggcaacttcaatggctatcccactgattgggaaattcctgttgttcggaatggtccttgtaaccatggtggtggtgatctgtgtcattgtcctgaacatccacttccgtacacccagcacccacgtcctgtcggagggtgtgaaaaaactgttcctggaaacactgcccgaacttttgcacatgagtaggccggctgaggatggaccttcccctggggctctcgtgcgaagatccagcagcctgggatatatctcaaaggctgaggagtactttctcttgaaaagtcggagtgatctcatgtttgagaaacaatccgaaaggcacggcttggcccggcgactgaccaccgcgcggagaccaccagcaagttcggagcaggcacagcaggaactgtttaacgagctcaagcccgccgtggacggcgcaaactttatcgtgaaccatatgcgcgaccaaaataactacaacgaagagaaggatagctggaacagggtcgctcggacggtggacagactctgtctgttcgttgtgactcccgtgatggttgtgggtacggcctggatcttcctgcagggcgtgtataaccagccacctccccagccctttcctggtgacccctattcatataacgtccaagacaaacgattcatctag

SEQ ID NO: 15117 - DNA, 708 bp, Artificial Sequence
  derived and/or modified sequence
atggaaggccctgtcttaactttgggtctcctcgctgctctggcggtttgtggatcttggggcttgaatgaggaggaaagacttattaggcacctcttccaggaaaaagggtacaacaaggaactccgccccgtagctcacaaggaagagagcgttgacgtcgccctcgcactcactctgtccaatctcatatccctgaaagaggtagaggaaacattaaccaccaacgtctggatcgaacatggatggacagacaatcggcttaagtggaatgcagaagagttcggcaatatttccgtgctgagactccccccagatatggtctggctgcctgagatcgtcctggaaaataataatgacggcagctttcagatcagctactcttgcaacgtgctcgtatatcattacgggtttgtgtattggctaccccctgctatattccgcagctcatgccctattagcgtgacctattttccctttgattggcagaattgtagcttgaaatttcgagaaagaggcgttggagactctcctccagctggccaggggcagcgaggaccccagtctcctagtggacagcctcaacctcctggccatcacctgcttcctcatcatccaccccaagctccgttgctgcaccatcaacatcccggcgcgctgcgggcacatctgctgcatggccagcctgggcttctccccaccggctag

SEQ ID NO: 15118 - DNA, 708 bp, Artificial Sequence
  derived and/or modified sequence
atggaaggccctgttctgacactgggcttgctggccgcgttagcagtgtgcggatcctggggacttaacgaagaagaaagactgatcagacatctgttccaagaaaagggatataataaggaactgagacctgttgcccacaaggaagagagtgtggatgtcgcactcgctctaacactgtcgaatctcatatccctgaaggaagtggaggaaaccctcaccacaaatgtgtggattgaacacggctggactgataatagattgaagtggaacgcagaagaattcggaaacatctccgtgctgcggctacccccagatatggtttggttaccagaaattgtactggagaataataacgatggcagcttccagatcagttactcctgtaacgtgttagtataccattacggcttcgtctattggctcccccctgcaatcttccgaagcagctgtccaataagtgtgacttatttcccctttgattggcagaattgcagtctcaagtttagagagagaggcgttggggatagtcctccagcaggccaggggcaacggggcccccaaagcccctctggacaacctcaaccaccaggtcatcatctgctgccccaccaccccccacaggcaccactgttgcatcaccagcaccccggagctctccgtgcccatctgctgcacggccaacctggcctattaccaactggttag

SEQ ID NO: 15119 - DNA, 1554 bp, Artificial Sequence
  derived and/or modified sequence
atggagggccctgtgctgaccctgggcctgctggccgccctggccgtgtgtggctcctggggcctgaatgaggaggagcggctcatccgccacctgttccaggagaagggctacaacaaggagctgcggcctgtggcccacaaggaggagagcgtggatgtggccctggccctgaccctgagcaacctgatcagcctgaaggaggtggaggagaccctgaccaccaacgtgtggattgaacatggctggacagacaaccggctgaagtggaatgctgaggagtttggaaacatctctgtgctgcggctgcccccagacatggtgtggctgcctgagatcgtgctggagaacaacaatgatggcagcttccagatctcctacagctgcaatgtgctggtgtaccactacggctttgtgtactggctgcccccagccatcttccgcagcagctgccccatctctgtgacctacttcccctttgactggcagaactgcagcctgaagttcagcagcctgaagtacacagccaaggagatcaccctgagcctgaagcaggatgccaaggaaaatagaacctaccctgtggagtggatcatcatcgaccctgagggcttcacagaaaatggagagtgggagatcgtgcacaggcctgcccgggtgaatgtggacccccgggcccccctggacagccccagccggcaggacatcaccttctacctgatcatccggaggaagcccctcttctacatcatcaacatcctggtgccctgtgtgctgatctccttcatggtgaacctggtgttctacctgcctgctgacagcggggagaagacctctgtggccatctctgtgctgctggcccagagcgtcttcctgctgctgatcagcaagaggctgcctgccacctccatggccatccccctgattggcaagttcctgctgtttggcatggtgctggtgaccatggtggtggtgatctgtgtgattgtgctgaacatccacttccgcacccccagcacccacgtgctgtctgagggcgtgaagaagctgttcctggagaccctgcctgagctgctgcacatgagcaggcctgcagaagatggccccagccctggggccctggtgcggcgcagcagcagcctgggctacatcagcaaggccgaggagtacttcctgctgaagagcagaagtgacctgatgtttgagaagcagagcgagcggcacggcctggcccggcggctgaccacagcccggcggcccccagccagcagcgagcaggcccagcaggagctgttcaatgagctgaagccagctgtggatggagccaacttcatcgtgaaccacatgagggaccagaacaactacaatgaggagaaggacagctggaacagagtggccaggacagtggaccggctgtgcctgtttgtggtgacccctgtgatggtggtgggcacagcctggatcttcctgcagggcgtgtacaaccagcccccaccccagcccttccctggggacccctacagctacaacgtgcaggacaagcgcttcatctag

SEQ ID NO: 15120 - DNA, 708 bp, Artificial Sequence
  derived and/or modified sequence
atggagggccctgtgctgaccctgggcctgctggccgccctggccgtgtgtggctcctggggcctgaatgaggaggagcggctcatccgccacctgttccaggagaagggctacaacaaggagctgcggcctgtggcccacaaggaggagagcgtggatgtggccctggccctgaccctgagcaacctgatcagcctgaaggaggtggaggagaccctgaccaccaacgtgtggattgaacatggctggacagacaaccggctgaagtggaatgctgaggagtttggaaacatctctgtgctgcggctgcccccagacatggtgtggctgcctgagatcgtgctggagaacaacaatgatggcagcttccagatctcctacagctgcaatgtgctggtgtaccactacggctttgtgtactggctgcccccagccatcttccgcagcagctgccccatctctgtgacctacttcccctttgactggcagaactgcagcctgaagttccgggagcggggcgtgggggacagccccccagctggccagggccagaggggcccccagagccccagcggccagccccagcccccaggccaccacctgctgccccaccaccccccccaggcccccctgctgcaccaccagcaccctggggccctgcgggcccacctgctgcacggccagcccggcctgctgcccaccggctag

SEQ ID NO: 15121 - DNA, 1554 bp, Artificial Sequence
  derived and/or modified sequence
atggagggccccgtgctgaccctgggcctgctggccgccctggccgtatgtggtagttggggcctgaatgaggaggaaagattgatccgccatctttttcaggagaagggctacaataaagagctgagacccgtcgcgcacaaggaggaatcagtggatgtcgccctcgccctcacactgtctaatctgatctctctgaaggaagtcgaagagacactcaccaccaatgtttggattgaacacggctggacagacaatagactgaagtggaatgccgaagaatttggcaacatttcagtactcaggctgccccccgacatggtttggctaccagaaatcgttttagaaaacaacaatgacggctcattccagatttcctactcatgtaacgtgctggtttatcattacgggttcgtgtattggctccctcccgctatctttcgctcttcctgtcctatttcagtgacgtactttccctttgattggcagaattgttccctcaaattctcctctttgaaatataccgcaaaggagattactttgagcctaaagcaggatgccaaggagaatagaacctacccagtggaatggatcatcattgacccggagggattcaccgaaaatggtgagtgggagattgtacataggccagcccgggtgaatgtcgaccctagggctcccctggattccccttctcgccaggacatcacattctatcttatcatccggaggaagcccttgttctacatcattaacattctggtaccctgtgtcctgatcagttttatggtcaacctagtgttttatctgcccgcagactccggtgagaaaacatccgtagccatctctgtgctgttggcccaatcagtatttctgctgctaatttctaagcgtcttcctgctacgagcatggccattcctctcattggaaaatttctcctattcggtatggtgctcgtgaccatggtcgtcgtcatctgcgtaattgttctgaacatccacttcagaacccctagcacccacgtgctgagtgaaggagttaagaaactgtttcttgaaactctgccagaattactccacatgagtcgcccagctgaggacgggcccagtcccggtgcccttgttcgcagatctagtagcctgggctatatcagtaaggccgaggagtacttcctcctcaagagcagatcagacctgatgtttgagaagcagagcgagagacacggactggcccggcggctgaccacggctcgcaggcccccagcgtccagcgaacaagcccagcaagaactgtttaatgagctaaaacccgcggtcgacggggctaatttcatagttaatcacatgcgcgatcagaacaactataacgaggaaaaggacagttggaatagggttgctcgaactgtcgatagactctgcctttttgtggttaccccggtcatggttgtcggaacagcctggatatttctacagggggtttacaatcagccaccaccccagcccttccctggagatccctactcctacaacgttcaagataaaagatttatttag

SEQ ID NO: 15122 - DNA, 708 bp, Artificial Sequence
  derived and/or modified sequence
atggagggccccgtgctgaccctgggcctgctggccgccctggccgtgtgcgggagttggggactcaatgaggaggagcgtttaatccggcacctcttccaggaaaaagggtacaataaggagctgaggcctgtggcgcacaaggaggagtctgttgatgttgctctggcactcacattgtcgaatctcatatcgctaaaagaggtggaagaaaccttgacaacgaatgtctggatcgagcacgggtggacagataacaggctgaaatggaacgctgaagagtttgggaacatttccgtgcttagactgccccctgatatggtgtggttgcctgagatcgttctcgagaataacaatgacggcagcttccagattagttactcttgcaatgttctggtgtaccactatggattcgtgtactggctgccacccgccattttccgctctagttgtcctataagtgtgacctatttcccttttgactggcagaactgctctctcaaatttagggaaagaggtgtaggtgactccccacccgcagggcaaggccagcgagggccgcaaagccccagcggccaaccgcagcccccagggcaccacctgctgccacaccaccccccccaggcgcctctgcttcatcaccagcaccctggggcccttcgtgcacatcttctacacggtcagcctggcctcctccctactggatag

SEQ ID NO: 15123 - DNA, 708 bp, Artificial Sequence
  derived and/or modified sequence
atggagggccccgtgctgaccctgggcctgctggccgccctggccgtctgtggcagctggggcctgaacgaagaagagagacttatcaggcacctatttcaggaaaagggttataataaggagcttcgccccgtggcacataaggaggaaagtgtggacgtcgctctcgctttgacactgtccaatctaatctctctcaaggaggtggaagagacattgaccaccaatgtttggattgaacacggatggaccgacaatcgacttaagtggaatgccgaggagtttggtaatatcagtgttctgcggttgccccccgatatggtgtggcttccagagattgttctggagaataacaatgacggatcattccagatctcctactcttgcaatgtgctggtttatcattatggattcgtgtactggctccctcctgcaatttttaggagctcttgccccatcagcgtcacgtatttcccctttgactggcagaattgttcattgaaattccgggaaagaggagtgggcgattccccacccgcaggccaagggcagcggggcccacaatccccctctggccagcctcagccacctggacatcacctgctgccccaccaccccccacaggccccgcttctacatcaccaacacccaggagcccttcgggcgcacttgctgcacggacagcccggtctgctgcccacaggttag

SEQ ID NO: 15124 - DNA, 1554 bp, Artificial Sequence
  derived and/or modified sequence
atggaaggccctgtgcttaccctgggattactggccgctctggcagtttgcggctcttgggggctgaatgaagaggaaagactgattagacacctcttccaggagaagggctacaacaaagagttgcggcctgtggctcacaaagaggagagcgtcgacgtggccctggctctcaccctaagcaatttgattagtttaaaagaagtagaagaaactctcacaacaaatgtatggatcgagcatggatggacagacaaccgcctgaagtggaacgcagaggagttcggcaatatttctgtcctcagactccccccagacatggtctggctgccagagattgttctcgaaaataataatgacggctcatttcagatctcctactcttgtaatgtcctcgtgtaccactatggtttcgtgtactggctaccacctgcgatttttcgctccagctgccctatctccgtgacgtattttcctttcgattggcagaactgttcactgaaatttagtagcttgaaatatacagcaaaagaaatcaccctgtccctgaagcaggacgccaaagaaaatcgtacataccctgtcgaatggatcatcattgaccctgaggggttcactgagaacggagagtgggaaatagtccaccgacccgcaagggtcaacgtggacccaagggcccctcttgactctccgtccagacaggacattacattctacctgataatcagacgtaagcctttgttttacataatcaacatcctggttccgtgcgtcttgattagttttatggtgaatttagtgttttacttacctgcggactccggagagaagacgagcgtggcgatcagcgtcttattggctcagagcgtgtttcttttgctgatctctaaacggcttcctgccaccagcatggcgataccactgattggcaaattcctcctgttcggcatggtcctagtcaccatggtggttgtaatttgcgttatcgttttaaacatccactttaggactccatctactcacgtactgtcggagggagtgaagaagttgttcctggagaccttgcctgaattgctgcacatgagccgcccagcagaggacgggccatctccaggagcactggtgcggagatcatccagtttggggtacattagcaaggcagaagagtacttcctccttaagagccgatcagacctaatgttcgaaaagcaatcagaacgccatgggttggccaggcgcctaactacagcacgacgacccccagcttccagtgaacaggcccagcaggagctgtttaacgaattgaaacctgctgttgacggggcaaatttcattgtcaaccacatgagggatcagaataactacaacgaagagaaggattcatggaaccgggtggctagaactgtggatagactctgtctcttcgtggtgactccggtgatggttgtgggcacggcttggatcttccttcaaggggtctataatcagccgccacctcaaccatttcctggggatccttacagttacaacgttcaagacaaaaggttcatttag

SEQ ID NO: 15125 - DNA, 708 bp, Artificial Sequence
  derived and/or modified sequence
atggagggtccggttttaacactgggcttactggcggcactggccgtttgcggcagttgggggctaaatgaagaagaaagactgatcaggcatctgtttcaggaaaagggttataataaagaattaaggcccgttgctcacaaagaggaatctgtggacgtcgcccttgcactcactctgtcaaatctgattagcttaaaagaagtggaagagacgttaacaaccaatgtctggatcgagcacggatggacggataaccgtttgaagtggaacgcagaagaatttggtaacattagcgtcttacgccttcctccagatatggtatggctgccggagatcgttttggagaataataatgacggaagttttcaaatctcctattcctgtaacgtgctcgtgtatcattacgggttcgtgtattggctgccacctgcaatttttaggtcatcatgccctatcagcgtgacatatttcccgttcgactggcagaactgcagcctgaaatttcgtgaaagaggtgtcggcgattcgcctcccgcagggcagggccagaggggccctcagagtcccagcggtcagccgcaaccccctggtcatcatctactgcctcaccaccctccacaggccccattgctgcaccaccaacaccctggtgcgcttagggcccacctgctacacggccaacccggacttctacctacggggtag

SEQ ID NO: 15126 - DNA, 708 bp, Artificial Sequence
  derived and/or modified sequence
atggaaggccctgtgttgacactagggttattagcggctctggctgtgtgcggctcttggggcctcaacgaggaggagcggcttatcaggcatctctttcaggagaagggctacaataaggaactgaggcccgttgctcacaaggaggaaagcgttgacgtcgcactggcgttaaccctgtcgaatctgatctcccttaaagaggtcgaggaaacactcacgacaaacgtctggatcgaacacggttggacggacaaccgcctgaagtggaacgctgaggagtttggaaacattagcgtcctccggctccctcccgatatggtgtggctccccgaaatagttctcgagaacaataatgacggcagctttcagatttcatacagctgcaatgtgctggtgtaccattacggatttgtctattggctgccccctgccatcttccgatcttcatgtcctataagcgtcacttattttccttttgattggcaaaactgttctctgaagtttcgggagaggggcgtgggtgacagtccacctgcaggccaaggccagcgtgggcctcagtcaccaagtgggcaacctcaacccccaggacaccatctgcttccccatcatcctcctcaggcacctctcctccaccaccagcaccccggtgccctgcgcgctcaccttctccacgggcaaccaggcttactccctacaggatag

SEQ ID NO: 15127 - DNA, 2112 bp, Artificial Sequence
  derived and/or modified sequence
gggcagatgcacgtcccagtcagagggatgggatggaggggccagtgctgacactggggctgctggctgccctggcggtgtgtggcagctgggggctgaacgaggaggagcggctgatccggcacctgtttcaagagaagggctacaacaaggagctccggcccgtggcacacaaagaggagagtgtggacgttgccctggccctcacactctccaacctcatctccctgaaagaagttgaggagaccctcactaccaatgtgtggatagagcacggctggacagacaaccggctgaagtggaatgctgaagaatttggaaacatcagtgtcctgcgcctccccccggacatggtgtggctcccagagattgtgctggagaacaacaatgacggctccttccagatctcctactcctgcaacgtgcttgtctaccactacggcttcgtgtactggctgccacctgccatcttccgctcctcctgccccatctctgtcacctatttccccttcgactggcagaactgctccctcaagttcagttccctcaagtatacggccaaagagatcaccctgagcctgaaacaggatgccaaggagaaccgcacctaccccgtggagtggatcatcattgatcctgaaggcttcacagagaacggggagtgggagatagtccaccggccggccagggtcaacgtggaccccagagcccctctggacagccccagccgccaggacatcaccttctacctcatcatccgccgcaagcccctcttctacatcatcaacatcctggtgccctgcgtgctcatctccttcatggtcaacctggtcttctacctaccggctgacagtggtgagaagacatcagtggccatctcggtgctcctggctcagtctgtcttcctgctgctcatctccaagcgtctgcctgccacatccatggccatcccccttatcggcaagttcctgctcttcggcatggtgctggtcaccatggttgtggtgatctgtgtcatcgtgctcaacatccacttccgaacacccagcacccatgtgctgtctgagggggtcaagaagctcttcctggagaccctgccggagctcctgcacatgtcccgcccagcagaggatggacccagccctggggccctggtgcggaggagcagctccctgggatacatctccaaggccgaggagtacttcctgctcaagtcccgcagtgacctcatgttcgagaagcagtcagagcggcatgggctggccaggcgcctcaccactgcacgccggcccccagcaagctctgagcaggcccagcaggaactcttcaatgagctgaagccagctgtggatggggcaaacttcattgttaaccacatgagggaccagaacaattacaatgaggagaaagacagctggaaccgagtggcccgcacagtggaccgcctctgcctgtttgtggtgacgcctgtcatggtggtgggcacagcctggatcttcctgcagggcgtttacaaccagccaccaccccagccttttcctggggacccctactcctacaacgtgcaggacaagcgcttcatctagggtgggcctgttggggagccaggagacagcagggtctgagagaggagccacagtccctaatgacacccactcctagccctgaggctcgtgcccctcagactggggaagagtccaaggaagggagggagcagccactcctcaatgctcaatggctcccctgaaatcaagacaggggccacccgagatggtctgagggtggacatcggctacagtgggtgggcaggacgatttggggggaggcccgaggctggctcaggggccagggaggaggccactcagggtggcctcagggggagagctctgataggggtgagacagatagggccccttctctgcttctcctcccccaaggtgtggggtagagcaggcaggaatctgcgccttcactctctggcccctccagcctccctcttcctacctacccttcaacctcaggcttctgaggcctcacctgggactgaggttgaggacacctccctccctccagaccccagagtatcctttcctagctctttctgccttgacc

SEQ ID NO: 15128 - DNA, 3022 bp, Artificial Sequence
  derived and/or modified sequence
tccgagctgcggggagtcccagcctgggatctttgcctcatgtccttgggctcctgccctggctggcccgtcccccaccgccatgaggtgtcagattgtgtttccggctgcctcttcccgttgaccccctcctcccccaacacctgtcccctctcccgcccaccctcattccacagccctgtagacaggaggggcagatgcacgtcccagtcagagggatgggatggaggggccagtgctgacactggggctgctggctgccctggcggtgtgtggcagctgggggctgaacgaggaggagcggctgatccggcacctgtttcaagagaagggctacaacaaggagctccggcccgtggcacacaaagaggagagtgtggacgttgccctggccctcacactctccaacctcatctccctgaaagaagttgaggagaccctcactaccaatgtgtggatagagcacggctggacagacaaccggctgaagtggaatgctgaagaatttggaaacatcagtgtcctgcgcctccccccggacatggtgtggctcccagagattgtgctggagaacaacaatgacggctccttccagatctcctactcctgcaacgtgcttgtctaccactacggcttcgtgtactggctgccacctgccatcttccgctcctcctgccccatctctgtcacctatttccccttcgactggcagaactgctccctcaagttcagagaacggggagtgggagatagtccaccggccggccagggtcaacgtggaccccagagcccctctggacagccccagccgccaggacatcaccttctacctcatcatccgccgcaagcccctcttctacatcatcaacatcctggtgccctgcgtgctcatctccttcatggtcaacctggtcttctacctaccggctgacagtggtgagaagacatcagtggccatctcggtgctcctggctcagtctgtcttcctgctgctcatctccaagcgtctgcctgccacatccatggccatcccccttatcggcaagttcctgctcttcggcatggtgctggtcaccatggttgtggtgatctgtgtcatcgtgctcaacatccacttccgaacacccagcacccatgtgctgtctgagggggtcaagaagctcttcctggagaccctgccggagctcctgcacatgtcccgcccagcagaggatggacccagccctggggccctggtgcggaggagcagctccctgggatacatctccaaggccgaggagtacttcctgctcaagtcccgcagtgacctcatgttcgagaagcagtcagagcggcatgggctggccaggcgcctcaccactgcacgccggcccccagcaagctctgagcaggcccagcaggaactcttcaatgagctgaagccagctgtggatggggcaaacttcattgttaaccacatgagggaccagaacaattacaatgaggagaaagacagctggaaccgagtggcccgcacagtggaccgcctctgcctgtttgtggtgacgcctgtcatggtggtgggcacagcctggatcttcctgcagggcgtttacaaccagccaccaccccagccttttcctggggacccctactcctacaacgtgcaggacaagcgcttcatctagggtgggcctgttggggagccaggagacagcagggtctgagagaggagccacagtccctaatgacacccactcctagccctgaggctcgtgcccctcagactggggaagagtccaaggaagggagggagcagccactcctcaatgctcaatggctcccctgaaatcaagacaggggccacccgagatggtctgagggtggacatcggctacagtgggtgggcaggacgatttggggggaggcccgaggctggctcaggggccagggaggaggccactcagggtggcctcagggggagagctctgataggggtgagacagatagggccccttctctgcttctcctcccccaaggtgtggggtagagcaggcaggaatctgcgccttcactctctggcccctccagcctccctcttcctacctacccttcaacctcaggcttctgaggcctcacctgggactgaggttgaggacacctccctccctccagaccccagagtatcctttcctagctctttctgccttgacctctctgcctaggtccctttgggaagttgaggactggagtggaaaggtcaggatcgacatccacaaagacttggggtcagcctgaggttgcacacacaatcctagaggaccagaacgcagcacctctccccaaagggtccctgccccccagcacctactcctctccaaattagggttgtcatgcattatttggggcatacatattctaaaaaatcattcgttgtttctctgaaatttgtcccctatttttatttgctaaatctagcaaccctatcccaaaggcagcctccactcaatcttatcctgagggccaaaggccaaggctgcaggaattgggagacaagggtctgtttgtatggtggtccacctccaagatggccccagtgatgcccagtattcacacccttgtgcagtcccctcactctgtaccagggtgggtctgggtaaccaatagaatgaggcagaagtgatggtacctcacttcccagatttggttaggaaagacactatggcctctttcttgctcattagccctcattctcacatcagttggatctctcactttggggaagccagctggcatgttaaggagccctatggagaggcccacatggcaaggaactaaggcctcctgccaacagccacgtgagtgaatgtggaagtggatcctctgccccagtagggccttcggatgagatcacagcccagtagacatcttatgtgcagccccatgaaagtccctaagccagaaccaccagctaagtgactcctggattcctgacccccagaaactgtgtgagataataaatgtgtgttgttttaagtgacaa

SEQ ID NO: 15129 - DNA, 952 bp, Artificial Sequence
  derived and/or modified sequence
agatgcacgtcccagtcagagggatgggatggaggggccagtgctgacactggggctgctggctgccctggcggtgtgtggcagctgggggctgaacgaggaggagcggctgatccggcacctgtttcaagagaagggctacaacaaggagctccggcccgtggcacacaaagaggagagtgtggacgttgccctggccctcacactctccaacctcatctccctgaaagaagttgaggagaccctcactaccaatgtgtggatagagcacggctggacagacaaccggctgaagtggaatgctgaagaatttggaaacatcagtgtcctgcgcctccccccggacatggtgtggctcccagagattgtgctggagaacaacaatgacggctccttccagatctcctactcctgcaacgtgcttgtctaccactacggcttcgtgtactggctgccacctgccatcttccgctcctcctgccccatctctgtcacctatttccccttcgactggcagaactgctccctcaagttcagagaacggggagtgggagatagtccaccggccggccagggtcaacgtggaccccagagcccctctggacagccccagccgccaggacatcaccttctacctcatcatccgccgcaagcccctcttctacatcatcaacatcctggtgccctgcgtgctcatctccttcatggtcaacctggtcttctacctaccggctgacagtggtgagaagacatcagtggccatctcggtgctcctggctcagtctgtcttcctgctgctcatctccaagcgtctgcctgccacatccatggccatcccccttatcggcaagttcctgctcttcggcatggtgctggtcaccatggttgtggtgatctgtgtcatcgtgctcaacatccacttccgaacacccagcacccatgtgctgtctga

SEQ ID NO: 15130 - DNA, 1554 bp, Artificial Sequence
  derived and/or modified sequence
atggagggccccgtgctgaccctgggcctgctggccgccctggccgtgtgcggcagctggggcctgaacgaggaggagagactgatcagacacctgttccaggagaagggctacaacaaggagctgagacccgtggcccacaaggaggagagcgtggacgtggccctggccctgaccctgagcaacctgatcagcctgaaggaggtggaggagaccctgaccaccaacgtgtggatcgagcacggctggaccgacaacagactgaagtggaacgccgaggagttcggcaacatcagcgtgctgagactgccccccgacatggtgtggctgcccgagatcgtgctggagaacaacaacgacggcagcttccagatcagctacagctgcaacgtgctggtgtaccactacggcttcgtgtactggctgccccccgccatcttcagaagcagctgccccatcagcgtgacctacttccccttcgactggcagaactgcagcctgaagttcagcagcctgaagtacaccgccaaggagatcaccctgagcctgaagcaggacgccaaggagaacagaacctaccccgtggagtggatcatcatcgaccccgagggcttcaccgagaacggcgagtgggagatcgtgcacagacccgccagagtgaacgtggaccccagagcccccctggacagccccagcagacaggacatcaccttctacctgatcatcagaagaaagcccctgttctacatcatcaacatcctggtgccctgcgtgctgatcagcttcatggtgaacctggtgttctacctgcccgccgacagcggcgagaagaccagcgtggccatcagcgtgctgctggcccagagcgtgttcctgctgctgatcagcaagagactgcccgccaccagcatggccatccccctgatcggcaagttcctgctgttcggcatggtgctggtgaccatggtggtggtgatctgcgtgatcgtgctgaacatccacttcagaacccccagcacccacgtgctgagcgagggcgtgaagaagctgttcctggagaccctgcccgagctgctgcacatgagcagacccgccgaggacggccccagccccggcgccctggtgagaagaagcagcagcctgggctacatcagcaaggccgaggagtacttcctgctgaagagcagaagcgacctgatgttcgagaagcagagcgagagacacggcctggccagaagactgaccaccgccagaagaccccccgccagcagcgagcaggcccagcaggagctgttcaacgagctgaagcccgccgtggacggcgccaacttcatcgtgaaccacatgagagaccagaacaactacaacgaggagaaggacagctggaacagagtggccagaaccgtggacagactgtgcctgttcgtggtgacccccgtgatggtggtgggcaccgcctggatcttcctgcagggcgtgtacaaccagccccccccccagcccttccccggcgacccctacagctacaacgtgcaggacaagagattcatctag

SEQ ID NO: 15131 - DNA, 708 bp, Artificial Sequence
  derived and/or modified sequence
atggagggccccgtgctgaccctgggcctgctggccgccctggccgtgtgcggcagctggggcctgaacgaggaggagagactgatcagacacctgttccaggagaagggctacaacaaggagctgagacccgtggcccacaaggaggagagcgtggacgtggccctggccctgaccctgagcaacctgatcagcctgaaggaggtggaggagaccctgaccaccaacgtgtggatcgagcacggctggaccgacaacagactgaagtggaacgccgaggagttcggcaacatcagcgtgctgagactgccccccgacatggtgtggctgcccgagatcgtgctggagaacaacaacgacggcagcttccagatcagctacagctgcaacgtgctggtgtaccactacggcttcgtgtactggctgccccccgccatcttcagaagcagctgccccatcagcgtgacctacttccccttcgactggcagaactgcagcctgaagttcagagagagaggcgtgggcgacagcccccccgccggccagggccagagaggcccccagagccccagcggccagccccagccccccggccaccacctgctgccccaccaccccccccaggcccccctgctgcaccaccagcaccccggcgccctgagagcccacctgctgcacggccagcccggcctgctgcccaccggctag

SEQ ID NO: 15132 - protein, 626 aa, Artificial Sequence
  derived and/or modified sequence
MLAFAARTVVKPLGFLKPFSLMKASSRFKAHQDALPRLPVPPLQQSLDHYLKALQPIVSEEEWAHTKQLVDEFQASGGVGERLQKGLERRARKTENWLSEWWLKTAYLQYRQPVVIYSSPGVMLPKQDFVDLQGQLRFAAKLIEGVLDFKVMIDNETLPVEYLGGKPLCMNQYYQILSSCRVPGPKQDTVSNFSKTKKPPTHITVVHNYQFFELDVYHSDGTPLTADQIFVQLEKIWNSSLQTNKEPVGILTSNHRNSWAKAYNTLIKDKVNRDSVRSIQKSIFTVCLDATMPRVSEDVYRSHVAGQMLHGGGSRLNSGNRWFDKTLQFIVAEDGSCGLVYEHAAAEGPPIVTLLDYVIEYTKKPELVRSPLVPLPMPKKLRFNITPEIKSDIEKAKQNLSIMIQDLDITVMVFHHFGKDFPKSEKLSPDAFIQMALQLAYYRIYGQACATYESASLRMFHLGRTDTIRSASMDSLTFVKAMDDSSVTEHQKVELLRKAVQAHRGYTDRAIRGEAFDRHLLGLKLQAIEDLVSMPDIFMDTSYAIAMHFHLSTSQVPAKTDCVMFFGPVVPDGYGVCYNPMEAHINFSLSAYNSCAETNAARLAHYLEKALLDMRALLQSHPRAKL

SEQ ID NO: 15133 - protein, 545 aa, Artificial Sequence
  derived and/or modified sequence
MLAFAARTVVKPLGFLKPFSLMKASSRFKAHQDALPRLPVPPLQQSLDHYLKALQPIVSEEEWAHTKQLVDEFQASGGVGERLQKGLERRARKTENWLSEWWLKTAYLQYRQPVVIYSSPGVMLPKQDFVDLQGQLRFAAKLIEGVLDFKVMIDNETLPVEYLGGKPLCMNQYYQILSSCRVPGPKQDTVSNFSKTKKPPTHITVVHNYQFFELDVYHSDGTPLTADQIFVQLEKIWNSSLQTNKEPVGILTSNHRNSWAKAYNTLIKDKVNRDSVRSIQKKKPELVRSPLVPLPMPKKLRFNITPEIKSDIEKAKQNLSIMIQDLDITVMVFHHFGKDFPKSEKLSPDAFIQMALQLAYYRIYGQACATYESASLRMFHLGRTDTIRSASMDSLTFVKAMDDSSVTEHQKVELLRKAVQAHRGYTDRAIRGEAFDRHLLGLKLQAIEDLVSMPDIFMDTSYAIAMHFHLSTSQVPAKTDCVMFFGPVVPDGYGVCYNPMEAHINFSLSAYNSCAETNAARLAHYLEKALLDMRALLQSHPRAKL

SEQ ID NO: 15134 - DNA, 1881 bp, Artificial Sequence
  derived and/or modified sequence
atgctggccttcgccgctcgtactgtggtaaaaccgctgggattcttaaaacccttctctctcatgaaggcaagctccagatttaaagcccaccaagacgccttgcctcggctgcccgtgcctcccctgcagcagagtctcgaccactatctgaaagctctacagcccattgtctcggaggaggagtgggcgcataccaagcaactagtggatgagttccaggctagtgggggagtgggcgagagactgcagaaagggctagaacgtcgcgcccggaagaccgagaattggcttagcgagtggtggttaaaaacagcctatctacagtataggcagcctgtcgtgatttatagctctccgggagtgatgcttcccaaacaggatttcgtagatctccagggccaactgaggttcgccgctaaacttatcgagggggttctcgatttcaaagttatgatcgacaatgaaaccctgcccgtggaatacctcggcggcaaacctctctgcatgaatcagtattatcagattctctctagttgcagggtgccaggtcccaagcaggacactgtttccaattttagcaagaccaagaaaccacccacgcacattaccgtggtgcacaactaccagttctttgagctggacgtctaccacagtgacggaacaccattaactgccgaccagatttttgtacagctagaaaagatttggaacagttctttgcagacgaacaaggaacctgttgggattcttacatctaaccatagaaattcgtgggctaaggcatataacacgctaatcaaggacaaggtgaacagagactccgtgcgctctatccagaagtccatcttcacagtgtgcctggacgcaactatgcctcgggtctcagaagatgtgtaccggagccatgtggcaggtcagatgctgcatggaggcggaagtagactgaacagcggcaatcgttggttcgacaagacactacagttcatagtcgctgaagacggctcttgcgggctagtgtacgaacacgccgccgctgaaggacctccaattgtgacactgcttgactatgtgattgaatacactaaaaagcctgagctcgtacgatcacccttagtaccccttcccatgccgaaaaagttgaggtttaacataacacctgaaatcaaatcagatatcgaaaaggcgaagcaaaaccttagtatcatgattcaagatcttgacataactgttatggtgtttcaccactttgggaaggatttccctaaatcagaaaagctgagtccagatgcctttatccaaatggcccttcagctggcatactacaggatctacggacaggcctgtgctacttacgaaagcgctagcttgaggatgtttcacctcggccgaacggacaccatccgcagcgccagcatggactccctaacattcgttaaagccatggatgactcctccgttaccgagcaccagaaggtcgagttactccgcaaggcagtgcaggctcatcgcggttacacggaccgagcaatccgcggagaagctttcgacaggcacctgctgggcctcaagctgcaagccatcgaagacctcgtcagcatgccggacatcttcatggatacctcctatgctatcgcaatgcactttcacctgtcaacctcccaagtacccgccaaaaccgattgcgttatgttttttgggcctgtagtccctgacggctacggggtttgttacaatccaatggaggcccatatcaatttcagcctgagcgcctataattcatgcgctgaaactaatgcagcaagactggcacactacttggagaaagcactgctggatatgcgggctttactgcaatcccatccacgcgctaagctgtag

SEQ ID NO: 15135 - DNA, 1638 bp, Artificial Sequence
  derived and/or modified sequence
atgctagctttcgccgcaagaacagtcgtgaagccactgggcttcctcaaaccattttctctgatgaaggctagtagtcgctttaaggcccaccaggatgctctaccccgactccccgttccacccctgcagcagtccttggatcattatctgaaggccctgcagccaatagtgtcagaagaagagtgggcacatacaaaacaactggtggatgagtttcaggcctctgggggtgtgggggagcgactgcaaaagggactggagagacgtgctcggaagaccgaaaattggctaagtgaatggtggttgaaaactgcttatttgcagtatcgtcagcccgtggtgatctatagttctcctggggtgatgctccccaaacaggatttcgtagatctgcagggacaattacggtttgccgccaaactgatcgaaggtgtcttggacttcaaggtaatgatagacaatgagacgttgcccgtggaatatctgggaggcaagccactgtgcatgaaccagtattatcagatactgagttcctgtcgcgttcccggcccaaagcaagacacggtgtctaacttcagcaagaccaagaaaccaccaacccatatcaccgttgttcacaactatcagtttttcgagctcgatgtttatcacagcgatggtactccgcttaccgccgaccagatcttcgtgcagctcgagaagatctggaactcaagcctgcagaccaataaggaaccagttggcatcttaacttcgaaccaccgtaatagttgggcaaaggcttacaacactttgattaaggacaaggtgaatcgcgactccgtgcggtcaattcagaagaagaagcctgagctggtccgctccccacttgtcccactaccaatgcccaagaagctgcgattcaatatcactcctgaaatcaaaagcgatatagagaaagctaagcaaaatctgtccatcatgatccaggatctggacattaccgtaatggtgttccatcactttgggaaagactttccaaagtctgaaaagctgtctcccgatgcatttattcagatggcgctgcagctcgcctactaccgaatctacgggcaagcctgcgccacctacgaaagcgcctcgctgcgtatgtttcatctggggaggacagacactatccggtccgcttctatggactctctcacattcgtcaaggcgatggacgactcctccgttactgaacatcaaaaagtggagctgttgaggaaagccgttcaggcacacagaggctatacggatcgggcaatccggggtgaagctttcgataggcatcttctggggctgaaattgcaggcaatcgaggacctagttagtatgccggatattttcatggatactagctacgctatcgctatgcactttcatttgagtacctcacaggtacctgctaaaacagactgcgtgatgttttttggaccagtcgttcctgatgggtacggggtctgctataacccgatggaggcacacataaactttagtctgtcagcttacaacagttgcgcggagacgaacgccgctcggctggctcattacctcgaaaaagcccttctcgatatgagagccctattgcagtcccatccacgggccaaactgtag

SEQ ID NO: 15136 - DNA, 1881 bp, Artificial Sequence
  derived and/or modified sequence
atgctggcctttgctgccaggacagtggtgaagcccctgggcttcctgaagcccttcagcctgatgaaggccagcagccgcttcaaggcccaccaggatgccctgccccggctgcctgtgccccccctgcagcagagcctggaccactacctgaaggccctgcagcccatcgtgtctgaggaggagtgggcccacaccaagcagctggtggatgagttccaggccagcggcggcgtgggggagcggctgcagaagggcctggagcggcgggccaggaagacagagaactggctgtctgagtggtggctgaagacagcctacctgcagtaccggcagcctgtggtgatctacagcagccctggggtgatgctgcccaagcaggactttgtggacctgcagggccagctgcgctttgctgccaagctgattgaaggagtgctggacttcaaggtgatgattgacaatgagaccctgcctgtggagtacctgggcggcaagcccctgtgcatgaaccagtactaccagatcctgagcagctgccgggtgcccggccccaagcaggacacagtgagcaacttcagcaagaccaagaagccacccacccacatcaccgtggtgcacaactaccagttctttgagctggatgtgtaccacagtgatggcacccccctgacagctgaccagatctttgtgcagctggagaagatctggaacagcagcctgcagaccaacaaggagcctgtgggcatcctgaccagcaaccacaggaacagctgggccaaggcctacaacaccctcatcaaggacaaggtgaacagagattctgtgcgcagcatccagaagagcatcttcaccgtgtgcctggatgccaccatgccccgggtgtctgaagatgtgtaccgcagccacgtggccggccagatgctgcacggcggcggcagccggctgaacagcggcaaccgctggtttgacaagaccctgcagttcatcgtggctgaagatggcagctgtggcctggtgtatgaacatgctgctgctgagggcccccccatcgtgaccctgctggactatgtgattgagtacaccaagaagccagagctggtgcgcagccccctggtgcccctgcccatgcccaagaagctgcgcttcaacatcaccccagagatcaagagtgacatcgagaaggccaagcagaacctgagcatcatgatccaggacctggacatcaccgtgatggtgttccaccactttgggaaggacttccccaagtctgagaagctgagcccagatgccttcatccagatggccctgcagctggcctactaccgcatctacggccaggcctgtgccacctatgagagcgccagcctgaggatgttccacctgggccgcacagacaccatccgcagcgcctccatggacagcctgacctttgtgaaggccatggatgacagctctgtgacagagcaccagaaggtggagctgctgaggaaggctgtgcaggcccaccggggctacacagaccgggccatccggggggaggcctttgacagacacctgctgggcctgaagctgcaggccatcgaggacctggtgtccatgccagacatcttcatggacaccagctatgccatcgccatgcacttccacctgagcaccagccaggtgcctgccaagacagactgtgtgatgttcttcggccctgtggtgcctgatggctacggcgtgtgctacaaccccatggaggcccacatcaacttcagcctgagcgcctacaacagctgtgccgagaccaatgctgcccggctggcccactacctggagaaggccctgctggacatgagggccctgctgcagagccacccccgggccaagctgtag

SEQ ID NO: 15137 - DNA, 1638 bp, Artificial Sequence
  derived and/or modified sequence
atgctggcctttgctgccaggacagtggtgaagcccctgggcttcctgaagcccttcagcctgatgaaggccagcagccgcttcaaggcccaccaggatgccctgccccggctgcctgtgccccccctgcagcagagcctggaccactacctgaaggccctgcagcccatcgtgtctgaggaggagtgggcccacaccaagcagctggtggatgagttccaggccagcggcggcgtgggggagcggctgcagaagggcctggagcggcgggccaggaagacagagaactggctgtctgagtggtggctgaagacagcctacctgcagtaccggcagcctgtggtgatctacagcagccctggggtgatgctgcccaagcaggactttgtggacctgcagggccagctgcgctttgctgccaagctgattgaaggagtgctggacttcaaggtgatgattgacaatgagaccctgcctgtggagtacctgggcggcaagcccctgtgcatgaaccagtactaccagatcctgagcagctgccgggtgcccggccccaagcaggacacagtgagcaacttcagcaagaccaagaagccacccacccacatcaccgtggtgcacaactaccagttctttgagctggatgtgtaccacagtgatggcacccccctgacagctgaccagatctttgtgcagctggagaagatctggaacagcagcctgcagaccaacaaggagcctgtgggcatcctgaccagcaaccacaggaacagctgggccaaggcctacaacaccctcatcaaggacaaggtgaacagagattctgtgcgcagcatccagaagaagaagccagagctggtgcgcagccccctggtgcccctgcccatgcccaagaagctgcgcttcaacatcaccccagagatcaagagtgacatcgagaaggccaagcagaacctgagcatcatgatccaggacctggacatcaccgtgatggtgttccaccactttgggaaggacttccccaagtctgagaagctgagcccagatgccttcatccagatggccctgcagctggcctactaccgcatctacggccaggcctgtgccacctatgaaagtgccagcctgaggatgttccacctgggccgcacagacaccatccgcagcgcctccatggacagcctgacctttgtgaaggccatggatgacagctctgtgacagagcaccagaaggtggagctgctgaggaaggctgtgcaggcccaccggggctacacagaccgggccatccggggggaggcctttgacagacacctgctgggcctgaagctgcaggccatcgaggacctggtgtccatgccagacatcttcatggacaccagctatgccatcgccatgcacttccacctgagcaccagccaggtgcctgccaagacagactgtgtgatgttctttggacctgtggtgcctgatggctatggagtgtgctacaaccccatggaggcccacatcaacttcagcctgagcgcctacaacagctgtgccgagaccaatgctgcccggctggcccactacctggagaaggccctgctggacatgagggccctgctgcagagccacccccgggccaagctgtag

SEQ ID NO: 15138 - DNA, 1881 bp, Artificial Sequence
  derived and/or modified sequence
atgctggccttcgccgcccggaccgtggtgaagcccctgggcttcctcaaacctttttcgctcatgaaggcctccagtcggtttaaggctcatcaggatgctcttccccgcttgcctgtgccaccactccagcagtctttggatcactatctgaaggccttacagcctatagtgagcgaggaggagtgggcgcataccaagcagcttgtagacgagttccaagccagtggtggcgttggcgaacgcctgcagaaagggctcgagcggagagccagaaaaaccgagaattggttgtccgagtggtggcttaagacagcttacctgcagtacagacaacccgtcgtgatttactccagcccaggggtgatgctccccaaacaggacttcgtcgatctccagggtcagctccgttttgcagctaaactgatcgagggagtccttgacttcaaagtgatgatcgataatgaaactctgcccgtcgagtacttaggaggcaagcctctgtgcatgaaccaatattaccagatcctgtccagttgcagagtgcccggtcccaaacaggacaccgttagcaattttagcaaaaccaagaagccacccacacacattacagttgtgcataattatcagttcttcgagctggacgtgtaccacagtgacgggaccccattgaccgccgaccagatttttgtgcagttagaaaagatctggaatagctcgcttcaaactaataaagagccggtgggtatcctgacgtctaatcaccgaaattcgtgggctaaagcatacaatactctgataaaagataaggtgaatcgtgactctgtgcgttctatccagaagtcgattttcactgtctgcctggatgcaacaatgccccgggtgtccgaggacgtgtacaggtctcatgtagcaggccagatgctccatggcggcgggagcagactcaacagtggcaataggtggtttgataagactcttcagttcattgtggcggaagatggtagttgtggtttggtttatgagcacgcagctgctgagggaccccccatcgtgactctgctggactacgtcattgagtatactaagaagcctgaactggttaggtctcccctggtgcctctgcccatgcccaagaaactgagattcaacatcacaccagaaatcaaaagcgatatcgaaaaggcaaaacaaaacctgtccatcatgattcaggacctggatatcacagtgatggtgtttcaccactttgggaaagacttcccaaagtccgagaagttgtccccagatgcatttatacagatggctcttcagctcgcttactacagaatatatggccaggcctgcgctacctatgagtccgcttctctgaggatgttccaccttggaagaaccgataccatcaggtcagcgtctatggactccctaacctttgtgaaagcaatggacgatagttccgtcaccgaacatcagaaggtggaactgctgaggaaggccgtccaggctcaccgtgggtacactgatagagcaataaggggcgaagcgtttgatcggcacctattaggacttaaacttcaggcaatcgaagacctcgtttctatgccggatatcttcatggatacgtcttatgccattgcgatgcattttcatctcagcacttctcaagtgcctgccaaaactgattgcgtcatgttttttggtcccgtggtcccggatggttacggagtctgctacaatccaatggaggctcacatcaacttcagcctctcagcgtacaattcttgtgcagaaactaacgcggctagactggcacactacctggagaaagccctcctagatatgagggcccttttacagtcccacccacgagcaaaactctag

SEQ ID NO: 15139 - DNA, 1638 bp, Artificial Sequence
  derived and/or modified sequence
atgctggccttcgccgcccggaccgtggtgaagcccctgggcttcttgaaacccttcagcctcatgaaagccagtagccgtttcaaggcccatcaggatgccctgccaaggttgcccgttccaccattgcaacagtccttagaccattacctgaaagccctgcagcccattgtgtccgaggaggagtgggcccacaccaaacaactcgtggacgaattccaggcctccggcggcgtcggagaaaggctccagaagggcctcgaacggcgcgcccgcaagacagagaattggttgtccgagtggtggctgaagaccgcatacttacagtatcgtcagcccgtggtcatatactctagtcccggggtgatgctgcccaagcaagacttcgtggacctgcaagggcaactgaggttcgccgctaaactcatcgaaggcgtacttgattttaaggtgatgatcgataatgagaccctccccgtggagtaccttggtggcaagcccctatgtatgaaccaatattatcagatcctgtcctcatgcagagtccctggtccgaagcaggacaccgtttctaactttagtaaaactaaaaagccccctacgcatattaccgtggtccacaactaccaatttttcgaactcgatgtatatcactcagacggtactcctcttactgcggaccagattttcgtgcagttagaaaagatttggaactccagcctccagaccaacaaggagcccgtcggcatactgacctctaatcaccgtaatagctgggcaaaagcatacaacactctcattaaggacaaggttaacagggatagcgtccgttcgatccaaaaaaagaaacctgaacttgtcagatctccccttgtgcctttgcctatgccaaagaagttgaggtttaacattacccccgagatcaagtccgatatagagaaggcaaaacagaacctcagcatcatgatccaggatctagacatcactgtcatggtgtttcatcacttcgggaaggacttcccaaagtccgagaagctaagccccgatgctttcatccagatggccctacagctagcttactaccggatctacggccaggcctgtgcaacttacgaatccgctagcctacgtatgttccacctgggcagaaccgacaccataagatcagcatcaatggactctctgacattcgtaaaggccatggacgacagcagcgtgacggagcatcagaaagtggaactgctgcggaaggccgtgcaggcccatcggggctacaccgaccgggccatccggggggaggccttcgacagacacttgctgggattgaagctgcaggctattgaggatctggtgtctatgccggacatctttatggatacctcctatgccatcgctatgcatttccatctcagcaccagtcaagtgccagcaaagacagattgtgtcatgttcttcggccctgtagtccccgatggctatggagtgtgctacaatcccatggaggcccacatcaactttagtctgagcgcttataacagttgcgccgagactaacgctgccagactggcccattatttagaaaaagccctgttagacatgcgcgctctgctgcagtcccatccaagagccaagctgtag

SEQ ID NO: 15140 - DNA, 1881 bp, Artificial Sequence
  derived and/or modified sequence
atgttggcattcgccgctagaacggttgtgaaaccactgggctttctaaagccattctccttgatgaaggcatcttcccgtttcaaagctcaccaggatgctttgcctaggctccctgtgccacctctgcagcaaagtttagatcactatttgaaggcccttcagccgatcgtgtctgaagaagagtgggcccacacaaagcagctggtagacgagttccaggcctccggaggggtgggagaaaggctgcagaagggcttggaaagacgggctagaaagacggagaattggctaagtgaatggtggcttaagacagcctacctgcagtatagacagccagtggtaatctactcctcaccaggcgtaatgttacccaagcaagactttgtggatttacagggacagctgaggttcgctgccaaactcatcgaaggcgtgttggatttcaaggtgatgattgacaatgagactctacctgtggagtacctgggcggaaaaccgctttgcatgaaccaatactatcagatcttatcgtcctgccgcgtccctggccctaagcaggacacagtttctaactttagtaagacaaaaaaaccaccaactcatattaccgttgtccataactatcaattttttgagctggatgtctatcactcggacggcacccccctgacagcagaccaaattttcgtgcagctggagaaaatttggaatagcagccttcaaactaacaaggagcctgtcggtattctcacatccaaccacaggaatagctgggcaaaggcttacaatacattgattaaggataaggtgaaccgtgacagcgtgcgaagcatacaaaaatctatcttcacggtgtgcttggatgccaccatgcccagagtcagcgaagacgtctacagatcacacgtggcaggccagatgcttcacggcggaggttcaaggctaaactctggcaaccgctggttcgataagactctccagtttattgtggctgaagatgggagttgcggattggtctacgaacacgccgctgccgagggcccaccaatcgtaacactgctcgactacgtgatagaatacacaaaaaaacccgagctcgttaggagccccctagtgcccctccccatgcctaagaaactcaggttcaatatcacaccggagatcaaaagtgacatcgagaaagccaaacagaacttgtccatcatgatacaagatctggacatcaccgtgatggtgtttcaccatttcgggaaggacttcccaaaatctgagaagcttagccccgacgcttttatccagatggcgctgcagcttgcctattatcgtatttacgggcaggcatgtgcaacctacgaatctgccagcttacggatgtttcatctgggtagaactgatacaattcgctctgccagtatggactccttgacattcgtgaaagccatggacgatagctccgtgacggagcatcagaaagtggagctgctgcgtaaggcggtccaggcacacagaggctatacagatagggccatcaggggagaagcattcgaccgtcatctcctgggcctgaaacttcaagccatagaagacctggtctctatgccggatatcttcatggacacttcctacgccatagcaatgcatttccatctcagcacaagtcaagtccccgctaagacggactgtgtgatgttcttcggtccggtggtgcctgacggctacggagtctgttataacccaatggaggcccatattaatttttcactctccgcttacaacagctgtgcagaaaccaatgccgctcgtctggctcactatcttgagaaggccctcctggacatgagggcgctgttgcagagtcatcccagagctaagctctag

SEQ ID NO: 15141 - DNA, 1638 bp, Artificial Sequence
  derived and/or modified sequence
atgttggcctttgcagctaggaccgttgtgaaacctctgggcttcctgaaaccgttcagtttgatgaaggccagttcaaggtttaaggcgcatcaggatgccctgccacggctgcccgtgcctcctctccagcagtcactggatcactaccttaaggcgctacagcccattgtcagtgaagaagagtgggcacacaccaaacaactggtagatgaattccaggctagcggcggagtgggggaacgtttgcagaagggactagagagacgcgcacgcaagacagaaaattggttgagcgagtggtggctgaaaactgcttacctccagtaccgccagcccgtggtaatttactccagtcctggggtgatgctgcctaagcaggatttcgtggacctgcaaggccagctacgattcgctgccaaactgatcgaaggtgtgctcgatttcaaagttatgatagataacgagacgctacctgtagagtacctgggcggaaagcctctttgcatgaaccaatattaccagatcctatcatcctgtagggttcccggacccaagcaggatacagtgtcaaatttctctaaaacaaaaaaaccccctacccacatcacagtggtgcacaactatcagtttttcgagctagatgtatatcactccgacggcaccccactgacagccgatcagatcttcgtacagctggagaaaatttggaactcctctcttcagactaataaggaaccagtaggcattctcacatcaaaccaccggaatagctgggctaaagcctacaacactctaatcaaggacaaagtgaacagggacagtgttcgctccatacagaaaaagaagcctgaactggtgagatctccactagtacccttacccatgccaaaaaaattacgatttaacatcacccccgaaattaaatctgatatcgagaaagcaaaacaaaatctaagtattatgatccaggacttagatatcacggtcatggtattccaccactttggcaaggacttccctaagagcgagaagttgtccccagacgcgttcattcagatggcccttcaactcgcatattatagaatttacggacaggcgtgtgctacgtacgagtcagcatcactgcgaatgttccatctcggacggaccgacacaattaggagtgccagcatggacagccttacttttgtgaaagcgatggacgattccagtgtgactgagcatcagaaagttgaactcctcagaaaagctgtgcaagcacatcggggatacaccgacagagctatacgaggagaggcctttgacaggcacctgctgggcctgaagctgcaggcaattgaagacctggtttctatgcccgatatctttatggacaccagttacgcaatcgctatgcactttcacctgtccacaagtcaggtgcccgcaaaaactgactgcgtcatgttttttggcccagtggtgcccgatggatacggggtgtgctacaaccctatggaggctcacatcaacttctcactcagcgcctacaattcctgtgccgagacaaacgcagctcggctcgcgcattacctggagaaggcactacttgacatgagggccctgttgcagtcccatccaagagccaagctttag

SEQ ID NO: 15142 - DNA, 2763 bp, Artificial Sequence
  derived and/or modified sequence
atcgatgccccgtccccgccccacagccaacctcccgggcaccgttgcccgcccggggcccgctaccggcccaggccccgcctcgcgagtcctcctccccgggtgccttcccgcagcccgctcggcccagagggtgggcgcggggctgcctctaccggctggcggctgtaactcagcgaccttggcccgaaggctctagcaaggacccaccgaccccagccgcggcggcggcggcgcggactttgcccggtgtgtggggcggagcggactgcgtgtccgcggacgggcagcgaagatgttagccttcgctgccaggaccgtggtgaagcctctgggcttcctgaagcccttctccttgatgaaggcttccagccgcttcaaggcacaccaggatgcactgccacggctgcccgtgccccctctccagcagtccctggaccactacctgaaggcgctgcagcccatcgtgagtgaggaggagtgggcccacaccaagcagctggtggatgagtttcaggcctcaggaggtgtaggggagcgcctgcagaaggggctggagcgtcgggccaggaagacggagaactggctgtctgagtggtggctcaagaccgcctacctccagtaccgccagcctgtggtcatctactcgagcccaggcgtgatgctacccaagcaggacttcgtggacctgcagggtcagctccgatttgctgccaaactcattgagggtgtgttggatttcaaggtcatgattgacaacgagaccctgcccgtggagtacctgggggggaagccactgtgcatgaaccagtactatcagatcttgtcctcctgccgagtgccgggccccaagcaggacacagtcagcaacttcagcaagaccaagaagcctcccacgcacatcaccgtggtacacaactaccagttttttgagctggatgtgtaccacagtgacgggacacccctcactgcggatcagatctttgtgcagctggagaagatctggaactcatccctacagaccaacaaggagcctgtgggcatcctcacctccaaccaccgcaactcctgggccaaggcatacaacaccctcatcaaagacaaggtgaaccgggattccgtgcgctccatccagaagagcatcttcaccgtgtgcctagatgcaaccatgcccagggtctcagaagacgtgtaccgcagccacgtggcaggccagatgctgcatgggggcggcagcaggctcaacagcggcaaccgctggttcgacaagacgctgcagttcatcgtggcagaagatggctcctgtgggcttgtgtacgagcatgctgcagcggaggggccccctattgtcacccttctggactatgtcatcgagtacacgaagaaacccgagcttgtgcggtctcccctggtgcccctgcccatgcccaagaagctgcggttcaacatcacccccgagatcaagagcgacatcgagaaggccaagcagaacctcagcatcatgatccaggacctggatatcaccgtgatggtgttccaccattttggaaaagacttccccaagtcggagaagctaagcccagatgccttcatccagatggctttgcagctggcctactacaggatctacggacaggcatgtgccacctatgaaagtgcctccctgcgcatgtttcacctgggccgcaccgacaccatccgctcggcttccatggactcactcacctttgtcaaggccatggatgactccagcgtcacggagcaccagaaggtggagctgctgcggaaggccgtgcaggcccaccgaggctacaccgaccgggccatccgcggggaggcctttgatcgacacctgctgggcctgaagctgcaggccatcgaggacctggtgagcatgcccgacatcttcatggacacctcctacgccatcgccatgcacttccacctctccaccagccaggtccctgccaagacagactgtgtcatgttcttcgggcccgtggtccccgacggctacggtgtctgctataaccccatggaggcccacatcaacttctccctgtcggcctacaacagctgcgcggagaccaacgccgcccgcctggcgcattacctggagaaggcgctcctggacatgcgtgccctgctgcagagccacccccgggccaagctctgagcccctaggactcaggcctgccaatgccacagccaagcccaccctgggatgggccacccaccagggctcagctccttggttccctcttccttggttccctcttccctggtccccccaaatctactgagccacggaccgcatcctccagggggcctgcaggccccagccaagtgccttccgtgggtcatcccagcacctgccagggcccgacctggggctgagtgcagaggctgagcaggacgttaggcccgggcccctggcacgtcctccaccggtgcctcctctggggaagggaaccagccctccagagcaggagactggcaagagctctttgtctcaccagctcagccccggccactccctgccaactccatgaccaggccaccatctgtaccctgcttcccaaactcccaggacctggagacaggattgtctggggccgaggggccagggtgtgaggtttcacctccgttgcggctgtgctcctgtggataacattgctagcgagccgcctctggttccactcagcttggttcctgcccccgccctgctgtatgatattaatgtggaaggtcatcaataaaggg

SEQ ID NO: 15143 - DNA, 2523 bp, Artificial Sequence
  derived and/or modified sequence
ccccgccccacagccaacctcccgggcaccgttgcccgcccggggcccgctaccggcccaggccccgcctcgcgagtcctcctccccgggtgccttcccgcagcccgctcggcccagagggtgggcgcggggctgcctctaccggctggcggctgtaactcagcgaccttggcccgaaggctctagcaaggacccaccgaccccagccgcggcggcggcggcgcggactttgcccggtgtgtggggcggagcggactgcgtgtccgcggacgggcagcgaagatgttagccttcgctgccaggaccgtggtgaagcctctgggcttcctgaagcccttctccttgatgaaggcttccagccgcttcaaggcacaccaggatgcactgccacggctgcccgtgccccctctccagcagtccctggaccactacctgaaggcgctgcagcccatcgtgagtgaggaggagtgggcccacaccaagcagctggtggatgagtttcaggcctcaggaggtgtaggggagcgcctgcagaaggggctggagcgtcgggccaggaagacggagaactggctgtctgagtggtggctcaagaccgcctacctccagtaccgccagcctgtggtcatctactcgagcccaggcgtgatgctacccaagcaggacttcgtggacctgcagggtcagctccgatttgctgccaaactcattgagggtgtgttggatttcaaggtcatgattgacaacgagaccctgcccgtggagtacctgggggggaagccactgtgcatgaaccagtactatcagatcttgtcctcctgccgagtgccgggccccaagcaggacacagtcagcaacttcagcaagaccaagaagcctcccacgcacatcaccgtggtacacaactaccagttttttgagctggatgtgtaccacagtgacgggacacccctcactgcggatcagatctttgtgcagctggagaagatctggaactcatccctacagaccaacaaggagcctgtgggcatcctcacctccaaccaccgcaactcctgggccaaggcatacaacaccctcatcaaagacaaggtgaaccgggattccgtgcgctccatccagaagaagaaacccgagcttgtgcggtctcccctggtgcccctgcccatgcccaagaagctgcggttcaacatcacccccgagatcaagagcgacatcgagaaggccaagcagaacctcagcatcatgatccaggacctggatatcaccgtgatggtgttccaccattttggaaaagacttccccaagtcggagaagctaagcccagatgccttcatccagatggctttgcagctggcctactacaggatctacggacaggcatgtgccacctatgaaagtgcctccctgcgcatgtttcacctgggccgcaccgacaccatccgctcggcttccatggactcactcacctttgtcaaggccatggatgactccagcgtcacggagcaccagaaggtggagctgctgcggaaggccgtgcaggcccaccgaggctacaccgaccgggccatccgcggggaggcctttgatcgacacctgctgggcctgaagctgcaggccatcgaggacctggtgagcatgcccgacatcttcatggacacctcctacgccatcgccatgcacttccacctctccaccagccaggtccctgccaagacagactgtgtcatgttcttcgggcccgtggtccccgacggctacggtgtctgctataaccccatggaggcccacatcaacttctccctgtcggcctacaacagctgcgcggagaccaacgccgcccgcctggcgcattacctggagaaggcgctcctggacatgcgtgccctgctgcagagccacccccgggccaagctctgagcccctaggactcaggcctgccaatgccacagccaagcccaccctgggatgggccacccaccagggctcagctccttggttccctcttccttggttccctcttccctggtccccccaaatctactgagccacggaccgcatcctccagggggcctgcaggccccagccaagtgccttccgtgggtcatcccagcacctgccagggcccgacctggggctgagtgcagaggctgagcaggacgttaggcccgggcccctggcacgtcctccaccggtgcctcctctggggaagggaaccagccctccagagcaggagactggcaagagctctttgtctcaccagctcagccccggccactccctgccaactccatgaccaggccaccatctgtaccctgcttcccaaactcccaggacctggagacaggattgtctggggccgaggggccagggtgtgaggtttcacctccgttgcggctgtgctcctgtggataacattgctagcgagccgcctctggttccactcagcttggttcctgcccccgccctgctgtatgatattaatgtggaaggtcatcaataaaggggaattgtgttggtgaa

SEQ ID NO: 15144 - DNA, 1881 bp, Artificial Sequence
  derived and/or modified sequence
atgctggccttcgccgccagaaccgtggtgaagcccctgggcttcctgaagcccttcagcctgatgaaggccagcagcagattcaaggcccaccaggacgccctgcccagactgcccgtgccccccctgcagcagagcctggaccactacctgaaggccctgcagcccatcgtgagcgaggaggagtgggcccacaccaagcagctggtggacgagttccaggccagcggcggcgtgggcgagagactgcagaagggcctggagagaagagccagaaagaccgagaactggctgagcgagtggtggctgaagaccgcctacctgcagtacagacagcccgtggtgatctacagcagccccggcgtgatgctgcccaagcaggacttcgtggacctgcagggccagctgagattcgccgccaagctgatcgagggcgtgctggacttcaaggtgatgatcgacaacgagaccctgcccgtggagtacctgggcggcaagcccctgtgcatgaaccagtactaccagatcctgagcagctgcagagtgcccggccccaagcaggacaccgtgagcaacttcagcaagaccaagaagccccccacccacatcaccgtggtgcacaactaccagttcttcgagctggacgtgtaccacagcgacggcacccccctgaccgccgaccagatcttcgtgcagctggagaagatctggaacagcagcctgcagaccaacaaggagcccgtgggcatcctgaccagcaaccacagaaacagctgggccaaggcctacaacaccctgatcaaggacaaggtgaacagagacagcgtgagaagcatccagaagagcatcttcaccgtgtgcctggacgccaccatgcccagagtgagcgaggacgtgtacagaagccacgtggccggccagatgctgcacggcggcggcagcagactgaacagcggcaacagatggttcgacaagaccctgcagttcatcgtggccgaggacggcagctgcggcctggtgtacgagcacgccgccgccgagggcccccccatcgtgaccctgctggactacgtgatcgagtacaccaagaagcccgagctggtgagaagccccctggtgcccctgcccatgcccaagaagctgagattcaacatcacccccgagatcaagagcgacatcgagaaggccaagcagaacctgagcatcatgatccaggacctggacatcaccgtgatggtgttccaccacttcggcaaggacttccccaagagcgagaagctgagccccgacgccttcatccagatggccctgcagctggcctactacagaatctacggccaggcctgcgccacctacgagagcgccagcctgagaatgttccacctgggcagaaccgacaccatcagaagcgccagcatggacagcctgaccttcgtgaaggccatggacgacagcagcgtgaccgagcaccagaaggtggagctgctgagaaaggccgtgcaggcccacagaggctacaccgacagagccatcagaggcgaggccttcgacagacacctgctgggcctgaagctgcaggccatcgaggacctggtgagcatgcccgacatcttcatggacaccagctacgccatcgccatgcacttccacctgagcaccagccaggtgcccgccaagaccgactgcgtgatgttcttcggccccgtggtgcccgacggctacggcgtgtgctacaaccccatggaggcccacatcaacttcagcctgagcgcctacaacagctgcgccgagaccaacgccgccagactggcccactacctggagaaggccctgctggacatgagagccctgctgcagagccaccccagagccaagctgtag

SEQ ID NO: 15145 - DNA, 1638 bp, Artificial Sequence
  derived and/or modified sequence
atgctggccttcgccgccagaaccgtggtgaagcccctgggcttcctgaagcccttcagcctgatgaaggccagcagcagattcaaggcccaccaggacgccctgcccagactgcccgtgccccccctgcagcagagcctggaccactacctgaaggccctgcagcccatcgtgagcgaggaggagtgggcccacaccaagcagctggtggacgagttccaggccagcggcggcgtgggcgagagactgcagaagggcctggagagaagagccagaaagaccgagaactggctgagcgagtggtggctgaagaccgcctacctgcagtacagacagcccgtggtgatctacagcagccccggcgtgatgctgcccaagcaggacttcgtggacctgcagggccagctgagattcgccgccaagctgatcgagggcgtgctggacttcaaggtgatgatcgacaacgagaccctgcccgtggagtacctgggcggcaagcccctgtgcatgaaccagtactaccagatcctgagcagctgcagagtgcccggccccaagcaggacaccgtgagcaacttcagcaagaccaagaagccccccacccacatcaccgtggtgcacaactaccagttcttcgagctggacgtgtaccacagcgacggcacccccctgaccgccgaccagatcttcgtgcagctggagaagatctggaacagcagcctgcagaccaacaaggagcccgtgggcatcctgaccagcaaccacagaaacagctgggccaaggcctacaacaccctgatcaaggacaaggtgaacagagacagcgtgagaagcatccagaagaagaagcccgagctggtgagaagccccctggtgcccctgcccatgcccaagaagctgagattcaacatcacccccgagatcaagagcgacatcgagaaggccaagcagaacctgagcatcatgatccaggacctggacatcaccgtgatggtgttccaccacttcggcaaggacttccccaagagcgagaagctgagccccgacgccttcatccagatggccctgcagctggcctactacagaatctacggccaggcctgcgccacctacgagagcgccagcctgagaatgttccacctgggcagaaccgacaccatcagaagcgccagcatggacagcctgaccttcgtgaaggccatggacgacagcagcgtgaccgagcaccagaaggtggagctgctgagaaaggccgtgcaggcccacagaggctacaccgacagagccatcagaggcgaggccttcgacagacacctgctgggcctgaagctgcaggccatcgaggacctggtgagcatgcccgacatcttcatggacaccagctacgccatcgccatgcacttccacctgagcaccagccaggtgcccgccaagaccgactgcgtgatgttcttcggccccgtggtgcccgacggctacggcgtgtgctacaaccccatggaggcccacatcaacttcagcctgagcgcctacaacagctgcgccgagaccaacgccgccagactggcccactacctggagaaggccctgctggacatgagagccctgctgcagagccaccccagagccaagctgtag

SEQ ID NO: 15146 - protein, 196 aa, Artificial Sequence
  derived and/or modified sequence
MRLPLLVSAGVLLVALLPCPPCRALLSRGPVPGARQAPQHPQPLDFFQPPPQSEQPQQPQARPVLLRMGEEYFLRLGNLNKSPAAPLSPASSLLAGGSGSRPSPEQATANFFRVLLQQLLLPRRSLDSPAALAERGARNALGGHQEAPERERRSEEPPISLDLTFHLLREVLEMARAEQLAQQAHSNRKLMEIIGK

SEQ ID NO: 15147 - DNA, 591 bp, Artificial Sequence
  derived and/or modified sequence
atgagactgcccctgctggtgagcgccggcgtgctgctggtggccctgctgccctgccccccctgcagagccctgctgagcagaggccccgtgcccggcgccagacaggccccccagcacccccagcccctggacttcttccagccccccccccagagcgagcagccccagcagccccaggccagacccgtgctgctgagaatgggcgaggagtacttcctgagactgggcaacctgaacaagagccccgccgcccccctgagccccgccagcagcctgctggccggcggcagcggcagcagacccagccccgagcaggccaccgccaacttcttcagagtgctgctgcagcagctgctgctgcccagaagaagcctggacagccccgccgccctggccgagagaggcgccagaaacgccctgggcggccaccaggaggcccccgagagagagagaagaagcgaggagccccccatcagcctggacctgaccttccacctgctgagagaggtgctggagatggccagagccgagcagctggcccagcaggcccacagcaacagaaagctgatggagatcatcggcaagtag

SEQ ID NO: 15148 - DNA, 591 bp, Artificial Sequence
  derived and/or modified sequence
atgcgcctgcccctgctggtcagcgctggcgtgctgttggtggcactactgccctgtccaccctgccgcgctctgctttcacggggtcccgtgcccggtgcgcggcaggccccccagcacccccaaccactcgacttcttccagccaccccctcagtcagaacagcctcagcagccacaggcccgtccggttctgttaagaatgggcgaagagtacttcttgcgccttggaaatttaaacaaatctccggctgctcccctctccccagccagttccttgctagcaggggggtccggatctcgcccgagtcccgagcaggccacggcaaacttctttcgggtgctcttgcagcagctgcttctcccgcggagaagtctcgacagccccgcggccttagccgaaagaggggcaagaaatgcgcttggcggccaccaggaagctccggaacgagagcgcaggtcggaggagcccccaatttcactggatttgacctttcaccttctgcgggaggtgcttgagatggctcgggccgaacagctcgcccagcaagctcattctaacaggaagctgatggaaatcattgggaagtag

SEQ ID NO: 15149 - DNA, 591 bp, Artificial Sequence
  derived and/or modified sequence
atgaggctgcccctgctggtgtctgctggggtgctgctggtggccctgctgccctgccccccctgccgggccctgctgagccggggccctgtgcctggggcccggcaggccccccagcacccccagcccctggacttcttccagcccccaccccagagcgagcagccccagcagccccaggcccggcctgtgctgctgaggatgggagaggagtacttcctgcggctgggcaacctgaacaagagccctgctgcccccctgagccctgccagcagcctgctggccggcggcagcggcagccggcccagccctgagcaggccacagccaacttcttccgggtgctgctgcagcagctgctgctgcccaggaggagcctggacagccctgctgccctggccgagcggggggccagaaatgccctgggcggccaccaggaggcccctgagcgggagcggcgctctgaggagccccccatcagcctggacctgaccttccacctgctgcgggaggtgctggagatggcccgggcagagcagctggcccagcaggcccacagcaacaggaagctgatggagatcatcggcaagtag

SEQ ID NO: 15150 - DNA, 1540 bp, Artificial Sequence
  derived and/or modified sequence
aagtcataagaagcccttccattttagggctcgttgacgtcaccaagaggcgataaatatctgttgatataattggatgtgagattcagtgttgagatagcaaaattctgcccctcgttccttggcagggccctatgatttatgcaggagcagaggcagcacgcaatcgagctgtcaagagagcgtcagcttattaggcaaatgctgcgtggtttttgaagagggtcgacactataaaatcccactccaggctctggagtggagaaactcagagaccaagtccattgagagactgaggggaaagagaggagagaaagaaaaagagagtgggaacagtaaagagaaaggaagacaacctccagagaaagcccccggagacgtctctctgcagagaggcggcagcacccggctcacctgcgaagcgcctgggaagcgagtgcccctaacatgcggctgccgctgcttgtgtccgcgggagtcctgctggtggctctcctgccctgcccgccatgcagggcgctcctgagccgcgggccggtcccgggagctcggcaggcgccgcagcaccctcagcccttggatttcttccagccgccgccgcagtccgagcagccccagcagccgcaggctcggccggtcctgctccgcatgggagaggagtacttcctccgcctggggaacctcaacaagagcccggccgctcccctttcgcccgcctcctcgctcctcgccggaggcagcggcagccgcccttcgccggaacaggcgaccgccaactttttccgcgtgttgctgcagcagctgctgctgcctcggcgctcgctcgacagccccgcggctctcgcggagcgcggcgctaggaatgccctcggcggccaccaggaggcaccggagagagaaaggcggtccgaggagcctcccatctccctggatctcaccttccacctcctccgggaagtcttggaaatggccagggccgagcagttagcacagcaagctcacagcaacaggaaactcatggagattattgggaaataaaacggtgcgtttggccaaaaagaatctgcatttagcacaaaaaaaatttaaaaaaatacagtattctgtaccatagcgctgctcttatgccatttgtttatttttatatagcttgaaacatagagggagagagggagagagcctataccccttacttagcatgcacaaagtgtattcacgtgcagcagcaacacaatgttattcgttttgtctacgtttagtttccgtttccaggtgtttatagtggtgttttaaagagaatgtagacctgtgagaaaacgttttgtttgaaaaagcagacagaagtcactcaattgtttttgttgtggtctgagccaaagagaatgccattctcttgggtgggtaagactaaatctgtaagctctttgaaacaactttctcttgtaaacgtttcagtaataaaacatctttccagtccttggtcagtttggttgtgtaagagaatgttgaatacttatatttttaataaaagttgcaaagg

SEQ ID NO: 15151 - DNA, 591 bp, Artificial Sequence
  derived and/or modified sequence
atgcggctgcccctgctggtgagcgccggcgtgctgctggtggccctgcttccctgccccccttgccgcgccctcctgtcaaggggtcccgtgcctggtgctcggcaagccccccagcatcctcagcccctggacttttttcagcctccaccccagtcagagcagccacagcagcctcaggcccgtccagttctcctccgtatgggcgaagagtatttcttacggctcggcaacctgaataaaagcccagccgctcccctgtcacccgccagttctctccttgcagggggaagcgggtcaagacctagccctgagcaggctacagcaaattttttcagggtgcttctgcagcaattacttttgccacgcagatctctggattcccccgccgcacttgcagagcgcggtgcaaggaatgccctcggaggccaccaagaggcccctgaacgcgaacgccgttctgaggagccacccatatcactagatctcaccttccaccttctgcgcgaggtcctcgagatggcccgggcagagcagctcgcacagcaggcgcattccaatcgaaagctcatggagatcatcggcaaatag

SEQ ID NO: 15152 - DNA, 591 bp, Artificial Sequence
  derived and/or modified sequence
atgcgtcttccgttgcttgtgtctgccggagtattattggtggctctgctgccttgtcctccatgcagggcactgctctcccgaggcccagtaccaggagctcgacaagccccacagcacccccagccccttgatttcttccagccaccccctcagagtgagcagccacagcagccccaggccagacctgtccttctccgtatgggcgaagaatactttctcagactcggaaacctgaacaagagcccggctgcccctctatcgccggcttcatccctcctagccggaggcagcggctcacgcccttccccagaacaggctaccgccaattttttccgggtgctactgcagcaactactgctgccacggcgaagtcttgactctcccgctgcccttgcggagagaggagcgcgaaatgctttgggcggacatcaagaggctcccgaaagagagcgcaggagcgaagagcctccaatctcattagacctcaccttccatctgctgagagaggtgctcgaaatggcaagggctgaacaactcgctcagcaggcccacagtaatcggaagctgatggagatcatcggcaagtag

SEQ ID NO: 15153 - DNA, 591 bp, Artificial Sequence
  derived and/or modified sequence
atgcggctgccactgctggtttctgccggagtgctgctggtcgctcttttaccttgtccaccttgccgggccctgttgagcagaggcccggtgccaggcgctcgacaagccccacaacacccacagcccctggacttttttcagcctccacctcaatccgagcagccccagcaaccccaagcccgcccggtactgttacgaatgggcgaggaatacttcctgcgactcgggaatctaaataaatcccccgccgcccctctttctccagcctcgtcactgctagccgggggcagtggcagcagacctagtccggagcaggccactgccaatttttttagggtccttttgcagcagctcctcttacctcggcgatcattggattccccagcggctctggctgaacgtggcgcaagaaatgcactcggcggacatcaagaggcccccgaaagagaaaggagaagcgaagaaccacccatctccctagatctcacatttcatttgttacgtgaagtcttagaaatggcaagagccgagcaactggctcagcaagctcactctaaccgaaaattaatggagatcattgggaaatag

SEQ ID NO: 15154 - DNA, 591 bp, Artificial Sequence
  derived and/or modified sequence
atgcgcctgccgctgctggtcagcgccggagtcctgctcgtcgcactgttgccatgcccaccttgcagagcattactctcaaggggacccgtccctggggcacgacaagccccccagcacccgcagccactcgatttctttcagcctcctccacagagcgagcagccccaacagccacaggcccgcccagtactacttcggatgggtgaggagtattttctgcgcctagggaacttaaacaagtcacctgcagcccctttgtcaccagcatcctcacttttggctggcggatctggaagtagacctagtccggagcaggccactgccaatttttttagggtccttttgcagcagctcctcttacctcggcgatcattggattccccagcggctctggctgaacgtggcgcaagaaatgcactcggcggacatcaagaggcccccgaaagagaaaggagaagcgaagaaccacccatctccctagatctcacatttcatttgttacgtgaagtcttagaaatggcaagagccgagcaactggctcagcaagctcactctaaccgaaaattaatggagatcattgggaaatag

SEQ ID NO: 15155 - RNA, 591 nt, Artificial Sequence
  derived and/or modified sequence
augcggcugccacugcugguuucugccggagugcugcuggucgcucuuuuaccuuguccaccuugccgggcccuguugagcagaggcccggugccaggcgcucgacaagccccacaacacccacagccccuggacuuuuuucagccuccaccucaauccgagcagccccagcaaccccaagcccgcccgguacuguuacgaaugggcgaggaauacuuccugcgacucgggaaucuaaauaaaucccccgccgccccucuuucuccagccucgucacugcuagccgggggcaguggcagcagaccuaguccggagcaggccacugccaauuuuuuuaggguccuuuugcagcagcuccucuuaccucggcgaucauuggauuccccagcggcucuggcugaacguggcgcaagaaaugcacucggcggacaucaagaggcccccgaaagagaaaggagaagcgaagaaccacccaucucccuagaucucacauuucauuuguuacgugaagucuuagaaauggcaagagccgagcaacuggcucagcaagcucacucuaaccgaaaauuaauggagaucauugggaaauag

SEQ ID NO: 15156 - RNA, 591 nt, Artificial Sequence
  derived and/or modified sequence
augcgccugccgcugcuggucagcgccggaguccugcucgucgcacuguugccaugcccaccuugcagagcauuacucucaaggggacccgucccuggggcacgacaagccccccagcacccgcagccacucgauuucuuucagccuccuccacagagcgagcagccccaacagccacaggcccgcccaguacuacuucggaugggugaggaguauuuucugcgccuagggaacuuaaacaagucaccugcagccccuuugucaccagcauccucacuuuuggcuggcggaucuggaaguagaccuaguccggagcaggccacugccaauuuuuuuaggguccuuuugcagcagcuccucuuaccucggcgaucauuggauuccccagcggcucuggcugaacguggcgcaagaaaugcacucggcggacaucaagaggcccccgaaagagaaaggagaagcgaagaaccacccaucucccuagaucucacauuucauuuguuacgugaagucuuagaaauggcaagagccgagcaacuggcucagcaagcucacucuaaccgaaaauuaauggagaucauugggaaauag

SEQ ID NO: 15157 - protein, 144 aa, Artificial Sequence
  derived and/or modified sequence
MWLQSLLLLGTVACSISAPARSPSPSTQPWEHVNAIQEARRLLNLSRDTAAEMNETVEVISEMFDLQEPTCLQTRLELYKQGLRGSLTKLKGPLTMMASHYKQHCPPTPETSCATQIITFESFKENLKDFLLVIPFDCWEPVQE

SEQ ID NO: 15158 - DNA, 578 bp, Artificial Sequence
  derived and/or modified sequence
gggaaataagagagaaaagaagagtaagaagaaatataagagccaccatgtggctccagtcacttttgttgcttggaacggtcgcatgctccatctcggcaccagcgcggtccccctcgccgagcacgcagccttgggaacatgtgaacgctatccaagaagcgaggagacttctgaatctgtcacgagatacagcggccgagatgaacgaaactgtagaggtcatctcagagatgtttgaccttcaagagcccacatgtctccagacccgcctggaactgtataagcaggggttgcggggatccctcaccaaattgaaaggtcccttgaccatgatggcctcgcactacaaacagcactgtccgccgacgcctgagacatcgtgcgcgacgcagattatcacttttgaaagcttcaaggaaaatctcaaggacttcctgctcgtgattccattcgattgctgggagcccgtgcaagagtgataagctgccttctgcggggcttgccttctggccatgcccttcttctctcccttgcacctgtacctcttggtctttgaataaagcctgagtaggaag

SEQ ID NO: 15159 - DNA, 435 bp, Artificial Sequence
  derived and/or modified sequence
atgtggctgcagagcctgctgctgctgggcaccgtggcctgcagcatcagcgcccccgccagaagccccagccccagcacccagccctgggagcacgtgaacgccatccaggaggccagaagactgctgaacctgagcagagacaccgccgccgagatgaacgagaccgtggaggtgatcagcgagatgttcgacctgcaggagcccacctgcctgcagaccagactggagctgtacaagcagggcctgagaggcagcctgaccaagctgaagggccccctgaccatgatggccagccactacaagcagcactgcccccccacccccgagaccagctgcgccacccagatcatcaccttcgagagcttcaaggagaacctgaaggacttcctgctggtgatccccttcgactgctgggagcccgtgcaggagtag

SEQ ID NO: 15160 - DNA, 435 bp, Artificial Sequence
  derived and/or modified sequence
atgtggctgcagagcctactgttactgggtactgtggcctgctcaatcagtgctccggccaggtctccttctccaagcactcagccgtgggaacatgtgaacgccatccaggaggccaggcggctcctaaacttgagtcgagacaccgccgccgagatgaatgaaaccgtggaagtcatttcagagatgttcgaccttcaagagcccacttgtctgcagaccagattggaactgtacaagcagggcttgcgagggtctctgacgaagcttaaaggaccacttaccatgatggctagtcactataaacaacactgtccacccaccccagagacaagttgtgccactcaaattatcaccttcgagagcttcaaggaaaaccttaaagatttcttactggttattcccttcgattgctgggagcccgtacaggagtag

SEQ ID NO: 15161 - DNA, 783 bp, Artificial Sequence
  derived and/or modified sequence
gtacacagagagaaaggctaaagttctctggaggatgtggctgcagagcctgctgctcttgggcactgtggcctgcagcatctctgcacccgcccgctcgcccagccccagcacgcagccctgggagcatgtgaatgccatccaggaggcccggcgtctcctgaacctgagtagagacactgctgctgagatgaatgaaacagtagaagtcatctcagaaatgtttgacctccaggagccgacctgcctacagacccgcctggagctgtacaagcagggcctgcggggcagcctcaccaagctcaagggccccttgaccatgatggccagccactacaagcagcactgccctccaaccccggaaacttcctgtgcaacccagattatcacctttgaaagtttcaaagagaacctgaaggactttctgcttgtcatcccctttgactgctgggagccagtccaggagtgagaccggccagatgaggctggccaagccggggagctgctctctcatgaaacaagagctagaaactcaggatggtcatcttggagggaccaaggggtgggccacagccatggtgggagtggcctggacctgccctgggccacactgaccctgatacaggcatggcagaagaatgggaatattttatactgacagaaatcagtaatatttatatatttatatttttaaaatatttatttatttatttatttaagttcatattccatatttattcaagatgttttaccgtaataattattattaaaaatatgcttcta

SEQ ID NO: 15162 - DNA, 435 bp, Artificial Sequence
  derived and/or modified sequence
atgtggctgcagagcctgctgctgctgggcaccgtggcctgcagcatcagcgccccagcccggagccccagccccagcacccagccctgggagcacgtgaatgccatccaggaggcccggcggctgctgaacctgagccgggacacagctgctgagatgaatgagaccgtggaggtgatcagcgagatgtttgacctgcaggagcccacctgcctgcagacccggctggagctgtacaagcagggcctgcggggcagcctgaccaagctgaagggccccctgaccatgatggccagccactacaagcagcactgcccccccaccccagagaccagctgtgccacccagatcatcacctttgagagcttcaaggagaacctgaaggacttcctgctggtgatcccctttgactgctgggagcctgtgcaggagtag

SEQ ID NO: 15163 - DNA, 435 bp, Artificial Sequence
  derived and/or modified sequence
atgtggctgcagagcctgctgctgctgggcaccgtggcctgcagcatttcagcgcccgcccgttcaccttccccctccacccaaccttgggaacatgttaatgccatacaggaggctagacggcttctcaatctgtccagggacactgcagccgaaatgaacgaaactgtggaggttatatcagaaatgttcgacctgcaagaaccgacctgtctacagacccgattggaactatacaagcaaggactgagagggtcgctcactaaattgaagggccctctgacaatgatggcaagtcattacaaacagcattgtcccccaaccccagagacgtcgtgtgctacccagatcatcacttttgagtctttcaaggagaatctgaaagatttcctgctcgtgattccctttgattgctgggaacccgtccaagagtag

SEQ ID NO: 15164 - DNA, 435 bp, Artificial Sequence
  derived and/or modified sequence
atgtggctgcaatcgttactccttctgggaaccgtggcctgtagcataagtgctccagctagaagcccttccccatccacccaaccatgggagcacgtgaatgctatccaggaggcccgacgcctcctgaatctgagtcgcgacactgcagccgagatgaatgaaaccgtggaagtgatcagtgagatgttcgatctccaagaaccaacttgcctgcagaccagattagagctgtataagcaggggctgagaggatcgctcacaaaacttaaaggtcccctaacgatgatggcgtcgcattacaagcaacactgtcctcctacccccgaaacatcgtgtgctacgcagatcattacattcgagagctttaaggaaaatctaaaagacttccttctcgttattcctttcgactgctgggagcccgtgcaggaatag

SEQ ID NO: 15165 - DNA, 435 bp, Artificial Sequence
  derived and/or modified sequence
atgtggctgcagtcacttctactccttggcaccgtcgcctgctctatatccgcccctgcacggtccccaagcccatcaactcagccatgggagcacgtgaacgcaatccaagaggccagaagactgttgaaccttagcagagataccgccgccgaaatgaatgagaccgtggaggtgatcagcgagatgttcgacttacaagaaccaacctgtctgcagacacgattggagctttacaagcaaggattacgaggctcactgacaaaactaaaaggacccctcaccatgatggccagtcattataagcagcattgtcctcccaccccagagaccagttgtgccacgcagattatcacttttgagagttttaaggaaaatctcaaagatttccttctggttattccatttgactgttgggagcccgttcaagagtag

SEQ ID NO: 15166 - DNA, 435 bp, Artificial Sequence
  derived and/or modified sequence
atgtggctgcagtcacttctactccttggcaccgtcgcctgctctatatccgcccctgcacggtccccaagcccatcaactcagccatgggagcacgtgaacgcaatccaagaggccagaagactgttgaaccttagcagagataccgccgccgaaatgaatgagaccgtggaggtgatcagcgagatgttcgacttacaagaaccaacctgtctgcagacacgattggagctttacaagcaaggattacgaggctcactgacaaaactaaaaggacccctcaccatgatggccagtcattacaaacaacactgccccccgacgcctgaaacttcttgcgctacacaaattatcacttttgagagttttaaagaaaatctcaaggattttttactggtaattccctttgattgctgggagcccgtacaggaatag

SEQ ID NO: 15167 - DNA, 432 bp, Artificial Sequence
  derived and/or modified sequence
atgtggctccagtcccttctccttcttggtaccgtcgcctgcagcatcagcgctccggcgagatcccctagcccgtcaacccagccatgggagcacgtgaacgctatccaggaagcccgtcggctgctcaatctctcgcgtgatactgccgcggagatgaacgagactgtggaagtcatatcggaaatgtttgatctccaagaacccacttgtctgcaaacgagactggaactttacaagcagggactccgggggtcactcaccaagctgaaaggaccactgactatgatggcgtcacattacaagcaacattgcccacccaccccggaaaccagttgtgcaacgcagattatcacgttcgaatcgtttaaggaaaacctgaaggacttcttgcttgtgattccctttgactgctgggagcctgtgcaggag

SEQ ID NO: 15168 - DNA, 432 bp, Artificial Sequence
  derived and/or modified sequence
atgtggctccagagtctactcttgctgggcactgttgcttgcagcatcagcgctcccgcaagaagtcctagcccctccacccagccatgggagcacgtcaatgctattcaggaagccagaaggctcctcaacctgagcagggacactgctgcggagatgaatgagacagttgaggtgatatctgagatgtttgaccttcaggaacccacctgcctccagactaggttggaactatacaagcaggggctgcgcgggagcctcactaagctcaaagggcctctgactatgatggcctcacattacaagcagcattgcccgcccacccccgagaccagctgcgcaactcagatcatcacatttgagagcttcaaagaaaaccttaaggattttcttttggtcatcccttttgactgctgggagcccgtgcaggag

SEQ ID NO: 15169 - DNA, 432 bp, Artificial Sequence
  derived and/or modified sequence
atgtggctgcagtcgctgctgctcctcggaaccgtcgcttgtagcatcagcgccccagcccgctcaccgagcccgtccactcagccgtgggagcacgtgaacgctatccaggaggcgcgacgccttctgaacctgtcacgcgacaccgccgccgagatgaatgaaaccgtggaagtgatctcggaaatgttcgacctgcaggaacctacttgcctgcaaacccgccttgagctttacaagcagggcctcaggggttcactcaccaaactcaaggggcccctcaccatgatggcgtcgcactacaaacagcattgcccacccacgcctgaaacgtcttgcgcgacgcagatcatcaccttcgaatccttcaaggagaaccttaaggacttcttgcttgttatccctttcgactgctgggaaccagtgcaggaa

SEQ ID NO: 15170 - DNA, 432 bp, Artificial Sequence
  derived and/or modified sequence
atgtggttgcaatctctcttgctgctggggaccgtagcttgtagcatctctgctcctgcccggtcaccctccccaagtacgcagccttgggagcacgtgaacgccattcaggaagctagacgactactgaatttgtccagggacacagcggccgaaatgaatgagactgttgaagtgatcagtgaaatgttcgatctgcaggaacccacatgcttgcaaacacgattagagctctacaagcaaggtctgagaggctcactcaccaaactgaagggcccgctgacaatgatggcctctcattacaagcagcattgcccaccaactccagaaactagctgcgccacccagattatcacgttcgagagctttaaagagaaccttaaagatttcctgttggttatcccattcgactgttgggagcccgtgcaagaa

SEQ ID NO: 15171 - DNA, 432 bp, Artificial Sequence
  derived and/or modified sequence
atgtggttgcagagtttgctattgctcggtactgtagcttgctcaatatccgccccagcgcggagccccagcccatcaactcagccttgggaacatgtgaacgctatccaggaggccagacggttgctgaacctttcaagggatacagccgctgagatgaacgaaaccgtcgaagtcatctccgagatgttcgatctgcaagagccgacctgcttacagacgcggctggagctctacaagcagggacttagggggtctctgacaaagctgaaaggccccctcactatgatggcctcccattacaagcagcactgccctcctaccccagaaacgtcatgtgccacccagatcatcacgttcgagtcattcaaggaaaatctgaaggacttcctgctggtcattccatttgactgctgggaacccgtgcaggag

SEQ ID NO: 15172 - DNA, 432 bp, Artificial Sequence
  derived and/or modified sequence
atgtggcttcaatcgcttctgctgctgggcacggtggcatgcagcatatcggcaccggcccgatctcccagtccatctactcaaccgtgggaacatgtgaacgcgatccaggaggcgcgccgcctgctcaatctctcaagagatactgcagcagagatgaacgaaactgtggaagttatatccgaaatgttcgacctgcaagagcctacttgtctccagacccggctggaactttacaagcaaggtcttagaggaagcctgaccaaactcaaggggccgcttaccatgatggcctcccactacaagcaacactgtccaccaacgcctgaaacgtcatgcgcaactcaaatcattaccttcgaatcatttaaggagaacctcaaggattttctgctggtgattccatttgactgttgggaacctgtccaagaa

SEQ ID NO: 15173 - DNA, 432 bp, Artificial Sequence
  derived and/or modified sequence
atgtggctgcagtcattgttattgctcggcaccgtcgcctgctcaatcagcgctccagcgagatcccccagtccatctacacagccctgggaacacgttaatgccatacaggaggctaggagattgcttaatttgagcagagatactgcggcagagatgaacgagactgtcgaggtgatctctgagatgttcgatctgcaggagccgacctgcctgcaaacacgcctggagctgtataaacagggcctgcgtggttccctgaccaagctcaaaggacctctgacaatgatggcatcccattataagcagcactgtcctcccaccccagagacatcttgtgcaactcaaattattactttcgaaagctttaaggagaatctcaaagacttcctgctggtgatacccttcgactgttgggagccagtccaggaa

SEQ ID NO: 15174 - DNA, 432 bp, Artificial Sequence
  derived and/or modified sequence
atgtggcttcaatcattactgttgcttggcacagtcgcatgctctatatccgcccccgcccgatcaccaagcccatcaactcaaccctgggaacatgtgaatgccatccaggaagcaagacgcctgctaaacctctctagagataccgccgccgaaatgaacgagacggtcgaagttatcagcgaaatgttcgatcttcaggaaccaacctgcctgcagacgagactcgaactgtacaagcagggattaagaggcagcctcacaaaattaaagggacctctgaccatgatggccagtcactacaaacagcactgccctccaactccggaaacaagttgcgccacacagatcattacatttgaaagcttcaaggagaaccttaaggacttcctactggtgatcccttttgactgctgggaacccgtgcaggag

SEQ ID NO: 15175 - DNA, 432 bp, Artificial Sequence
  derived and/or modified sequence
atgtggctccaatcgctgctcctcttgggcaccgtggcatgttccatctcggctccggccagatcgccttcgccgtccacccaaccgtgggaacatgtcaacgcgatccaggaagcacgccggcttcttaacctgtcaagggacaccgcggcagaaatgaatgagactgtggaggtgatttccgagatgttcgatctgcaagagccgacttgccttcaaactcggttggaattgtacaagcagggactcagaggtagccttaccaagttgaaagggccgctgaccatgatggcgagccactacaagcagcattgcccgccgacccctgagacttcctgcgcaacccaaatcattacgtttgaatctttcaaagagaacttgaaggacttccttctcgtcattccgttcgactgctgggaacccgtgcaagag

SEQ ID NO: 15176 - DNA, 432 bp, Artificial Sequence
  derived and/or modified sequence
atgtggctccagtccctattgctgcttgggacagtcgcctgttcaattagcgcgcccgcgagatcgccttccccgtcaacccaaccatgggaacacgtgaacgctatccaggaagctcgccggcttctgaacttgtctcgagatacagctgccgagatgaacgaaaccgtcgaggtcatatctgagatgttcgacctgcaagagccaacttgcctccaaactagactggagctttacaagcagggactacgcggcagcctgacgaaactgaaaggccctctaacaatgatggctagccattacaaacagcactgccctcctacccccgagacttcatgcgctacacagattatcacattcgagtcttttaaagagaaccttaaggattttttgttggtaatcccatttgactgttgggagcccgtccaggaa

SEQ ID NO: 15177 - DNA, 432 bp, Artificial Sequence
  derived and/or modified sequence
atgtggcttcagagtttactgctgctcggtaccgtggcctgctcaataagtgctccggccagatcaccatccccttctactcagccctgggagcacgtaaacgcgattcaagaggctaggcggctcctgaatctgagccgagataccgctgccgagatgaacgagacagtcgaggtgatctcagaaatgtttgacctccaggaaccaacttgtctgcagacccgcttagagttatataagcagggattgcggggatccttgacaaagctgaagggccctttgacaatgatggccagtcattacaaacagcattgcccgcctaccccagaaacctcatgcgccactcaaataattacatttgaaagctttaaggaaaacctgaaggacttcttgctggttattcctttcgactgctgggagccagtacaggaa

SEQ ID NO: 15178 - DNA, 432 bp, Artificial Sequence
  derived and/or modified sequence
atgtggctgcagagcctgctgcttctgggaaccgttgcctgctccattagtgcacccgccaggtcacctagcccgtccacacaaccatgggagcacgtgaatgcaatccaggaagccagaagactgcttaatctcagtagggacactgcagcagagatgaatgagaccgtggaggtaatttccgagatgttcgatctgcaggaaccgacctgtctgcaaactaggctggaactgtacaagcaggggctgcgcggcagtctaaccaaacttaaagggcctctaaccatgatggcaagccattacaaacagcactgcccacccacaccagaaacttcttgtgccacccagattatcacgttcgagtcctttaaagagaacttgaaggatttcttgctcgtgatccctttcgattgctgggaacctgtgcaggag

SEQ ID NO: 15179 - DNA, 432 bp, Artificial Sequence
  derived and/or modified sequence
atgtggttgcagagcctgcttctcctggggacggtggcatgctcgatctcggccccagctcgcagcccatccccttcaacccaaccatgggagcacgtgaatgccatccaggaagcacgccggctgctgaacctgtcccgcgacaccgcggcggagatgaatgagactgtcgaagtgatcagcgaaatgttcgatctgcaggaaccgacctgtctccagactagactcgaactgtacaaacaaggactgagaggatcgttgactaaactgaagggtccgctgaccatgatggcttcccattacaaacagcactgcccgccgacgcccgaaacctcctgcgcgactcagattatcaccttcgagtcgttcaaggagaatctgaaggacttcctgctggtgatcccgttcgactgctgggagccggtgcaggaa

SEQ ID NO: 15180 - DNA, 432 bp, Artificial Sequence
  derived and/or modified sequence
atgtggttgcagtccctactactgctcggcaccgtggcctgctccatctcagcccccgcgaggtccccaagtccatccacccaaccatgggagcatgtgaacgctatacaggaagcacggcggctcttgaatctttctagagacactgctgccgagatgaatgagacagtagaggtgatctcagagatgttcgacctccaggagcccacctgcctgcaaactaggctggagctgtacaagcaagggttgcgcgggtcgctcacgaagttgaagggacccctgaccatgatggcctcccactacaaacaacattgcccccctacccccgaaacttcatgtgccacacaaatcataacatttgagagttttaaagaaaacctgaaggattttctccttgtgataccctttgactgctgggagcccgtgcaggaa

SEQ ID NO: 15181 - DNA, 432 bp, Artificial Sequence
  derived and/or modified sequence
atgtggcttcaatctctgttgctcctggggacagttgcatgctccatatctgccccagctagatccccgtctccatctacacagccttgggagcacgtgaacgccatccaggaggccagaagacttttgaacttgtcacgcgatacggccgcagagatgaatgagactgtagaggtcattagtgaaatgttcgatctgcaggaacccacttgcctgcagacacggctggagttgtacaagcaaggcctgcgcggcagcctgaccaaactcaaggggccattgactatgatggctagtcactacaaacagcactgtccgcctactcccgaaacatcatgtgccactcaaataattaccttcgaatccttcaaggagaatctcaaggattttctgcttgtcatcccattcgattgttgggagccagttcaggaa

SEQ ID NO: 15182 - DNA, 432 bp, Artificial Sequence
  derived and/or modified sequence
atgtggctgcagtctcttctgctcctgggtactgtggcctgtagtataagcgcccccgcacgttcccccagcccgtctacccagccttgggaacacgtgaacgctatccaggaggcccggaggctcttaaacctttccagagatacggccgcggagatgaatgagacggtggaggtcatttcggagatgttcgatttgcaggagccaacctgcctgcagacccgcctggagctgtacaagcagggtcttcgtggtagcctaaccaagctcaaaggacccctgaccatgatggcctctcactacaagcagcattgccccccgactcccgagacgtcctgcgcgactcaaattatcactttcgagtcattcaaggagaacctcaaggacttcctgcttgtcatcccctttgattgctgggaacctgttcaggaa

SEQ ID NO: 15183 - DNA, 432 bp, Artificial Sequence
  derived and/or modified sequence
atgtggttacaatcgttactattattaggtacggtagcgtgttcgatatcggcgccggcgcgatcgccgtcgccgtcgacgcaaccgtgggaacatgtaaatgcgatacaagaagcgcgtcgactattaaatctatcgcgtgatacggcggcggaaatgaatgaaacggttgaagtaatatcggaaatgtttgatttacaagaaccgacgtgtttacaaacgcgtctagaattatataaacaaggtctacgaggttcgctaacgaaattaaaaggtccgctaacgatgatggcgtcgcattataaacaacattgtccgccgacgccggaaacgtcgtgtgcgacgcaaataataacgtttgaatcgtttaaagaaaatttaaaagattttttattagttataccgtttgattgttgggaaccggtacaagaa

SEQ ID NO: 15184 - DNA, 432 bp, Artificial Sequence
  derived and/or modified sequence
atgtggctacaatccctgcttttgctgggtaccgtcgcatgttccatcagtgcacctgctcgttccccttccccttctactcagccatgggaacacgtcaacgcaattcaagaggcgcgacgcctccttaatcttagccgagacacggctgcggagatgaacgagacagtggaagtcatatcagagatgttcgatctacaagagccaacatgtctacagacgcgcctggagttgtataagcagggcctacgtggttcgctgactaaactaaagggccccctcacaatgatggcatctcattataaacagcactgcccgcctacgcccgagacatcctgcgcgacacaaattatcacgttcgagtcatttaaagaaaatcttaaagacttccttctcgtcatcccctttgattgctgggagcctgtccaggag

SEQ ID NO: 15185 - DNA, 432 bp, Artificial Sequence
  derived and/or modified sequence
atgtggcttcagtcgcttctgcttttgggaactgtcgcatgtagcatatccgcaccagcgagatccccatcgccttcgactcagccttgggaacacgtgaatgccatccaagaagctcggcgcttgcttaatctgtcgagagatactgccgcagaaatgaacgaaactgtcgaagtgatctccgagatgtttgacctccaggaaccaacttgtttgcaaaccaggctggaactgtacaagcagggcctgagaggcagcctcactaaacttaaaggtccgttgaccatgatggcttcgcattacaagcaacattgtccaccaactcctgaaacctcgtgtgcaacccagattatcaccttcgagtccttcaaagagaatctgaaggattttctcctggtgatcccttttgattgttgggaaccggtgcaggaa

SEQ ID NO: 15186 - DNA, 432 bp, Artificial Sequence
  derived and/or modified sequence
atgtggcttcaaagtttgcttcttcttggtactgtggcatgtagtatttcagctcctgcaagaagtccttcaccatcaactcaaccatgggaacacgttaatgctatacaagaagctagaagattattaaatctctctagagacactgcagcagaaatgaacgagactgtagaagtcattagtgaaatgtttgacttacaagaaccaacttgtttacaaactagacttgaactttataaacaaggattgagaggatcattaactaaattaaaaggtcctttaactatgatggcttcacattataagcaacattgtccaccaacacctgagacttcatgtgcaacacaaatcattactttcgaatcatttaaagaaaatttaaaagattttcttcttgtaataccatttgattgttgggaaccagttcaagaa

SEQ ID NO: 15187 - DNA, 432 bp, Artificial Sequence
  derived and/or modified sequence
atgtggcttcaatctctgcttttactaggaacagtggcgtgttcaatatcagcacctgctcgctcaccttcaccgtcaacacaaccgtgggagcatgtgaatgcaatccaggaagcccggcgcctgttaaacttgagccgtgatacagctgctgaaatgaatgagacggtggaagttatctccgagatgtttgatcttcaggagccaacgtgtttgcagacacgccttgaactatataagcaaggacttcggggcagccttaccaagttgaaaggccccctgacgatgatggcgtcacattataaacagcactgtcctcctacaccggaaacgtcttgtgctacacaaattataacatttgagagttttaaagagaatttaaaagattttctgcttgtgattccttttgattgctgggaacctgtccaagaa

SEQ ID NO: 15188 - DNA, 432 bp, Artificial Sequence
  derived and/or modified sequence
atgtggcttcagtccttgctcttgcttgggaccgttgcttgctcgatctcggcacctgctcgaagccctagcccaagcacccagccctgggaacacgtcaatgccatccaggaagctcggagactgctgaatctcagtcgcgatactgcagctgagatgaatgaaaccgtcgaagtgatatccgagatgttcgacctgcaagagcctacatgcctccagacgcggctggagctgtacaagcaaggtctaaggggaagtttgactaaactgaaggggcctctgaccatgatggctagccattataaacagcattgcccacctaccccggagacatcctgcgccactcagataatcacattcgaaagttttaaagaaaatctgaaggattttttgctcgtgattcctttcgactgctgggaacccgtccaagaa

SEQ ID NO: 15189 - DNA, 432 bp, Artificial Sequence
  derived and/or modified sequence
atgtggttgcagagtctgttgctcttgggtacagtggcatgctccatctcagcccctgcaaggtctccctcaccttctacacagccatgggagcatgtaaacgcaatccaggaggcaagacggctgctgaacctttcccgggataccgccgcagaaatgaatgaaacagttgaagtcatttctgaaatgtttgatttacaggaacccacttgcctgcagacaaggctggagctctacaagcaggggttgagagggtcccttaccaagttgaaggggcccctgactatgatggcaagccactacaaacagcattgtccccccacccctgagacctcttgcgccactcagatcattaccttcgaatcatttaaagagaacttgaaggacttcttacttgtgattcccttcgactgctgggaacctgtgcaagag

SEQ ID NO: 15190 - DNA, 432 bp, Artificial Sequence
  derived and/or modified sequence
atgtggctccaatccctgcttctattgggtaccgtcgcctgcagtatcagcgcacccgcaagatcgccgtccccctccacccagccatgggagcacgtgaacgcaattcaggaggcccggcgcctgctgaacttgtctagggacactgccgccgagatgaatgagactgtggaggtcatctcagagatgtttgacctgcaggaacctacgtgccttcaaaccagacttgaactttataagcagggactaaggggttccctaaccaaactcaaagggcccctgaccatgatggccagccactataaacaacattgccctccaacaccagagacgtcatgcgctacgcagattattactttcgagtccttcaaggagaatcttaaggatttcctcctcgttataccattcgattgctgggaacctgtgcaggaa

SEQ ID NO: 15191 - DNA, 432 bp, Artificial Sequence
  derived and/or modified sequence
atgtggctgcagtcgctcctgctgctgggcactgtggcctgcagcatctctgcgccggctcggagcccatccccgtccactcagccttgggaacatgtgaacgctatccaggaggcccgccggctgcttaatctttcgagagacaccgcggctgagatgaacgagactgtcgaagtgatctccgagatgttcgacctccaagagccgacttgtttgcaaacccgcctggaattgtacaagcagggactgcgcggatcgctgactaaacttaaggggccgctgacgatgatggcctcccactacaagcagcactgtccgcccactccggaaacgtcatgcgctactcagatcattaccttcgagtccttcaaggagaatctcaaggattttctgctcgtgatcccttttgactgctgggagccggtgcaggag

SEQ ID NO: 15192 - DNA, 432 bp, Artificial Sequence
  derived and/or modified sequence
atgtggctccagtcccttttgctcctcggaactgtcgcatgtagcataagcgcacctgcccgctccccttccccaagtacccagccatgggagcatgtgaatgcgattcaggaggccagacgcctgctgaatttgtcaagagacaccgctgcagaaatgaacgaaactgtggaggtgatctcggaaatgttcgacctgcaagaacccacgtgccttcaaactagattggagctgtacaagcaaggccttcgggggagccttacgaaactcaaaggtcccctgactatgatggcatcccactacaagcaacattgccctcctacgccggaaacctcatgcgcaactcagataatcacgtttgaatcatttaaggaaaatcttaaggattttctcttggtgattccgttcgactgttgggaaccggtccaggaa

SEQ ID NO: 15193 - DNA, 432 bp, Artificial Sequence
  derived and/or modified sequence
atgtggcttcagagcctcttgctgctcggaactgtggcttgttccatttcagccccagcgcgctcgccatcgccgtctactcagccttgggagcacgtcaacgccatccaggaagcccggcgcctcctgaacctctcgagagacactgcagcagaaatgaatgagactgtggaagtgatctcagaaatgttcgacctccaggagccgacttgcctgcagacccgcctcgaactgtacaagcaaggtctgcgaggctcgctgactaagctgaagggaccactgactatgatggcatcgcattacaaacaacactgtccaccgactccagaaacgtcgtgcgctacccagatcatcacctttgaatctttcaaggagaatcttaaggatttcctgctcgtgatcccattcgactgttgggaacctgtgcaagaa

SEQ ID NO: 15194 - DNA, 432 bp, Artificial Sequence
  derived and/or modified sequence
atgtggctgcaatcgttgctgctgctcggtaccgtggcttgttccatctccgccccagcccgctccccatccccgtcgactcaaccgtgggagcacgtgaacgcgatccaggaagcccgcaggctgctgaatctgtcgcgggacacggcagctgaaatgaacgaaaccgttgaggtgatcagcgaaatgttcgacctgcaagaaccgacctgtctgcagaccagactcgagctgtacaagcagggcctgcgcggatccctgaccaagctcaagggcccgttgaccatgatggcctcgcattacaagcaacactgccctccgaccccagagacttcctgcgcgactcaaatcatcaccttcgagtccttcaaagaaaacctgaaggatttcctgcttgtgatcccgtttgactgctgggaaccggtccaggag

SEQ ID NO: 15195 - DNA, 432 bp, Artificial Sequence
  derived and/or modified sequence
atgtggttgcaatctttattattactcggtacagttgcatgttctattagtgctccagctagatctccatcaccatcaactcaaccatgggaacacgttaatgctatacaagaagcaagacgacttttaaatttatcaagagatactgcagctgaaatgaatgaaactgtagaagttatatctgaaatgttcgatttacaagagccaacatgtttacaaacacgtttagaactttataaacaaggacttagaggatcacttacaaaattaaaaggtccattaacaatgatggctagtcattataagcaacattgtccaccaacaccagaaacaagttgtgctactcaaataattacattcgaatcattcaaagaaaacttaaaagatttcttgttggtaattccatttgattgttgggaacctgtacaagaa

SEQ ID NO: 15196 - DNA, 432 bp, Artificial Sequence
  derived and/or modified sequence
atgtggttacagtccctgctccttttaggaactgtggcctgtagcatcagcgccccagccaggagtccatctccttcaacacagccctgggagcatgtgaacgcgatccaggaggctcgtcggctgctcaacttgagcagagatactgccgccgaaatgaacgaaacggtagaagttatttccgaaatgttcgacctacaggagccgacatgcctccagacccgccttgagctgtataaacagggtctgcgcggtagcctgaccaaactgaaggggcctctaaccatgatggctagccactacaaacaacactgccctcccacacccgagacaagctgcgcgacccagatcatcacattcgagtcgtttaaagagaatctgaaagattttctcttggtaattccgttcgactgctgggaacccgtacaagag

SEQ ID NO: 15197 - DNA, 432 bp, Artificial Sequence
  derived and/or modified sequence
atgtggctgcagtccctgctcctgttaggaacagtggcctgctctatatcagcgccagctagaagcccaagtccgtcgacccagccctgggaacacgtaaacgcgatccaagaagcgcggcgcctcctcaatcttagcagggatacagctgccgagatgaatgagacagtggaggtgatcagcgagatgttcgacctacaggagcccacatgcttgcagactagactggaattgtacaaacagggcctccggggcagcctgacaaaattaaaaggccctctgactatgatggcctctcactacaagcagcactgtcctcccacaccagagactagttgcgcgacccagataattacattcgagtccttcaaagagaatctgaaagatttccttttagtaattcccttcgattgttgggaacccgtccaagag

SEQ ID NO: 15198 - DNA, 432 bp, Artificial Sequence
  derived and/or modified sequence
atgtggctccagagcctacttctgttgggtaccgtagcttgtagtatttccgcacccgccagaagccccagcccctccacccagccgtgggaacatgtgaacgccattcaggaggctcgtaggctgcttaacttatcgcgagataccgccgctgagatgaatgagacagtggaggttatctcagagatgtttgacctccaggaacccacttgcttacaaacgaggctcgagctgtacaaacagggactgcgggggtccctgaccaagttgaaaggccctcttaccatgatggcttcccactataaacagcattgccctccaactcctgaaacctcctgcgcgactcaaataatcaccttcgagtccttcaaagaaaacctgaaggattttctgctggtgataccatttgattgttgggagcctgtgcaggag

SEQ ID NO: 15199 - DNA, 432 bp, Artificial Sequence
  derived and/or modified sequence
atgtggctgcagagtctgctactgttgggcactgtggcgtgctcgatttctgccccagctagatccccaagcccgagcacacagccctgggagcacgtcaatgctatacaagaagccagaagattgctgaatctctctagggatacagccgccgagatgaatgagacagtggaggtaatttcagagatgttcgatctgcaggagccaacttgcctgcagacacgcctggaattatacaaacaggggcttcgcgggtctctgacgaagttgaaagggcctctgacgatgatggcttcccactataagcagcattgccctccaacaccagaaacaagctgcgccacccagatcatcacattcgagagcttcaaggagaatctgaaggacttcctcttggtcatcccatttgattgctgggaaccagttcaggag

SEQ ID NO: 15200 - DNA, 432 bp, Artificial Sequence
  derived and/or modified sequence
atgtggctgcagagcctgttactgttaggcacggtcgcgtgtagcattagcgcgccggctcgcagcccatccccgagcacccaaccgtgggagcacgtgaatgccattcaggaagcaaggcgcttactgaacctttcccgtgataccgcagcggagatgaacgagaccgttgaggtaatttccgagatgtttgatctgcaggaacctacttgtctgcagacgcgtctggagctgtataagcagggtttgcgcggatcgttgactaaactgaagggacctctgaccatgatggcgagccactacaaacaacactgcccgcctactccagagacttcctgtgccactcaaattatcacgttcgagagcttcaaagagaacctgaaggatttcctgttggtcattccttttgattgttgggagcctgtccaagaa

SEQ ID NO: 15201 - DNA, 432 bp, Artificial Sequence
  derived and/or modified sequence
atgtggctgcagtcgctgctcctgttggggactgtggcttgctccatttcagccccagcaagatccccatcgccgtcaactcagccgtgggaacatgtgaacgcgatccaagaggcgagaaggctgctcaacctgtctcgagataccgcggccgagatgaacgaaactgtcgaggtgatttccgaaatgttcgacttgcaagagcctacctgtttgcagacgcgcctcgaactgtacaagcagggccttcggggatcgctcaccaagctgaaaggacctctcaccatgatggcctctcactacaagcagcactgcccgccgactccagagactagctgcgcgacccagatcatcactttcgagtcgtttaaggaaaatctcaaagatttcttgctcgtgatcccattcgattgctgggaaccggtccaagag

SEQ ID NO: 15202 - DNA, 432 bp, Artificial Sequence
  derived and/or modified sequence
atgtggctccagtctctacttttgttgggtaccgtcgcttgctccatctctgcccccgcccggtcgccatcgcctagtacccagccctgggagcacgtgaacgctatccaagaggctcggcgcctcctgaacctgtccagggacactgctgccgagatgaacgagaccgtcgaagtcatttcagagatgttcgacttgcaggagcccacatgccttcagacgcgcttagagctttataagcaggggctgaggggctcacttactaagttgaagggaccgctcactatgatggcttctcactacaagcaacattgtcccccgaccccggagacatcgtgcgcaacacagatcatcaccttcgagtcgtttaaggaaaaccttaaggatttcttgctggtcatcccttttgattgttgggagcccgtgcaagag

SEQ ID NO: 15203 - DNA, 432 bp, Artificial Sequence
  derived and/or modified sequence
atgtggctccaaagcctgcttctcctgggaaccgtggcttgcagcatttccgcgccggctagatccccatcgccgtcaacgcaaccttgggagcacgtgaacgccatccaggaggcgcggcggctgctcaatttgtctcgcgatactgcagccgaaatgaacgaaactgtggaagtgatctccgaaatgtttgacttgcaggaaccgacctgcctgcagaccaggctggaactgtacaagcagggactccgcggctcgctgaccaaacttaaggggccactgaccatgatggccagccattacaagcagcactgccctcccactccggagacttcatgcgcaactcaaatcatcaccttcgaatcgttcaaggagaacctcaaagacttcctgctggtcatcccgttcgattgttgggagccagtccaggag

SEQ ID NO: 15204 - DNA, 432 bp, Artificial Sequence
  derived and/or modified sequence
atgtggctccagtccctgttgcttcttgggactgtggcatgcagtatatctgccccagctagatccccatccccttccacacagccctgggaacatgttaacgcaatacaggaagctcggcgattgcttaacctttctcgggatactgcagccgaaatgaatgaaactgtggaggtaataagtgagatgttcgatctgcaggaacccacttgcctccagacacggcttgaattatataaacaggggctgagaggaagtctaacaaaactgaagggacctctcacaatgatggccagtcactataaacagcattgtccgcctactcccgaaacatcttgtgccacacagataataacttttgaatcctttaaagaaaacctaaaagattttctcctcgtgatcccttttgattgctgggaacccgtacaggag

SEQ ID NO: 15205 - DNA, 432 bp, Artificial Sequence
  derived and/or modified sequence
atgtggcttcagagcctgctgctcctgggtacagttgcgtgtagcatatcagcccccgcacggtcgccctcaccaagtacacagccctgggaacacgtaaacgcaattcaggaggcccgtagattgctaaacctctctcgggacacagctgcagaaatgaacgagaccgttgaggtgataagtgaaatgttcgaccttcaagagccgacgtgcctgcagacccgcctggaactgtacaagcagggactgcgcggatctcttacgaagctaaaggggcctctgactatgatggccagtcattataagcagcactgtccccccacacccgaaacgtcttgcgccacccagatcatcacgtttgagtcgttcaaggaaaatctgaaggacttcttactcgtcatcccatttgactgttgggagcctgtgcaggag

SEQ ID NO: 15206 - DNA, 432 bp, Artificial Sequence
  derived and/or modified sequence
atgtggctgcagtctttactgttactgggtactgtggcttgctccatctctgcacccgctcggtctccatcccccagcacccaaccttgggaacacgtgaatgctatccaggaggccagaagactgttgaatctatccagggacacggcagctgagatgaatgagacggttgaggtgatttctgagatgtttgatctgcaagagcctacatgcttacagaccagactggaactgtataagcagggacttcggggcagcctgacaaaactgaagggtccacttacgatgatggccagccattataagcagcactgcccccccacgcctgaaacctcctgcgcgacccagatcatcactttcgaatcgttcaaagagaaccttaaggactttctcttggtgatacctttcgattgctgggagcccgtgcaggag

SEQ ID NO: 15207 - DNA, 432 bp, Artificial Sequence
  derived and/or modified sequence
atgtggctccagtcactcctcttgttgggaaccgtggcgtgctcgatatccgctccggcccggagcccttcgccatcgactcaaccgtgggaacacgtcaacgcaatccaggaggcgaggcggctgctgaatctttcccgggacaccgcggcagagatgaatgaaactgtcgaggtgatttccgaaatgttcgatctgcaggagcccacgtgcctccagacccgcctggagctctacaagcaagggctcagggggtcactgactaagctgaagggtccgcttaccatgatggcttcccattacaagcagcactgcccaccgacgccagagacgtcttgtgccactcagatcatcactttcgagtcgttcaaggaaaatctgaaagactttctcctggtgattccctttgattgctgggagcctgtgcaagag

SEQ ID NO: 15208 - DNA, 432 bp, Artificial Sequence
  derived and/or modified sequence
atgtggttgcagtcactgctcctgcttggaacggtggcgtgctctatatcagccccggcacgatcgccatctccgtcaacacagccgtgggagcacgtgaatgctatacaggaagcacgtcggctgctaaatctctcacgggacaccgccgccgagatgaacgaaacagtcgaggtgatttctgaaatgttcgatctgcaagagccaacatgtctccagacaagactagagctgtacaaacagggcctacgcggatccctcacgaaactgaaaggccctctcaccatgatggctagtcactacaaacagcattgccccccgacccccgaaacgtcatgcgcaactcaaatcatcactttcgaaagttttaaagaaaacttgaaggatttcctgcttgtgatcccatttgattgctgggaacctgtgcaagag

SEQ ID NO: 15209 - DNA, 432 bp, Artificial Sequence
  derived and/or modified sequence
atgtggctgcaatcactgcttttgctgggcactgttgcttgtagcatatcggctccagcacggagcccatccccttccacgcagccatgggagcatgtgaatgctattcaggaagcacggcgactcctgaacttgagcagagatacagctgctgaaatgaacgaaacagtcgaagtgatctccgaaatgtttgatctacaagagcctacatgccttcaaacaaggctggaattgtacaaacaaggtctgagaggttcactaacaaaattgaagggaccacttaccatgatggcttcacattataaacaacattgtccaccaactccagagacttcgtgtgcgacacaaattataacgtttgaaagtttcaaagaaaaccttaaggactttttgttagtgatcccatttgattgttgggagccagtacaagag

SEQ ID NO: 15210 - DNA, 432 bp, Artificial Sequence
  derived and/or modified sequence
atgtggctccagtcactgctactgttaggcacagtcgcatgttcaatcagcgccccagcaagatccccctctccaagtacacagccttgggagcatgtgaacgccattcaggaggctagacggctgctaaacctatctagggataccgctgccgagatgaacgagacagtggaggtcatctccgaaatgttcgatctccaggaaccaacatgtctgcaaacccgtctggagctttataaacagggactgaggggatcactgacaaagctcaagggacctctgacaatgatggccagccactataaacagcattgccctcccactccggaaactagctgcgcaacccagatcatcacgtttgaaagtttcaaggaaaacctgaaagacttcctcctggtgattccatttgactgttgggaacctgtccaggaa

SEQ ID NO: 15211 - DNA, 432 bp, Artificial Sequence
  derived and/or modified sequence
atgtggcttcaaagtctgctgttgctgggcacagtagcttgttcaattagcgcccctgcacgtagccctagccccagtacccagccttgggaacatgtaaacgccatccaggaggccagaaggctgctgaacctgtccagggacactgccgccgagatgaatgagactgtggaggtaatctccgaaatgttcgacttgcaggagccaacttgtctccaaactagattggagctgtataaacagggcctgaggggatccctcaccaaattgaaaggcccactgacaatgatggcctcccactacaagcagcactgccctcccactccagagacatcctgcgctacccagatcatcacttttgagagcttcaaggagaatctgaaagatttcttgctcgtgattccctttgattgctgggagccagtccaggag

SEQ ID NO: 15212 - DNA, 432 bp, Artificial Sequence
  derived and/or modified sequence
atgtggctgcagagcctgctccttctcggaactgtagcttgttctatctccgcgcccgctcgcagtccctctccgagtacccagccctgggaacacgtgaatgccatccaggaggcacggaggctgctcaatctgagtcgggataccgccgccgagatgaatgagaccgtggaggtgatatccgaaatgtttgacctgcaggagccaacttgtctacagactcggctggaactgtacaaacaggggctccgagggagtctgacaaagctcaaaggccctctgacaatgatggcgagccactataagcagcactgtccacctacccccgaaacatcttgcgccacacaaattattacattcgaaagcttcaaggaaaatctcaaggactttctgctggttataccctttgattgttgggaacccgtgcaggaa

SEQ ID NO: 15213 - DNA, 432 bp, Artificial Sequence
  derived and/or modified sequence
atgtggttgcagagcctgctgctcctgggcacagtggcgtgttccatcagtgcccctgctaggagtccgagcccaagcacacaaccctgggaacacgtgaatgctatccaggaagccagacgcctattaaatctgagtagggacacggcagccgagatgaacgagacagtggaagtgatctccgaaatgttcgacctacaagagcctacttgtctccagactagactggaactgtacaagcagggcctgagaggctccctgacaaaactaaagggaccactaaccatgatggccagccactacaagcagcactgcccgcccacgccagaaacatcatgcgccacccagattatcacgttcgagagctttaaagagaacttaaaggatttcctcttggtgattccattcgactgttgggagcctgtgcaggaa

SEQ ID NO: 15214 - DNA, 432 bp, Artificial Sequence
  derived and/or modified sequence
atgtggcttcaaagcctcctgctcctgggcaccgtcgcatgttcgatctctgcaccagcacgcagccctagcccatcgactcagccatgggaacacgtgaacgccatacaggaagcgaggcgtctcctcaacctctcacgagataccgctgcagaaatgaatgaaactgtggaggtgatctcggaaatgtttgacctgcaagagcctacttgccttcagacccgtcttgagttgtataagcaaggacttcgcggtagcctgactaagctgaaggggccacttactatgatggcctcccattacaagcaacattgtccccctaccccggaaacctcgtgcgcgacccagataatcacctttgaatcctttaaggagaacctgaaggatttcctgcttgtgataccttttgattgttgggagcctgtgcaggag

SEQ ID NO: 15215 - DNA, 432 bp, Artificial Sequence
  derived and/or modified sequence
atgtggctgcagtcactgctgttgctgggtacagttgcttgttccatcagcgccccagcaagaagtccatctccttctacccaaccttgggagcacgtgaacgcaatacaggaggccaggaggcttcttaatctctcgcgtgatactgctgccgagatgaatgagaccgtggaggtgatttccgagatgtttgacttacaggaacccacttgtctgcagactcgtcttgagctctacaagcagggcctcagaggaagtctcaccaagctaaagggtcctctgacgatgatggcaagccactataagcaacactgtccacctaccccagagacaagttgtgccacccagatcataacatttgagtcattcaaggagaatctcaaggattttctcctggtcatcccgtttgactgttgggaaccagtgcaagag

SEQ ID NO: 15216 - DNA, 432 bp, Artificial Sequence
  derived and/or modified sequence
atgtggctgcagtcactgctgctgcttggcacagtcgcttgttcaatttccgcgcccgcgcggagtccctctccaagcacccaaccctgggaacacgtcaacgccatccaggaggctcggaggctcctcaatcttagtagggacactgccgcagaaatgaacgaaactgtcgaggttatatccgagatgttcgacttgcaggagccaacatgcctccagacacgcctggagctctacaaacagggcctgagagggagcctcactaagctgaaggggcccctgactatgatggctagccactataagcagcactgcccaccgactccagagacatcctgtgccactcaaatcatcaccttcgaaagtttcaaggagaacctgaaggattttcttctggtgataccattcgactgttgggaaccagtgcaagag

SEQ ID NO: 15217 - DNA, 432 bp, Artificial Sequence
  derived and/or modified sequence
atgtggttgcaatctctgctcctgctgggaaccgtcgcctgctctatcagcgcgcccgcaagaagtccgtccccgagcacccagccatgggagcacgtgaatgccatccaagaggcgcggcggttattgaatctgagtcgggatactgccgccgagatgaacgaaactgtggaggtaattagcgagatgtttgatttacaggagcctacctgccttcaaacacggctggaactgtataagcagggccttaggggtagtctgaccaaattgaaaggccctctcacgatgatggcttcccattacaaacaacactgtccaccaacccccgagacctcatgtgctacacagatcatcacatttgagagctttaaggaaaatcttaaggacttcctgctagttattcccttcgactgttgggaacccgttcaggag

SEQ ID NO: 15218 - DNA, 432 bp, Artificial Sequence
  derived and/or modified sequence
atgtggttgcagtccctattgctgctcggtaccgtggcctgtagcatatctgccccagccaggtctccatctccgtcaacccaaccctgggagcatgtaaatgccattcaggaagcccgtcggttacttaatctgtcccgcgacactgccgcggagatgaatgaaaccgtggaggtgataagcgaaatgttcgacctgcaggagcccacctgtctacagaccagactggaattgtacaaacagggtttgcgaggttcactgacgaagctgaaagggccattgacaatgatggcatcccactacaagcagcactgcccgccaacgccggagactagctgcgccacacaaatcatcacattcgagtctttcaaggagaatttaaaagatttcttgctggtcatcccgtttgactgctgggagccagtccaggag

SEQ ID NO: 15219 - DNA, 432 bp, Artificial Sequence
  derived and/or modified sequence
atgtggctgcaatcccttctgcttcttggaaccgtggcatgcagcatcagcgcacctgcacgctcacctagccctagcactcagccgtgggagcatgtgaacgccattcaggaggcgcggcggctgctcaacttgtcgagagataccgcagccgaaatgaatgaaaccgtggaagtcatctccgaaatgttcgatctccaagagccaacgtgtctgcaaacgaggttggaactgtacaagcaaggccttcgcgggagcctcaccaaacttaaaggtcctctgactatgatggcgtcgcactacaagcaacactgccccccaacgcccgaaacctcatgtgcgacccagatcatcaccttcgaatccttcaaggaaaacctgaaggatttccttcttgtcatcccttttgattgctgggagcctgtccaggaa

SEQ ID NO: 15220 - DNA, 432 bp, Artificial Sequence
  derived and/or modified sequence
atgtggctacagagcttactgctgctgggcacagttgcatgcagcattagcgccccggcccggtcaccaagtcctagcactcagccatgggagcatgtgaatgctatccaggaggcacgaaggcttctgaatttgtctcgagacacagctgccgaaatgaatgagactgtggaagtgatcagcgaaatgtttgacctgcaagaacccacttgcctgcagactcggcttgagctatacaaacagggcctgcggggctctctaacgaagctgaaggggcctctaacaatgatggccagccattacaagcagcactgtccccccacacctgaaaccagttgcgcaacccagatcatcacatttgaaagtttcaaagagaatctaaaggacttcctcctggttattccgttcgattgttgggagccagtgcaggag

SEQ ID NO: 15221 - DNA, 432 bp, Artificial Sequence
  derived and/or modified sequence
atgtggcttcagagtctcctgctgttaggaacagtggcttgtagcatctcagcgcccgctcgcagcccatctccaagcacacaaccatgggagcacgtgaacgccatccaggaggctcggaggcttctcaacttatcccgggatactgctgccgagatgaatgagactgtggaggtgatttccgagatgttcgatttgcaggaacccacttgtctccagaccaggcttgaactttataaacagggacttcggggcagcctcactaaacttaaagggcctctgacaatgatggcttcacactataaacagcattgcccgccgacaccagagacatcctgcgccactcagatcatcaccttcgaatctttcaaggagaaccttaaagatttcctcctcgtgatcccgttcgattgttgggaacccgtgcaggag

SEQ ID NO: 15222 - DNA, 432 bp, Artificial Sequence
  derived and/or modified sequence
atgtggcttcagtccctcctgttgctggggaccgtggcatgttctatttccgcccctgctcggagcccctccccctctacccagccttgggagcatgtgaacgccatccaagaggcgcgacggcttttgaatctaagcagggacacggctgcggagatgaacgaaactgtggaggtcatttcagagatgttcgacctgcaggagccgacatgtctgcagaccaggttggaactgtataagcagggactaaggggtagcctcaccaaacttaaagggccgttgactatgatggcatcccattataagcagcactgtcctcctacccctgagacatcttgcgctacccagataatcacatttgaatcatttaaagagaacctgaaagattttcttctagttatccccttcgactgctgggagccagttcaggaa

SEQ ID NO: 15223 - DNA, 432 bp, Artificial Sequence
  derived and/or modified sequence
atgtggctgcaaagcttgcttctgctcggcacagtggcatgtagtataagcgctcctgccaggtctccatcaccatctacacagccatgggaacatgttaacgcaatccaggaagctcggcgtctgcttaacttgtcccgcgataccgccgccgaaatgaatgagacagtggaagttatctcagaaatgtttgatcttcaggagcccacatgcttgcagactaggctggagctctataagcagggtcttagaggatcccttacgaagttaaagggacccctgaccatgatggcatcacactataaacaacactgccctccgactccagagacatcttgcgccacacagatcattaccttcgagagtttcaaagaaaacctgaaggacttcttactcgtcatcccatttgactgttgggagcctgtgcaggag

SEQ ID NO: 15224 - DNA, 432 bp, Artificial Sequence
  derived and/or modified sequence
atgtggcttcagtctctcttactgcttggcacagtggcatgctccatcagcgccccggcacggagtcccagcccgtctacacaaccttgggagcacgttaacgccatccaggaggctcgtagactgcttaatctcagtcgggataccgcggctgagatgaatgagactgtagaagtaattagcgagatgttcgacctccaagaaccaacatgccttcagacccggttggagctctataaacagggtctgaggggatctctcacgaagttgaaaggccctctgacaatgatggcgtctcactataaacagcactgcccccctacccccgagacctcatgcgccactcagatcattacctttgagtccttcaaagagaaccttaaggatttcctgctcgtgatcccattcgattgctgggagccggtgcaagaa

SEQ ID NO: 15225 - DNA, 432 bp, Artificial Sequence
  derived and/or modified sequence
atgtggctgcagtcgctgctgttgctcggaaccgtcgcttgctctatctccgcgcctgcaagatccccaagcccgtcaacccagccgtgggaacacgtgaatgcaatccaggaggcgcggcgccttctgaacctgagccgggacaccgccgctgagatgaacgaaacggtggaagtgattagcgagatgttcgatctgcaggaaccaacttgcttgcagaccaggctcgagctctacaagcaaggactgcgcgggtcgctcactaagctgaaaggcccgctcaccatgatggcctcacattacaagcaacactgcccgccgactcctgaaacctcctgcgccactcaaatcatcactttcgagtcgttcaaagaaaacctgaaggatttccttctggtgatcccatttgactgttgggaacccgtccaggag

SEQ ID NO: 15226 - DNA, 432 bp, Artificial Sequence
  derived and/or modified sequence
atgtggcttcagtcacttctgcttttggggaccgtggcctgctccatcagcgcccctgcacggtcaccctcgccatcaacccagccttgggaacacgtgaatgcaatccaggaggcaaggcgactgctgaacctttcgcgagacaccgcagcagagatgaacgaaactgtggaagtgatatccgagatgtttgatctgcaggaacccacctgcttgcagactagactggagctgtataaacaaggcctcaggggatcgcttaccaaactcaagggccccctgacgatgatggcatcccattacaaacaacattgtccaccaacccctgagacttcttgtgcaacgcagataatcacttttgagtcattcaaagaaaacctgaaagacttccttctcgtcatcccgtttgattgttgggaacctgtccaagaa

SEQ ID NO: 15227 - DNA, 432 bp, Artificial Sequence
  derived and/or modified sequence
atgtggctgcagtctctgctattgcttgggaccgtggcgtgcagcatcagcgcaccagcgcgcagtcctagtccctcgacacagccttgggaacacgtcaatgccatccaggaggctcgtcggctgctgaacctctcacgggataccgcagctgaaatgaacgaaacagtggaggttatatcagaaatgttcgacctacaggaaccgacatgtctacagactaggctcgagctgtataagcagggcctccgcggaagtctaacaaagctcaagggtccattgactatgatggcttcacattacaagcagcactgtcctcccactcctgagacaagctgtgccacacagatcataacttttgagagctttaaggaaaacctaaaggattttctgttggtaatcccttttgattgttgggaacccgtccaggag

SEQ ID NO: 15228 - DNA, 432 bp, Artificial Sequence
  derived and/or modified sequence
atgtggctgcagtccctgctgcttctggggacagtggcttgttcaatttccgccccagcgcgatctccaagcccctcaacgcaaccatgggagcacgtgaatgccatccaggaagcccggcgactactcaacttatcccgcgataccgccgcggagatgaatgaaactgtagaggtcataagcgagatgttcgacttacaggagccaacttgcctgcagacccggctagagttgtataagcagggccttcgagggtctctgactaagctcaagggacctctcactatgatggcctcccactacaaacaacactgcccacccacacccgagacaagctgcgcaacccagattatcacctttgagagttttaaagaaaacctgaaagatttccttcttgtaatcccattcgattgctgggagccggtgcaggag

SEQ ID NO: 15229 - DNA, 432 bp, Artificial Sequence
  derived and/or modified sequence
atgtggctgcagtccctgcttctccttggtaccgtcgcatgttcgatttccgctcctgctagaagcccaagcccatccacccaaccatgggagcacgtcaatgccattcaagaagcaaggaggcttcttaacttgtcccgtgacaccgcggcggaaatgaacgaaaccgtggaagtcatttcagaaatgttcgatctccaggagcctacctgtctgcaaacccggctggaactgtacaaacagggtctgcggggtagccttaccaagctgaaggggcctctcaccatgatggcatcgcattacaagcaacattgtccaccgactccagaaacttcatgtgccacgcagatcattacgttcgaatcgtttaaggagaacctcaaagactttcttctggtgatcccttttgactgctgggaacctgtgcaggag

SEQ ID NO: 15230 - DNA, 432 bp, Artificial Sequence
  derived and/or modified sequence
atgtggctgcaatcgctgttgctgctgggcaccgtggcatgttcaatttccgccccagccagaagcccatccccatcaacccagccatgggaacatgtgaacgccatccaggaggcacgccggctgctgaacctgtcccgcgacaccgcagcagagatgaacgagactgtggaagtgattagcgagatgttcgacttgcaggaacccacttgtctgcaaacccgacttgaactgtacaagcaaggacttaggggtagccttaccaaacttaagggaccacttaccatgatggcgtcccattacaagcaacattgtccacctacccctgagactagctgtgcgactcagatcattacctttgaatccttcaaggagaatcttaaggattttctgcttgtcattccgtttgattgttgggagcccgtgcaagag

SEQ ID NO: 15231 - DNA, 432 bp, Artificial Sequence
  derived and/or modified sequence
atgtggctgcagagcttgttacttcttggaactgttgcatgtagcatttcggcaccagcccgatccccatccccttcgacccagccttgggagcatgtcaatgcaattcaggaggcccgtcggcttctaaatttgtcgcgtgataccgccgctgagatgaacgaaaccgttgaggtcatctcagaaatgttcgatttacaagagccgacctgcttgcagacccgactcgagctgtataagcaaggcctccgtggttccttgacgaagttaaaaggacctctaacgatgatggcttcgcattacaaacagcactgtccaccgaccccagagacctcatgtgctacccaaatcattaccttcgagtcgttcaaggagaatttgaaagattttttgcttgtgattccattcgattgttgggagccagtccaggaa

SEQ ID NO: 15232 - DNA, 432 bp, Artificial Sequence
  derived and/or modified sequence
atgtggttgcagtccctgctgctgttgggcaccgtcgcctgcagtatttcagctcccgccagaagcccttccccctctactcagccatgggagcacgtgaatgcgatccaggaggcgaggaggttgctaaacctgagtcgagatacagccgccgagatgaacgagacagtcgaagtgatctcagaaatgtttgacctacaggaacccacatgtctccagaccaggctggagttgtacaaacaaggcctgaggggaagcctcacaaagctcaaaggcccgctgacaatgatggcgagccactataaacagcactgccccccaacccccgagacgtcttgcgcaacccagatcatcacctttgagagtttcaaagagaacttgaaggattttttgttagtgatcccctttgactgctgggagcccgtccaagaa

SEQ ID NO: 15233 - DNA, 432 bp, Artificial Sequence
  derived and/or modified sequence
atgtggctgcaatcgctgcttctgctgggcacagttgcgtgttcaatttcggcaccggctcgctctcctagtcctagtactcagccttgggagcacgtcaatgctattcaagaggcccgccgcctattgaatttgtccagagatactgcagcagagatgaacgaaacagtggaagtgatatctgagatgtttgacttgcaagaacctacctgtctgcagacaagattggaactctacaagcaagggctgagaggcagcctgaccaagctgaaggggccactgactatgatggcgtctcactataagcaacattgtccaccaaccccagaaactagctgtgctactcagataatcacttttgagagcttcaaggagaacctcaaggattttcttctcgtgataccctttgactgttgggaaccagtccaggag

SEQ ID NO: 15234 - DNA, 432 bp, Artificial Sequence
  derived and/or modified sequence
atgtggctccagtccctcctcctgctgggtaccgtcgcctgttccatttccgcacctgccagatctccttcaccttctacgcaaccatgggaacacgttaacgccattcaagaggccaggcgactcctcaacctttcaagggacacagctgcagaaatgaacgagaccgtggaggtcatatccgagatgttcgatctccaagaaccaacgtgtctacagacccgcttagaactgtacaaacagggtcttaggggttccttgaccaaattaaaaggccctctcactatgatggcttcacattacaaacagcattgccccccgacccctgaaacatcctgtgctactcagattataactttcgaatcgttcaaagagaacctgaaagacttccttttggtgatcccgttcgactgctgggagcctgtgcaagag

SEQ ID NO: 15235 - DNA, 432 bp, Artificial Sequence
  derived and/or modified sequence
atgtggctgcagtcactgctgttgctgggtactgttgcgtgtagcatcagcgcgcccgcccgctctccatctccttcaacgcagccttgggaacatgtcaacgcaatacaagaagcacggcggctcctaaatctgagccgggataccgctgcagaaatgaatgaaaccgtggaggtgatctccgagatgttcgacctgcaggaacctacgtgtctgcagacacgcctcgagctgtacaaacaaggtctgagagggtccttaacgaaactgaagggaccactgacgatgatggcctctcactacaaacagcattgtccgccgaccccggagactagctgtgcaacccagatcattacgttcgagagctttaaagaaaacctgaaagacttcctgctcgtaatccctttcgattgctgggaaccggttcaggaa

SEQ ID NO: 15236 - DNA, 432 bp, Artificial Sequence
  derived and/or modified sequence
atgtggctgcaatcactgctgctactggggaccgtggcctgctcaatatccgcccccgcccgcagtccgtcaccttccacacaaccatgggagcatgtgaatgcaattcaggaggcaagacgcctactgaatctgagtagagatactgctgctgaaatgaatgaaactgttgaagtgatctcggaaatgtttgatctccaggagcccacctgcctgcaaaccagactggaactctataagcagggcctccggggctcactgaccaaactcaagggtccactcactatgatggcctctcactacaagcagcactgcccgcccacacccgaaactagttgtgcaacacagatcatcacattcgagtctttcaaggagaacttaaaggatttcctgcttgttatcccgtttgattgttgggaacccgtgcaggag

SEQ ID NO: 15237 - DNA, 432 bp, Artificial Sequence
  derived and/or modified sequence
atgtggttgcagagcctgctgctgctcgggactgtggcctgttccattagtgcccctgctagatcgccctccccttcaacccagccatgggaacacgtgaatgcaattcaagaagcaagacgtctcctgaacctgagccgagatactgcagccgaaatgaacgaaaccgtggaagtcatttccgaaatgtttgatcttcaagaacctacttgccttcagacccggcttgagctctacaagcagggtttgcggggaagcctcaccaagctgaagggaccactcactatgatggcgtcccactacaaacaacactgtcctcccacccccgagacttcatgtgcaacccaaatcataactttcgaatcgtttaaggagaacttgaaggattttctgctggtgatcccattcgactgttgggagcctgttcaagaa

SEQ ID NO: 15238 - DNA, 432 bp, Artificial Sequence
  derived and/or modified sequence
atgtggctgcagtccctgctgctgctcggcacggttgcctgctcgatctcagcgcctgccagatccccgtccccgtccacgcagccgtgggaacacgtgaatgcgatccaagaagcacggcggctgctgaatctcagccgcgacaccgcagccgagatgaatgaaactgtggaagtgatctcggaaatgttcgatctgcaagaaccgacttgtctgcaaactaggctggaactctacaaacaggggctgagaggatcgctgactaagctgaaaggtcctctgactatgatggcctcgcactacaagcagcactgtccaccgacccccgaaaccagctgcgctactcagatcatcactttcgagagcttcaaggagaacttgaaggatttccttctggtgatccctttcgactgctgggagcctgtgcaggag

SEQ ID NO: 15239 - DNA, 432 bp, Artificial Sequence
  derived and/or modified sequence
atgtggctacagtcactactgctcctcggtacggtagcttgtagcataagcgcgcctgccaggtcgccctcgccatcaacccagccatgggaacatgttaacgccatccaggaggcgcggcgacttttaaatctctctcgggacactgccgctgagatgaacgagactgtcgaggtgatcagtgagatgtttgacctgcaagaacccacctgtctgcagacccggttggaactgtacaagcagggcttacgcgggtcgcttactaaattgaagggtccactcaccatgatggcaagccactataagcaacactgccctcctaccccagagactagctgcgccacacagattatcactttcgaatcgtttaaagaaaaccttaaggactttctcctagtgattcccttcgactgttgggaacccgtacaagag

SEQ ID NO: 15240 - DNA, 432 bp, Artificial Sequence
  derived and/or modified sequence
atgtggctgcagtccctcttgctgctgggcactgtagcttgctccatttcagcccctgcccgctcaccctccccctccactcagccttgggagcacgtgaatgctattcaggaggcccgcaggcttctgaatctgagtcgtgacacagccgctgaaatgaacgaaaccgtggaggtgattagcgaaatgttcgacctgcaagagcctacctgcctgcagacaaggttggagttgtataaacagggtcttcgcggctctcttacaaaacttaaaggacctcttacaatgatggccagtcactataagcagcattgccctcccacccccgagacttcctgtgctactcagatcattacatttgagagctttaaagaaaatctgaaggactttcttttggtcattccattcgattgctgggagcctgtacaggag

SEQ ID NO: 15241 - DNA, 432 bp, Artificial Sequence
  derived and/or modified sequence
atgtggctgcagtctctgctactgttgggtaccgtggcatgctctattagcgccccagcccggtccccatcaccttcaacccaaccctgggagcacgtcaacgccattcaagaggctagacgcttgctgaacctgtccagagacaccgcagccgaaatgaacgagaccgtcgaagtgatttccgaaatgtttgatctccaggaacccacatgcctacaaactcgattggaactgtacaagcagggactcagaggatctctgacaaaacttaaaggcccgctcacaatgatggcgagccactataagcagcactgcccccccacccctgagacctcttgtgccacccagatcattacctttgagtctttcaaagagaatctgaaagattttttattggtgataccttttgattgctgggagccagtacaggaa

SEQ ID NO: 15242 - DNA, 432 bp, Artificial Sequence
  derived and/or modified sequence
atgtggttacaatcgctattattattaggtacggtagcgtgttcgatatcggcgccggcgcgttcgccgtcgccgtcgacgcaaccgtgggaacatgtaaatgcgatacaagaagcgcgacgattattaaatttatcgcgagatacggcggcggaaatgaatgaaacggttgaagtaatatcggaaatgtttgatttacaagaaccgacgtgtttacaaacgcgtctagaactatataaacaaggtttacgaggttcgctaacgaaattaaaaggtccgttaacgatgatggcgtcgcattataaacaacattgtccgccgacgccggaaacgtcgtgtgcgacgcaaataataacgtttgaatcgtttaaagaaaatctaaaagattttctactagtaataccgtttgattgttgggaaccggtacaagaa

SEQ ID NO: 15243 - DNA, 432 bp, Artificial Sequence
  derived and/or modified sequence
atgtggttgcagtcactcctattattaggtacggtggcctgctctatctcggctccagcacggagtccgtcaccatccactcagccatgggagcacgtgaacgccatccaggaggctagacggctcctgaacctcagccgagacactgccgctgagatgaacgaaaccgttgaggtgattagtgagatgttcgacctccaggaaccaacatgtctgcagacccgcctcgaactgtacaagcagggtctccgaggatcactcaccaagcttaaaggacccttgacaatgatggctagccattacaagcaacactgtccccctactccagagacttcatgcgctacccagatcatcacattcgaatctttcaaggaaaatctcaaggattttctgctggtcatcccattcgattgctgggagcctgttcaagaa

SEQ ID NO: 15244 - DNA, 432 bp, Artificial Sequence
  derived and/or modified sequence
atgtggctccaatccttacttcttcttggaaccgttgcctgttcaatttctgcgccagcaaggtcgccatctccatcgactcaaccctgggaacatgtcaacgcaattcaagaggcccgtcgtttactaaatttgagtcgagatacagcggccgaaatgaatgaaacggtagaagttatttcagagatgttcgatttacaagagcctacttgcctgcaaacgcgtctagagctctataagcagggtctaagaggatctttgactaaattaaagggaccactgactatgatggcttcacattataagcaacactgtcctccaacaccagaaacatcttgcgctacacaaatcataaccttcgaaagcttcaaggaaaatctcaaggatttcctgcttgttattccttttgattgctgggagccagtgcaggag

SEQ ID NO: 15245 - DNA, 432 bp, Artificial Sequence
  derived and/or modified sequence
atgtggttgcagtcattactgctgctgggcactgtagcatgtagcatcagtgcccccgccagatccccaagtcctagtacgcagccatgggaacacgtgaatgcaatccaagaggcgcggagattgcttaacctgtcccgggacactgctgccgaaatgaatgagaccgtggaggttatcagtgaaatgttcgaccttcaagaacccacatgtctccaaactcggcttgaactgtacaagcaggggcttcgcgggtctcttaccaagctaaaagggcctctgactatgatggcatcccattataagcaacattgtccacctaccccagaaaccagctgcgcaacccagataattacctttgaatcgttcaaggagaacctgaaggactttttgttggtgattccattcgactgttgggagcccgtgcaggaa

SEQ ID NO: 15246 - DNA, 432 bp, Artificial Sequence
  derived and/or modified sequence
atgtggctgcaatcacttctgctgctgggcactgtggcctgttcaatcagcgcaccggccagatccccgtccccatcgacccagccatgggaacatgtgaatgcgatccaggaggcgcgcagactgttgaacctctcccgagacaccgctgcagagatgaacgaaactgtggaagtcatatcggaaatgttcgatctgcaagaaccaacttgcctccagacgcggctggaactctacaaacagggactgaggggttcgctcactaagttgaagggcccacttaccatgatggcctcgcactacaagcagcactgtccaccaactccggaaacctcctgcgcaacccagatcattactttcgaatccttcaaggaaaacttgaaggacttcctcctcgtgattccatttgactgctgggaaccggttcaggag

SEQ ID NO: 15247 - DNA, 432 bp, Artificial Sequence
  derived and/or modified sequence
atgtggttacagtccctgctgctattggggactgttgcgtgcagcatctccgctcccgcccgcagcccaagcccctccacccagccatgggagcatgtgaacgccatccaagaagcccgccgactcttaaatttgtcacgggacactgcagcagagatgaacgagaccgtggaagtgatcagcgagatgttcgatttacaggaaccaacctgtctacagaccagactggagctctacaagcagggattgcgcggatccttgactaagttgaaaggacccctcaccatgatggcctcccactacaaacagcactgtccaccaacccccgagacctcatgcgcgactcagataataacctttgaatcctttaaggagaatctgaaggattttttgcttgtcatccccttcgattgctgggagccggtgcaagag

SEQ ID NO: 15248 - DNA, 432 bp, Artificial Sequence
  derived and/or modified sequence
atgtggcttcagagtctgctcctgttgggtactgtcgcatgctcaatcagcgcccccgctcgaagtccctcaccttccacccagccttgggaacacgtgaacgcaattcaggaggctagaaggttgctcaatctgagtagagacacggctgccgagatgaacgagacagtagaagtaatctccgagatgtttgaccttcaggaaccaacatgtctgcaaacccgcttggagctctataagcaaggcctcagaggctctctcaccaagctgaagggtccgctcactatgatggcctcccactacaaacagcactgtcctcccacacccgagacttcctgcgctacccagatcatcacgttcgaatcattcaaggaaaatctgaaagacttcctgctggtcatacctttcgactgttgggagcctgtccaggag

SEQ ID NO: 15249 - DNA, 432 bp, Artificial Sequence
  derived and/or modified sequence
atgtggctccagagtctgctgctgctcggcacggtggcatgttccatctcggccccagcaagatctccatccccaagtactcaaccatgggaacacgtgaacgcgatacaggaggctcgccgcttgttgaatctcagccgcgacactgccgcggagatgaacgaaaccgttgaggttatctctgagatgttcgacctgcaggagcctacctgtctgcagactagattggaactgtataagcaaggattacgcggatctttgacaaaactgaagggccccctcactatgatggcctcccactacaaacagcattgcccacctacacccgaaacctcgtgtgcaacccagatcattacctttgaatcttttaaggagaaccttaaagactttctcttagtgattccttttgattgctgggaacctgttcaagag

SEQ ID NO: 15250 - DNA, 432 bp, Artificial Sequence
  derived and/or modified sequence
atgtggttgcaatccctcctgctgctgggaactgtggcatgcagcatctcagcgcccgcccggagtccgtcgccgtccactcaaccatgggagcacgttaacgccatccaagaagccagacggcttctgaatctgagtcgggacactgccgctgaaatgaatgaaaccgtggaggtgatcagcgaaatgtttgatctgcaggagccgacctgcctccagactcgcctcgagctttacaagcagggtttgaggggctccctgaccaagttgaaaggacctctcactatgatggcatcgcactacaaacagcattgtccgccgacgccggaaacgtcctgtgcgacccagattatcactttcgaatctttcaaggaaaacctgaaggactttttgctcgtgattccattcgactgctgggagccggtccaggaa

SEQ ID NO: 15251 - DNA, 432 bp, Artificial Sequence
  derived and/or modified sequence
atgtggctgcagtccctactgctgcttggaactgtagcgtgctccattagcgctccagcccgctccccttccccatccacgcagccgtgggaacacgtcaacgcgattcaggaagcacgaagattgttgaacctgtccagagacactgcagcagagatgaacgagacagtggaagttatttctgaaatgttcgatctccaggaacctacttgcctgcaaacccggttggaactttacaaacagggcttgagaggttctctgacaaagttgaaggggcccctaaccatgatggcatctcattataaacagcactgcccacctacccccgagacctcatgtgccacacaaattatcacgttcgagtcgttcaaggagaaccttaaagatttcctcttggtgatcccattcgactgctgggaacctgtgcaggaa

SEQ ID NO: 15252 - DNA, 432 bp, Artificial Sequence
  derived and/or modified sequence
atgtggctccagagcctcctcctcttggggaccgtcgcatgctctattagtgcccccgccagatctccttccccttcaacccagccttgggagcacgtgaacgctattcaagaggcccggcgcttgctgaatctgagtcgagacacagcagcggagatgaacgagactgtggaagtcatatctgaaatgtttgatctgcaggagccaacttgtctccagacccggctggagctctataagcaggggctgaggggcagcctgacgaagctgaaaggcccactgaccatgatggctagccattataagcaacattgtcccccaacacctgagacatcttgtgccacacagatcatcaccttcgagagctttaaggagaaccttaaggatttccttctggttatccccttcgactgctgggagcctgtgcaggaa

SEQ ID NO: 15253 - DNA, 432 bp, Artificial Sequence
  derived and/or modified sequence
atgtggttacagagcctgctgctgcttggcaccgtggcttgtagcatcagcgctccagcaagaagccccagtccaagtacgcagccctgggaacacgtgaacgcaattcaggaggctcgtagactcctgaacctcagcagagatactgcagctgaaatgaacgaaactgtcgaagtcataagtgagatgtttgatcttcaagaacccacatgtctgcagacccgcctcgaactctataagcagggccttcgcggtagtttaacaaagctgaagggcccactgacaatgatggcttcacactataaacagcattgtcctccaacacctgaaacatcatgtgctacacagatcattacattcgaaagctttaaagaaaacttgaaggactttcttctggtgatacctttcgactgttgggagcctgtgcaagaa

SEQ ID NO: 15254 - DNA, 432 bp, Artificial Sequence
  derived and/or modified sequence
atgtggctccaatccctgctcctcctcggtaccgtggcctgctcgatttccgccccggcacggtcgccttcgccgtccacccaaccgtgggaacacgtgaacgcgatccaagaagcgcggcgactgctcaacctctcccgcgacactgcggcggagatgaatgagactgtagaggtgatctccgaaatgttcgatctgcaggagcctacttgcctgcagacccgccttgaactctacaagcagggactgcggggttcattgactaaactgaaaggaccactgaccatgatggcctcacattacaagcagcactgccctccgacccccgaaacgagctgcgccactcaaatcatcacttttgagagcttcaaggaaaacctgaaggatttcctgctggtcatcccatttgactgttgggaaccagtccaggaa

SEQ ID NO: 15255 - DNA, 432 bp, Artificial Sequence
  derived and/or modified sequence
atgtggttgcagtcactgctattgctgggcaccgtcgcatgctctatcagcgccccagctagatccccaagcccctccacacagccttgggagcatgtgaatgccatccaggaggcacgacgcctgctgaatctgagtagagatacagctgccgaaatgaacgaaaccgttgaagtgatttccgagatgtttgaccttcaggagcccacctgtttgcagacacgcctcgagctgtataaacagggcctccgcggaagcctgaccaagctgaaggggccactgaccatgatggcatcgcactataagcagcattgtccacccacaccagaaacatcatgcgcaacacagattattacattcgagagtttcaaagagaacctgaaggatttcctgttggtcatcccattcgactgctgggagcccgtacaggaa

SEQ ID NO: 15256 - DNA, 432 bp, Artificial Sequence
  derived and/or modified sequence
atgtggctgcaatccctccttctcctgggtaccgtggcttgctcaatttccgcgccagcgaggtccccgagcccatcaacgcagccgtgggaacacgtcaatgctatccaggaagcacggagactgctgaacctctcgcgcgacaccgcggcagaaatgaacgaaactgtggaagtgatctccgagatgtttgatctgcaggagccgacgtgtttgcagacccggttggaactgtataagcagggactgcggggaagcctgaccaagttgaaggggccacttaccatgatggcctcgcattacaagcagcactgtccgcctacgccagaaacctcatgcgcgacccaaatcatcactttcgaatcattcaaagaaaatctcaaggactttttgctggtgattccatttgattgttgggagccggtgcaggaa

SEQ ID NO: 15257 - DNA, 432 bp, Artificial Sequence
  derived and/or modified sequence
atgtggttgcagagcctgctgctgctggggaccgtggcttgctccattagtgccccggccagatctccttcaccctctacacagccatgggaacatgtgaacgcaattcaggaggccaggagactgcttaacctttcccgggacaccgcagctgagatgaacgagactgttgaggtgatcagcgagatgttcgacctgcaagagcccacctgcctgcagacccggctggaactgtacaaacaggggctgcggggcagcctgacaaagctcaaagggcctttgactatgatggcgtctcattataagcaacactgcccacctacccccgagacttcttgcgcaactcagatcattacatttgaatcattcaaagagaatctcaaggactttctgctggtgatcccctttgactgctgggagcccgtccaggag

SEQ ID NO: 15258 - DNA, 432 bp, Artificial Sequence
  derived and/or modified sequence
atgtggttgcagagcctgcttctcctgggaaccgtcgcatgctcgattagcgcaccagcacgatcgccatcaccatccactcaaccgtgggaacacgtgaacgccattcaggaagcacgcagactgcttaacctctcaagagataccgcagcagaaatgaacgaaactgtcgaggtgatctccgagatgttcgacctccaagaacctacctgccttcagactcggctggaactgtataagcaaggacttagaggatcgcttacgaagttgaagggacctttgaccatgatggcctcccattacaaacagcattgtccccccacgcctgagacgtcctgcgcaacccaaatcattacttttgagtccttcaaagagaacttgaaagatttcctgctcgtgatcccttttgattgttgggagcctgtgcaagaa

SEQ ID NO: 15259 - DNA, 432 bp, Artificial Sequence
  derived and/or modified sequence
atgtggttgcagtcgcttcttcttcttggtactgtggcatgtagcattagcgctccagcaagaagcccttccccgtccacgcaaccatgggaacatgtcaacgcaatacaggaggcacgtcgactgctgaatttgtcgcgtgatactgccgcagaaatgaatgaaactgttgaggtgatttcggaaatgttcgacctgcaggagcccacctgcctgcagactcgcctggaactttacaagcagggacttagaggatcccttactaaactgaagggtcctctgaccatgatggcctcacactacaagcagcactgcccaccaactccagaaacttcctgtgcaacccaaatcatcacttttgaatcctttaaggaaaacctgaaagatttccttcttgtgatcccctttgactgttgggaacccgtgcaagag

SEQ ID NO: 15260 - DNA, 432 bp, Artificial Sequence
  derived and/or modified sequence
atgtggctccagagcctgctactcttgggaactgtggcatgttccataagcgccccagctaggagtccaagtccatcaacgcagccatgggaacacgtaaatgctattcaggaggccagacgcctcctgaacctgagtcgcgacaccgcagcagaaatgaatgaaaccgtggaggtcatatccgaaatgtttgatttacaagagccaacttgtctgcagactaggcttgaattgtacaagcaaggactcaggggatccctgacaaagctgaaaggtccactgactatgatggcctcacactacaagcaacattgcccccccactcccgaaacctcgtgcgccacccagattattactttcgaaagtttcaaagagaatctcaaagactttctgcttgtcatcccctttgactgttgggagccagtccaggaa

SEQ ID NO: 15261 - DNA, 432 bp, Artificial Sequence
  derived and/or modified sequence
atgtggctgcagagtttgctcctgttgggcaccgtggcttgcagtatctcagctcctgctcggtctccaagtccttctacccagccatgggaacacgtgaacgccatccaagaggcccgacgcttgttgaacttgagccgcgacacagccgccgaaatgaatgagacggtggaagttataagcgaaatgttcgatcttcaggaacctacctgcctccagacccggctggaactctataagcagggcttgcggggatctctgacaaaactcaaaggacctctgacgatgatggcctcacattacaaacagcactgcccacctaccccagaaaccagctgtgccacccaaataattaccttcgagtcatttaaggagaatcttaaagatttcttgctcgtgatcccttttgactgctgggaaccagtacaggaa

SEQ ID NO: 15262 - DNA, 432 bp, Artificial Sequence
  derived and/or modified sequence
atgtggttacaaagcttgctccttcttggcaccgtcgcttgctctatatccgccccagcaaggtctcccagcccaagtacacagccctgggagcatgtgaatgctatccaggaagccagaagactgttaaacttgagtagagacaccgccgctgaaatgaacgagactgtcgaggtcatcagcgaaatgttcgatctgcaagaaccaacttgccttcaaacccgcttggaactttacaagcaagggctgcggggtagcctgactaaacttaaaggcccgctcactatgatggcgtcccactacaagcaacactgcccacccacacctgagacctcctgcgcgactcagatcatcacatttgagagcttcaaagagaacctcaaggacttcctcttggttatcccttttgactgttgggagcccgtgcaggaa

SEQ ID NO: 15263 - DNA, 432 bp, Artificial Sequence
  derived and/or modified sequence
atgtggttacagtcattgctactcctcgggactgtggcgtgttccatttccgcacccgcgcgaagccccagtccttcaactcaaccttgggaacacgtaaacgccattcaggaggctcgcaggttactgaatctatctagagacacagctgcagaaatgaacgagacagtggaggtcatatctgaaatgttcgatctgcaggagcctacttgtctacagacccgattagaactatacaagcagggcctgcggggatctctcaccaagttgaaaggccccctcactatgatggcatcccactacaaacagcactgcccacctacgccggagacctcctgcgctacccagatcatcaccttcgagagtttcaaggagaatctgaaagactttctgctggtgatcccatttgactgttgggagcccgtgcaggag

SEQ ID NO: 15264 - DNA, 432 bp, Artificial Sequence
  derived and/or modified sequence
atgtggctccaatccctgctcctccttggcacagttgcatgtagcatttccgcccccgcacgaagtccttcaccgagcacccagccctgggagcacgttaatgcaatccaggaagcccggagactcctcaatctgtctcgcgacaccgccgccgaaatgaacgagactgttgaggtgatatcagaaatgtttgatctgcaagaacctacttgcctgcaaactcggctggaactgtacaagcaggggctgcggggctctctgacgaagttaaaagggcctctgaccatgatggcgagccattataaacagcactgccctccaaccccagagacgagctgcgccacccagattatcactttcgagagcttcaaggaaaacctgaaggactttttgttggtcatcccctttgactgttgggagcctgtgcaggaa

SEQ ID NO: 15265 - DNA, 432 bp, Artificial Sequence
  derived and/or modified sequence
atgtggttgcagtccctgctgctcttaggaactgtagcatgtagtatcagcgcgcctgctcgttcaccctcaccttcaacgcaaccttgggaacacgtgaacgctatacaggaggcgcggcgcttgctgaatctttcccgggacacagctgccgagatgaacgaaacggtcgaggtcatatccgagatgttcgacctccaagaaccaacctgtctccagaccagactagagctttacaaacagggcctgcggggcagcctcacaaagctcaaaggaccacttactatgatggcctcacattataagcagcactgcccacctacaccagaaacctcttgtgctacgcaaataataactttcgaaagtttcaaggagaatttaaaagatttcctgttggtaatcccctttgactgttgggagccagtgcaggag

SEQ ID NO: 15266 - DNA, 432 bp, Artificial Sequence
  derived and/or modified sequence
atgtggctccagtcactattactcctcggcaccgtggcctgttcgattagcgcccctgccagaagcccttccccttccactcagccgtgggaacatgtgaacgccatccaggaggctcggcgactgttaaatctatctcgtgatacagcagcagaaatgaatgagacagtggaggtgatcagtgagatgtttgatctgcaggagccaacatgccttcaaaccaggctggagttgtacaagcaaggactcaggggttccctgactaagctgaaaggacccctcacaatgatggcatctcactacaagcagcattgtcctcccacacccgagacctcgtgtgcaacccagatcatcacctttgaaagcttcaaggaaaacctcaaagattttctactggtcatcccttttgattgttgggaacctgtgcaagag

SEQ ID NO: 15267 - DNA, 432 bp, Artificial Sequence
  derived and/or modified sequence
atgtggttacaaagtctgctgttgctcgggactgtggcttgttccattagcgcaccggcccgaagtccttctcccagcacccaaccatgggagcatgtaaatgccattcaggaggcaaggcggttgctgaacctctctagggatactgccgctgagatgaacgagacggtcgaggtaataagcgaaatgtttgatttacaggaacctacatgtctgcagacgagactggagctgtacaagcagggcctgcgcggttctctgaccaagctgaaaggccctcttacaatgatggcctcgcactacaaacagcactgcccgcccaccccagaaacgagctgtgcgacacagatcataacctttgagtcttttaaggaaaacctgaaagattttcttctcgtcatcccttttgactgctgggagccagtgcaagag

SEQ ID NO: 15268 - DNA, 432 bp, Artificial Sequence
  derived and/or modified sequence
atgtggctccagagtttactgctattgggaacagtcgcctgctccataagcgccccagcccgctctccgagcccctcaacacagccctgggagcacgtaaacgcgatccaggaggcccgcaggcttcttaacctttcccgggacaccgccgccgaaatgaatgagacggtcgaggtcatctccgagatgtttgatctccaggaaccgacctgcctgcagacaaggctggaactgtacaagcaaggcttgaggggaagcctgaccaaactgaagggccccctgacaatgatggcttcacactataaacagcactgtcctccaactccggagacaagctgtgccacacaaattatcactttcgaatcctttaaagaaaacctgaaggactttctgttggttatcccttttgattgctgggagccagtacaagaa

SEQ ID NO: 15269 - DNA, 432 bp, Artificial Sequence
  derived and/or modified sequence
atgtggctgcaaagccttcttctgctcggaactgtcgcatgctctatttcagcacccgcgcgcagcccctcgccatccactcagccttgggaacacgtcaacgcaattcaggaagccaggagactgcttaaccttagcagggacaccgccgctgagatgaatgagacggtggaagtcatctcggaaatgttcgatcttcaagagcccacctgtctgcagacgcggctggaattgtacaagcaagggcttcgtggcagccttaccaaactcaagggtcctctgactatgatggcatcgcattacaaacagcattgtcctcctactcctgaaacctcgtgtgcaactcagattatcacctttgagtcctttaaggagaacctcaaggattttcttcttgttataccgttcgattgttgggagccggttcaagaa

SEQ ID NO: 15270 - DNA, 432 bp, Artificial Sequence
  derived and/or modified sequence
atgtggctgcagtcgctgctccttctcggaactgtggcctgctccatctcagcgccagcacgaagcccgtccccttctacccagccatgggagcacgtgaacgcgatccaggaagccaggcggcttctgaacctgagccgcgataccgcggctgaaatgaatgagactgttgaagtaatctccgagatgttcgacctccaagaacccacttgcttgcaaactcggctcgagctgtacaaacaggggctccgcggatccctcactaaacttaagggcccgttgaccatgatggcatcccattacaagcaacattgtcctccaacccctgagacgagctgcgccactcagatcatcacctttgagtctttcaaggaaaatctgaaggactttctgttggtgattccgttcgactgttgggaaccagtgcaggag

SEQ ID NO: 15271 - DNA, 432 bp, Artificial Sequence
  derived and/or modified sequence
atgtggctccagtctttactcctgctcgggactgtggcctgctcaatcagtgccccagctcgttcaccctccccctctacccagccctgggagcacgttaacgcgattcaggaggcaaggcggctcctaaacctgtcccgggacacggccgcagagatgaacgagaccgtcgaggtcatctctgagatgttcgatctgcaggagccgacatgcttacagacccggttagaactgtataagcagggactcaggggttccttgaccaagctaaagggtcctcttacaatgatggccagtcactacaagcagcactgtccccccacacccgagacgagctgcgccacccagatcatcactttcgagagctttaaagagaacctcaaagattttcttcttgttatccctttcgactgctgggagcctgtgcaggag

SEQ ID NO: 15272 - DNA, 432 bp, Artificial Sequence
  derived and/or modified sequence
atgtggctacaatccctgctcctcctgggaacggtggcttgttctatttcagctccggcccgaagccctagccccagcacgcagccctgggagcatgtaaacgccattcaggaggctcgccgccttctcaatctgagccgagatacagccgccgaaatgaatgagaccgtggaggtcatttccgagatgttcgatctccaggaaccaacatgtctccagacaaggctagagctgtacaaacagggcttaagagggagtctgacaaagttaaagggccccttgaccatgatggcttcccactacaagcaacactgccccccgacacccgaaacaagctgtgctacacagattattaccttcgaatccttcaaagagaacttgaaagatttcctgctcgtgatcccgtttgactgctgggaaccagtgcaagaa

SEQ ID NO: 15273 - DNA, 432 bp, Artificial Sequence
  derived and/or modified sequence
atgtggctacagagcctactgctgctagggactgtagcgtgctccataagcgcaccggccaggagccctagccccagcacccagccgtgggagcacgtcaatgcaattcaggaagctaggagacttttgaacttgtctagagacaccgccgctgagatgaatgaaaccgtggaagttattagcgagatgtttgatctccaagaacctacttgcttgcaaacccgactcgaactgtacaaacagggcctcaggggatcactgaccaagctgaaggggccccttacaatgatggcaagtcattataaacagcactgtcctcccacaccggagacctcctgcgcgactcagatcatcactttcgaatcttttaaagaaaatctgaaagacttcctgctcgtgattccttttgactgctgggagcctgtccaggag

SEQ ID NO: 15274 - DNA, 432 bp, Artificial Sequence
  derived and/or modified sequence
atgtggcttcagagccttctcctgctgggcaccgtcgcatgctcgatctctgcgcctgcgagatcaccgagcccttcaacccaaccgtgggagcacgtcaatgctattcaagaagccaggcggctgctgaacctctcgcgcgacactgccgccgagatgaacgaaaccgtcgaggtcatctcagaaatgttcgatctgcaggagccaacctgcttgcagactagactcgaactgtacaagcaaggcctgcgtggatcgctgaccaagctgaagggtccgctgactatgatggcgagccactacaaacagcattgcccgcctaccccggaaacctcgtgtgcaactcagataatcacttttgaatcgttcaaagaaaatctgaaggattttcttctggttatcccattcgactgctgggagcccgtgcaagaa

SEQ ID NO: 15275 - DNA, 432 bp, Artificial Sequence
  derived and/or modified sequence
atgtggctgcagagtctcctcttgcttggcactgtggcttgctctatatcggctccagccaggtccccctctccatcaactcaaccatgggagcacgtgaacgcgatccaagaggcccggcgactcctgaacttgtcccgagacaccgcagccgaaatgaacgaaaccgtcgaagtcatctccgaaatgttcgaccttcaggagccaacatgcctgcagactcgcctcgaactgtataagcaaggactcagaggttccctgaccaaactgaaggggcctctgacgatgatggctagtcattacaagcagcactgtcccccaacaccagaaacctcatgcgctacccagatcatcaccttcgaaagctttaaagagaacttgaaggacttcttgttggtcatcccctttgattgttgggagccggtccaggag

SEQ ID NO: 15276 - DNA, 432 bp, Artificial Sequence
  derived and/or modified sequence
atgtggcttcaatcactcctgctgctgggtacagtagcatgcagcatttcggcacctgctcgctcgccttcaccatcaacacagccgtgggaacatgtgaacgcgattcaagaggctcgacgtttgctcaacctgtctcgtgacaccgcggcagaaatgaatgaaaccgtcgaagtaatctcagaaatgtttgatcttcaggaaccgacatgcctacaaacgcgactggaactctataaacaaggcctgcgtggtagtctcacaaaacttaaaggtccgctgaccatgatggcgagccattataaacaacattgtccaccgacgccggaaacctcatgcgccacacaaattattacattcgaatcatttaaggagaacttaaaggattttttgcttgtaatccctttcgattgctgggaaccggtccaagaa

SEQ ID NO: 15277 - DNA, 432 bp, Artificial Sequence
  derived and/or modified sequence
atgtggctccaaagtctgctcctgctaggaaccgttgcgtgttcaatctctgctcccgcacggtctcctagcccatccacacagccatgggagcatgtgaacgccattcaggaggccagacggctcttgaaccttagccgcgacacagctgctgagatgaacgaaaccgtggaagtgatcagcgagatgttcgacttacaggagcccacctgcctgcagacccgcctcgagctgtataaacagggtctaagaggatcattgaccaagctcaaggggcctctgaccatgatggccagccactataagcagcactgcccacccactcctgagacgtcatgcgccactcagattatcactttcgagagctttaaggaaaatctgaaagacttcttattggtaatcccttttgattgctgggagccggtgcaggaa

SEQ ID NO: 15278 - DNA, 432 bp, Artificial Sequence
  derived and/or modified sequence
atgtggctgcagtcactgttgctgctgggaacagtcgcatgctcaatcagtgctccagccagaagccctagcccctctacgcagccttgggaacacgtcaatgccatacaggaggcccgcaggctgttgaatttgtcacgcgatacggccgcggaaatgaacgaaactgtagaagtcatatctgagatgttcgacctgcaggaaccaacctgcctgcagactagactcgaattgtataagcaaggcctgaggggatcactcacaaagctgaagggtccactgacgatgatggcttcacattataagcagcactgccccccgacaccagagacttcttgcgccactcagatcattaccttcgagtctttcaaagaaaatcttaaagattttctgcttgtcataccgttcgactgctgggagcctgttcaggaa

SEQ ID NO: 15279 - DNA, 432 bp, Artificial Sequence
  derived and/or modified sequence
atgtggctgcagagtctgctcctgctgggtacagtcgcttgttccatttccgctcccgccaggtctccatcacccagtacgcaaccctgggaacacgtcaacgctattcaagaagcacgcagacttctgaatttgagcagggataccgcagccgagatgaacgagactgtcgaagtcatttctgagatgttcgacctgcaagaacctacttgtctgcaaacaagactggaactgtacaaacagggtttgaggggcagcctcactaagcttaaaggtcctttgacaatgatggcctctcactataagcagcactgcccgcccactcctgaaacctcctgtgccacccagatcatcacgttcgagtcctttaaagaaaatctgaaagactttctcctggtcataccgttcgattgctgggagccagtgcaggag

SEQ ID NO: 15280 - DNA, 432 bp, Artificial Sequence
  derived and/or modified sequence
atgtggctgcagagcttgctgttgcttggcaccgtggcttgttccataagcgcgcccgccagaagccctagcccctcaacacagccctgggagcatgttaatgctattcaagaggcacgtcgcctgttgaatctgtctcgagacaccgctgccgagatgaatgagacagtcgaggtgatctccgaaatgtttgaccttcaggagccgacatgcctgcagaccaggctagaactttataagcagggcttgagaggaagcttgacgaagctaaaaggtccactgacgatgatggctagccactacaagcagcactgtcccccaaccccagagacaagttgtgccactcagatcatcacattcgagtcttttaaagagaatctcaaagattttctgctcgtaattccattcgattgttgggaacccgtgcaggaa

SEQ ID NO: 15281 - DNA, 432 bp, Artificial Sequence
  derived and/or modified sequence
atgtggctccagtcactgctccttctcggcactgtcgcctgcagcatctcggctccggcgcgctcaccatcgccatcgacccaaccgtgggaacatgtgaatgcgatccaggaagctaggaggttgttgaatctcagcagagataccgctgccgagatgaacgaaactgttgaggtgatttcggagatgtttgatctgcaagagccaacctgcctccagaccaggcttgagctctacaagcaggggctgaggggatccctgaccaaactgaagggccctctcactatgatggcgtcgcattacaagcagcactgtcctccaaccccggaaacgtcctgtgcaactcagattatcactttcgagtccttcaaagaaaacctgaaggacttcctgctggtcatccctttcgactgctgggaaccagtgcaagag

SEQ ID NO: 15282 - DNA, 432 bp, Artificial Sequence
  derived and/or modified sequence
atgtggctgcagtcactgcttcttcttggtaccgtggcatgtagcatttcagcacctgcccgctcgccatcgccatcgacccagccttgggaacatgtgaatgccattcaagaggcgcgtagacttttgaacctctcaagagataccgcagcggagatgaacgagactgttgaagtcatctcggaaatgtttgaccttcaagagcccacttgtctgcagacccggctggaactctacaagcaagggctccgcggttcccttaccaaactcaagggaccccttacgatgatggcttcgcactacaaacaacattgccccccaacccccgaaacttcgtgcgccactcagataatcacgtttgaatcctttaaagaaaaccttaaggatttcctgttggtgattcccttcgactgttgggagcccgtccaggaa

SEQ ID NO: 15283 - DNA, 432 bp, Artificial Sequence
  derived and/or modified sequence
atgtggttgcagagcctacttctgcttggaaccgtcgcctgctccatcagcgccccagcccggagtccttcaccaagcacccaaccgtgggaacatgtcaacgccatacaggaggcgcggagactgttgaatttgtcccgcgatacagcggccgagatgaacgaaaccgtggaggttatttccgagatgttcgatctccaggagcccacctgcctgcaaacccggctcgagttatacaagcagggcttgcggggctcgctcacaaagttgaaaggcccgctgaccatgatggcctcgcattataagcagcactgccccccgacgcccgagacttcgtgtgccacgcagatcattacgttcgagagttttaaggaaaacctgaaggattttttgctagtgatcccctttgactgttgggagccagtccaagag

SEQ ID NO: 15284 - DNA, 432 bp, Artificial Sequence
  derived and/or modified sequence
atgtggctccagtctctgctcctcctgggcactgtggcttgctcaatttcggcgcctgcacggagcccaagcccgtctacgcaaccgtgggaacacgttaatgcaatccaagaagcgaggaggctcctgaacttgtcgagagatactgcagccgagatgaacgaaaccgtggaggtcatctcggaaatgttcgaccttcaagaaccgacttgtctccaaacgcgcctggagttgtacaagcagggacttcgcggttcgctcactaagttgaagggccccctgaccatgatggccagtcattacaaacagcactgcccgcccacccctgaaaccagctgcgccactcagatcattaccttcgagagctttaaggagaatttgaaggatttcctgttggtgatcccgtttgactgctgggaaccggtgcaggag

SEQ ID NO: 15285 - DNA, 432 bp, Artificial Sequence
  derived and/or modified sequence
atgtggctgcagtccctcctgctgttaggcactgtggcctgcagcatttctgcccccgctagaagtccaagtcccagcactcagccatgggagcacgttaatgcgatccaggaagctcggcgattgttgaatttatcaagggatacagctgctgagatgaatgaaaccgtcgaggtgataagcgagatgtttgacctccaggagcccacatgccttcagacacgccttgaattgtataagcagggcctgcggggcagtctaactaagctgaaaggccctcttaccatgatggcttcccactacaagcagcattgtccacccacacctgagacatcctgcgctacccaaattattactttcgaatcttttaaagagaatctgaaggattttctgttggtgatccctttcgattgctgggaacctgtgcaagag

SEQ ID NO: 15286 - DNA, 432 bp, Artificial Sequence
  derived and/or modified sequence
atgtggcttcaatctttgttgcttcttggtacagtcgcttgttctatcagcgcaccagctcgtagcccaagccccagtacacaaccttgggagcatgtcaatgccattcaagaagccagaagacttttgaacttatcaagggataccgcggctgaaatgaacgagactgtggaggtgatatcagaaatgtttgaccttcaggagcccacctgcttacaaactaggctagaactctacaaacaaggtctccggggttctcttacaaagttgaaggggccccttactatgatggcaagccactataaacagcattgtccccctacacccgaaacctcgtgcgccacacagattatcaccttcgaatcattcaaggaaaacctaaaggattttttgttggttattccatttgactgctgggagcctgtgcaagaa

SEQ ID NO: 15287 - DNA, 432 bp, Artificial Sequence
  derived and/or modified sequence
atgtggctgcagtctcttcttctgctgggaacagtcgcatgttctatttccgctcctgccagatcccctagtccttccacgcagccctgggaacacgtgaatgccatccaggaagctcggagactactgaacctgtccagagatactgctgcagaaatgaatgagactgtggaagtgatctctgagatgttcgatctgcaggaaccaacatgtctgcagacacggttggaactctataaacagggactaaggggatccctcactaaactgaaaggacctctgacaatgatggcatcccactataaacagcactgtcctccaacacctgaaacatcctgtgccactcagataatcactttcgagtcattcaaggaaaaccttaaagatttcttactcgttattcccttcgattgctgggagcccgtgcaggaa

SEQ ID NO: 15288 - DNA, 432 bp, Artificial Sequence
  derived and/or modified sequence
atgtggcttcaatccctgcttctgctcgggactgtggcttgctcgatttcggcgcctgcgcgaagcccttcgcctagcactcagccatgggagcatgtcaacgctatccaggaggcaagaaggctcttgaatctgtctcgcgacactgcagccgaaatgaatgaaaccgtcgaggtaattagcgagatgtttgatttgcaggaacctacgtgcctccagactagacttgaactgtacaaacaaggacttaggggatcccttaccaagctgaagggacccctgacgatgatggcatcgcattacaagcaacactgtccaccgacccctgaaacctcgtgcgccacccaaatcattacttttgagtcgtttaaggagaacctgaaggatttcctcctcgtgatcccattcgactgttgggaaccagtgcaggaa

SEQ ID NO: 15289 - DNA, 432 bp, Artificial Sequence
  derived and/or modified sequence
atgtggctgcagagtctgctcctcctaggtacggtggcctgctctatcagcgcgcctgcaaggtccccgtcccccagcacccagccgtgggaacacgtgaacgcaatccaagaggcaaggcgactgctcaatctctctagagacaccgccgccgaaatgaatgagaccgttgaagtcatttcagagatgttcgatttgcaggagccaacctgtctccagacgaggctggaactatataagcaaggtctgaggggatcactaactaagctcaaaggccctttgacgatgatggcttcacactacaagcagcattgtccccccacccctgagacctcatgtgccacccaaatcatcaccttcgaaagtttcaaagaaaatctcaaggattttctcctggtaatcccttttgactgctgggagcccgtgcaggag

SEQ ID NO: 15290 - DNA, 432 bp, Artificial Sequence
  derived and/or modified sequence
atgtggctgcagagtctgctactacttggcacggtggcttgctccattagcgctccagcaaggtctccaagtccatctacccaaccctgggaacacgtaaacgccattcaggaagcccgtaggctgctgaacctatcaagggacaccgcagcggaaatgaatgagactgtagaggtcattagtgaaatgttcgaccttcaggaaccgacttgtctgcaaacacgtctcgagttgtataagcaggggctgcgcggttctctgacgaagctgaaaggcccactgactatgatggcgagtcattacaagcagcattgtcccccaaccccggagacttcctgcgccacccagattatcaccttcgagtcattcaaagaaaacctcaaagattttctgttagttatcccatttgactgctgggaacccgtgcaggag

SEQ ID NO: 15291 - DNA, 432 bp, Artificial Sequence
  derived and/or modified sequence
atgtggttgcaatcgctgctcctgttgggcacggttgcctgttcaatttcagcaccagcgcgctcgccttctccttccactcaaccttgggagcatgtgaacgcaattcaggaggctcggaggcttctgaacctctcgagagatactgcagcagaaatgaatgaaaccgtggaggtgatctcggagatgtttgatctgcaggaaccgacctgtctgcaaacgcgtcttgaactgtataagcaaggcttgagaggttccctcaccaagctcaagggaccactgaccatgatggcctcacactacaagcagcattgcccaccgacccctgaaacctcctgtgcaacccagattatcactttcgaatcatttaaggagaatctgaaggatttcctgctggtgattcctttcgactgttgggagcctgtgcaggag

SEQ ID NO: 15292 - DNA, 432 bp, Artificial Sequence
  derived and/or modified sequence
atgtggttgcagtccctcttactgttagggaccgtcgcatgcagtatctccgcccccgcccggtctccaagtccctccacacagccgtgggaacatgtcaacgccattcaggaggctcgaagattgctgaatctttcgagggacacggctgctgaaatgaacgagactgtggaggtgatttccgaaatgtttgatctgcaagagccaacttgtctgcagacgagactcgagctttacaaacaggggttgaggggctcgctgacgaaactgaaaggccctttgacgatgatggcctcccactacaaacagcattgtccaccaacccccgaaacatcctgcgccacgcagatcattactttcgagagttttaaagaaaatctgaaagatttcctgctggtcatcccatttgattgctgggagcctgtgcaggaa

SEQ ID NO: 15293 - DNA, 432 bp, Artificial Sequence
  derived and/or modified sequence
atgtggctgcagagcctgctgctgctgggaaccgtggcttgttccatatcggcgccagcaaggtctcctagtccaagcacacagccatgggaacatgtgaacgcaatccaagaagcgaggagacttctcaacctttcgagagacactgccgctgagatgaacgagaccgtggaagtcatctctgagatgttcgatctccaagagccaacctgtctccagacaagactggagctgtataagcaggggctgagaggtagtctgaccaaactgaaaggtcctttaacgatgatggcctcgcattacaaacaacactgtcctcccaccccagagaccagttgtgcaacccaaattataaccttcgagtctttcaaggagaaccttaaggattttctcctagtgatccctttcgactgctgggagcccgtccaggag

SEQ ID NO: 15294 - DNA, 432 bp, Artificial Sequence
  derived and/or modified sequence
atgtggctacagtctctgctgctcctgggcacagtggcatgttccatcagcgctcccgctagatcccctagcccatctacccaaccatgggaacacgttaacgcaatccaggaagctaggagactactcaacttaagcagggacacagccgctgagatgaacgaaactgtggaggtgatttctgagatgtttgatctacaggaacctacttgcctacagacccggctagagctgtacaagcagggacttaggggctccctcactaaactgaagggccccctgactatgatggcctcacactacaagcaacactgtccccctaccccagaaacctcctgtgcaacacaaatcatcacattcgagtcatttaaggagaacttaaaggacttcttgctcgtgataccttttgattgttgggaacctgttcaggaa

SEQ ID NO: 15295 - DNA, 432 bp, Artificial Sequence
  derived and/or modified sequence
atgtggctacaaagcctactcctcctgggcacggtagcatgctccatctcagcaccagcccgctccccttcccccagtacccaaccctgggaacacgtcaacgccatacaggaggctagacgactgctgaatctgtcacgagatactgcagccgagatgaatgagacagtagaggtcatctccgagatgtttgatcttcaggagccaacgtgtctacagactcgcctagagctgtacaagcaaggtcttcgaggtagtttgacaaagctgaaggggcccctgacaatgatggccagccactacaagcagcactgcccccccaccccggaaaccagctgcgctacgcagattatcaccttcgaaagtttcaaggagaatttgaaggacttcctcttggttattccatttgattgctgggaaccagtgcaggag

SEQ ID NO: 15296 - DNA, 432 bp, Artificial Sequence
  derived and/or modified sequence
atgtggctgcagtcacttctattactgggcactgtagcctgttctatctcggccccagctcgtagcccaagtccgagtacccagccatgggaacacgtcaatgcaatccaggaagcgcgaaggcttctgaacctgagcagggatacggccgctgagatgaatgaaacagtggaagttatttctgagatgttcgatctgcaggagccgacctgcctgcagaccagactcgaactttataagcaggggttgcgagggtccttgacaaaactgaaaggacctctgactatgatggcctctcattataaacagcactgtcctcctacaccagaaacttcctgtgcgacgcagattataaccttcgaatcctttaaagaaaacctgaaggatttcctgctagttatcccattcgattgttgggaaccagtccaagag

SEQ ID NO: 15297 - DNA, 432 bp, Artificial Sequence
  derived and/or modified sequence
atgtggctccagtccctcctcctgttgggaactgtggcctgtagtatctctgccccagctagatcaccttcaccgtccacacagccctgggagcacgtgaatgctatccaggaagccagaaggcttctaaatctctctcgcgatacagccgccgagatgaatgaaactgtcgaggtgatttcagaaatgttcgacttgcaggaaccaacatgtcttcagacaaggttggaactctataagcagggactccgggggtcgcttacaaaactgaaaggaccactgacaatgatggcttcacactataaacagcattgtcctcctactcccgaaacttcttgcgctactcagatcatcacatttgagtccttcaaagaaaacctgaaagatttccttcttgtcattccctttgattgctgggaacctgtgcaggag

SEQ ID NO: 15298 - DNA, 432 bp, Artificial Sequence
  derived and/or modified sequence
atgtggctccagagcctgcttctcttgggtactgtggcctgtagcatttccgccccggcaaggagcccctccccttcgacccaaccgtgggaacatgtgaacgcaattcaagaagcaagaagattgcttaatctgagcagagataccgcagcggaaatgaacgaaaccgtggaggtcatttcggagatgtttgaccttcaagagcctacctgtctgcagacccgccttgagctttacaagcaaggtcttagaggttcgctgaccaagctcaaagggccacttacgatgatggcatcacactacaagcaacattgtcccccaactcccgaaacttcatgcgctactcagattatcactttcgagtcatttaaggaaaatctgaaggatttcctcctggtgatcccattcgattgttgggagcctgtgcaggaa

SEQ ID NO: 15299 - DNA, 432 bp, Artificial Sequence
  derived and/or modified sequence
atgtggcttcagtccctactgttgctgggaacggtggcttgttccatctctgcccccgctcgctcaccctctccttctactcagccttgggaacacgtgaatgcaatacaggaagcgcgcaggctccttaacctttctagggatactgccgcagaaatgaatgaaacagtggaagtcatcagtgaaatgtttgacctgcaggagcccacatgcctccagacaagactggaactctataaacaagggttacggggaagtctcacaaaactaaaaggacccctgacaatgatggcatcacattataaacagcactgcccgcctacacctgaaacttcttgcgctacacagataataacatttgagtcatttaaagaaaatctcaaagattttcttctggtcattcctttcgattgttgggaacccgtccaggag

SEQ ID NO: 15300 - DNA, 432 bp, Artificial Sequence
  derived and/or modified sequence
atgtggcttcaatcgcttttgcttttgggtacagtggcttgcagcatatctgcccctgcccgcagcccctccccgtcaactcaaccctgggagcacgtcaacgcaatacaggaggcaagaaggctattaaatctttcgagagatacagccgcagaaatgaatgaaacggttgaagttatctccgagatgttcgatctccaagagcccacttgtctccaaaccagattagagctgtacaaacaagggcttagaggttctctaactaaacttaagggtcccttgactatgatggcatcacattataagcagcactgcccaccaactccagaaacttcatgcgccacccaaattataacattcgagtcattcaaagagaatttgaaggacttcttgctcgtcattccgttcgactgttgggagcctgtgcaagag

SEQ ID NO: 15301 - DNA, 432 bp, Artificial Sequence
  derived and/or modified sequence
atgtggctccagtctctgctactgttggggactgtcgcttgctcgattagcgcacctgccagatccccttccccctccacacagccctgggagcatgtgaacgctatccaggaggcacgccgcctgcttaatctgtctcgggacacagcagccgaaatgaacgagaccgtagaggtgatttccgagatgttcgatttacaggagccaacctgtctgcagacaagactcgagctgtacaagcagggtctacgggggtccctcactaagcttaaggggcctctgaccatgatggctagccactacaagcagcattgtccacctactcccgagactagctgcgccacccagattatcactttcgagagtttcaaggagaatctcaaagactttcttctggtcatcccattcgactgttgggaacctgtccaggaa

SEQ ID NO: 15302 - DNA, 432 bp, Artificial Sequence
  derived and/or modified sequence
atgtggctgcagtcgctgcttctgttgggaaccgtggcctgttcgatctcagccccagcccggagcccgtccccgagcacccagccgtgggaacacgtgaacgcgatccaggaggctcgccgactcctgaacctctcccgcgataccgcggccgaaatgaacgaaactgtggaggtcatcagcgaaatgttcgacctccaggagccaacttgccttcaaacccgcctggaactgtacaaacaaggtttgcgcggatcactgactaaactgaagggtccgctgaccatgatggcctcacactacaaacaacactgccctcctactccggagacttcatgcgccacccagattatcactttcgaatcgttcaaggaaaacctgaaggactttctgctggtgatcccgttcgattgctgggaacctgtgcaggaa

SEQ ID NO: 15303 - DNA, 432 bp, Artificial Sequence
  derived and/or modified sequence
atgtggctgcagtcactcctgctcctcggcactgtagcctgcagtatttctgctcctgcccgctctcctagtccatctacccagccatgggaacacgtgaatgccatacaggaagcccggcgcctcctgaatctgagccgagatactgcagcagaaatgaacgagaccgtggaggtgatcagcgagatgttcgatctccaggagcctacctgcctgcagacccggctggaattgtataaacagggcctaaggggctctctgaccaaactaaagggtcctctaaccatgatggcatctcactacaaacagcactgcccgcctactcctgagacctcctgtgctactcaaataatcacatttgagtcttttaaagagaatctgaaagactttcttttggttatcccctttgactgctgggaaccggttcaagaa

SEQ ID NO: 15304 - RNA, 578 nt, Artificial Sequence
  derived and/or modified sequence
gggaaauaagagagaaaagaagaguaagaagaaauauaagagccaccauguggcuccagucacuuuuguugcuuggaacggucgcaugcuccaucucggcaccagcgcggucccccucgccgagcacgcagccuugggaacaugugaacgcuauccaagaagcgaggagacuucugaaucugucacgagauacagcggccgagaugaacgaaacuguagaggucaucucagagauguuugaccuucaagagcccacaugucuccagacccgccuggaacuguauaagcagggguugcggggaucccucaccaaauugaaaggucccuugaccaugauggccucgcacuacaaacagcacuguccgccgacgccugagacaucgugcgcgacgcagauuaucacuuuugaaagcuucaaggaaaaucucaaggacuuccugcucgugauuccauucgauugcugggagcccgugcaagagugauaagcugccuucugcggggcuugccuucuggccaugcccuucuucucucccuugcaccuguaccucuuggucuuugaauaaagccugaguaggaag

SEQ ID NO: 15305 - RNA, 435 nt, Artificial Sequence
  derived and/or modified sequence
auguggcugcagucacuucuacuccuuggcaccgucgccugcucuauauccgccccugcacgguccccaagcccaucaacucagccaugggagcacgugaacgcaauccaagaggccagaagacuguugaaccuuagcagagauaccgccgccgaaaugaaugagaccguggaggugaucagcgagauguucgacuuacaagaaccaaccugucugcagacacgauuggagcuuuacaagcaaggauuacgaggcucacugacaaaacuaaaaggaccccucaccaugauggccagucauuauaagcagcauuguccucccaccccagagaccaguugugccacgcagauuaucacuuuugagaguuuuaaggaaaaucucaaagauuuccuucugguuauuccauuugacuguugggagcccguucaagaguag

SEQ ID NO: 15306 - RNA, 435 nt, Artificial Sequence
  derived and/or modified sequence
auguggcugcagucacuucuacuccuuggcaccgucgccugcucuauauccgccccugcacgguccccaagcccaucaacucagccaugggagcacgugaacgcaauccaagaggccagaagacuguugaaccuuagcagagauaccgccgccgaaaugaaugagaccguggaggugaucagcgagauguucgacuuacaagaaccaaccugucugcagacacgauuggagcuuuacaagcaaggauuacgaggcucacugacaaaacuaaaaggaccccucaccaugauggccagucauuacaaacaacacugccccccgacgccugaaacuucuugcgcuacacaaauuaucacuuuugagaguuuuaaagaaaaucucaaggauuuuuuacugguaauucccuuugauugcugggagcccguacaggaauag

SEQ ID NO: 15307 - protein, 207 aa, Artificial Sequence
  derived and/or modified sequence
MAGPATQSPMKLMALQLLLWHSALWTVQEATPLGPASSLPQSFLLKCLEQVRKIQGDGAALQEKLVSECATYKLCHPEELVLLGHSLGIPWAPLSSCPSQALQLAGCLSQLHSGLFLYQGLLQALEGISPELGPTLDTLQLDVADFATTIWQQMEELGMAPALQPTQGAMPAFASAFQRRAGGVLVASHLQSFLEVSYRVLRHLAQP

SEQ ID NO: 15308 - DNA, 624 bp, Artificial Sequence
  derived and/or modified sequence
atggctggacctgccacccagagccccatgaagctgatggccctgcagctgctgctgtggcacagtgcactctggacagtgcaggaagccacccccctgggccctgccagctccctgccccagagcttcctgctcaagtgcttagagcaagtgaggaagatccagggcgatggcgcagcgctccaggagaagctggtgagtgagtgtgccacctacaagctgtgccaccccgaggagctggtgctgctcggacactctctgggcatcccctgggctcccctgagcagctgccccagccaggccctgcagctggcaggctgcttgagccaactccatagcggccttttcctctaccaggggctcctgcaggccctggaagggatctcccccgagttgggtcccaccttggacacactgcagctggacgtcgccgactttgccaccaccatctggcagcagatggaagaactgggaatggcccctgccctgcagcccacccagggtgccatgccggccttcgcctctgctttccagcgccgggcaggaggggtcctggttgcctcccatctgcagagcttcctggaggtgtcgtaccgcgttctacgccaccttgcccagccctga

SEQ ID NO: 15309 - DNA, 829 bp, Artificial Sequence
  derived and/or modified sequence
ttggaccctcgtacagaagctaatacgactcactatagggaaataagagagaaaagaagagtaagaagaaatataagagccaccatggctggacctgccacccagagccccatgaagctgatggccctgcagctgctgctgtggcacagtgcactctggacagtgcaggaagccacccccctgggccctgccagctccctgccccagagcttcctgctcaagtgcttagagcaagtgaggaagatccagggcgatggcgcagcgctccaggagaagctggtgagtgagtgtgccacctacaagctgtgccaccccgaggagctggtgctgctcggacactctctgggcatcccctgggctcccctgagcagctgccccagccaggccctgcagctggcaggctgcttgagccaactccatagcggccttttcctctaccaggggctcctgcaggccctggaagggatctcccccgagttgggtcccaccttggacacactgcagctggacgtcgccgactttgccaccaccatctggcagcagatggaagaactgggaatggcccctgccctgcagcccacccagggtgccatgccggccttcgcctctgctttccagcgccgggcaggaggggtcctggttgcctcccatctgcagagcttcctggaggtgtcgtaccgcgttctacgccaccttgcccagccctgaagcgctgccttctgcggggcttgccttctggccatgcccttcttctctcccttgcacctgtacctcttggtctttgaataaagcctgagtaggaaggcggccgctcgagcatgcatctaga

SEQ ID NO: 15310 - DNA, 1602 bp, Artificial Sequence
  derived and/or modified sequence
agtcgtggccccaggtaatttcctcccaggcctccatggggttatgtataaaggcccccctagagctgggccccaaaacagcccggagcctgcagcccagccccacccagacccatggctggacctgccacccagagccccatgaagctgatggccctgcagctgctgctgtggcacagtgcactctggacagtgcaggaagccacccccctgggccctgccagctccctgccccagagcttcctgctcaagtgcttagagcaagtgaggaagatccagggcgatggcgcagcgctccaggagaagctggtgagtgagtgtgccacctacaagctgtgccaccccgaggagctggtgctgctcggacactctctgggcatcccctgggctcccctgagcagctgccccagccaggccctgcagctggcaggctgcttgagccaactccatagcggccttttcctctaccaggggctcctgcaggccctggaagggatctcccccgagttgggtcccaccttggacacactgcagctggacgtcgccgactttgccaccaccatctggcagcagatggaagaactgggaatggcccctgccctgcagcccacccagggtgccatgccggccttcgcctctgctttccagcgccgggcaggaggggtcctggttgcctcccatctgcagagcttcctggaggtgtcgtaccgcgttctacgccaccttgcccagccctgagccaagccctccccatcccatgtatttatctctatttaatatttatgtctatttaagcctcatatttaaagacagggaagagcagaacggagccccaggcctctgtgtccttccctgcatttctgagtttcattctcctgcctgtagcagtgagaaaaagctcctgtcctcccatcccctggactgggaggtagataggtaaataccaagtatttattactatgactgctccccagccctggctctgcaatgggcactgggatgagccgctgtgagcccctggtcctgagggtccccacctgggacccttgagagtatcaggtctcccacgtgggagacaagaaatccctgtttaatatttaaacagcagtgttccccatctgggtccttgcacccctcactctggcctcagccgactgcacagcggcccctgcatccccttggctgtgaggcccctggacaagcagaggtggccagagctgggaggcatggccctggggtcccacgaatttgctggggaatctcgtttttcttcttaagacttttgggacatggtttgactcccgaacatcaccgacgcgtctcctgtttttctgggtggcctcgggacacctgccctgcccccacgagggtcaggactgtgactctttttagggccaggcaggtgcctggacatttgccttgctggacggggactggggatgtgggagggagcagacaggaggaatcatgtcaggcctgtgtgtgaaaggaagctccactgtcaccctccacctcttcaccccccactcaccagtgtcccctccactgtcacattgtaactgaacttcaggataataaagtgtttgcctccaaaaaaaaaaa

SEQ ID NO: 15311 - DNA, 1509 bp, Artificial Sequence
  derived and/or modified sequence
cggagcctgcagcccagccccacccagacccatggctggacctgccacccagagccccatgaagctgatggccctgcagctgctgctgtggcacagtgcactctggacagtgcaggaagccacccccctgggccctgccagctccctgccccagagcttcctgctcaagtgcttagagcaagtgaggaagatccagggcgatggcgcagcgctccaggagaagctggtgagtgagtgtgccacctacaagctgtgccaccccgaggagctggtgctgctcggacactctctgggcatcccctgggctcccctgagcagctgccccagccaggccctgcagctggcaggctgcttgagccaactccatagcggccttttcctctaccaggggctcctgcaggccctggaagggatctcccccgagttgggtcccaccttggacacactgcagctggacgtcgccgactttgccaccaccatctggcagcagatggaagaactgggaatggcccctgccctgcagcccacccagggtgccatgccggccttcgcctctgctttccagcgccgggcaggaggggtcctggttgcctcccatctgcagagcttcctggaggtgtcgtaccgcgttctacgccaccttgcccagccctgagccaagccctccccatcccatgtatttatctctatttaatatttatgtctatttaagcctcatatttaaagacagggaagagcagaacggagccccaggcctctgtgtccttccctgcatttctgagtttcattctcctgcctgtagcagtgagaaaaagctcctgtcctcccatcccctggactgggaggtagataggtaaataccaagtatttattactatgactgctccccagccctggctctgcaatgggcactgggatgagccgctgtgagcccctggtcctgagggtccccacctgggacccttgagagtatcaggtctcccacgtgggagacaagaaatccctgtttaatatttaaacagcagtgttccccatctgggtccttgcacccctcactctggcctcagccgactgcacagcggcccctgcatccccttggctgtgaggcccctggacaagcagaggtggccagagctgggaggcatggccctggggtcccacgaatttgctggggaatctcgtttttcttcttaagacttttgggacatggtttgactcccgaacatcaccgacgcgtctcctgtttttctgggtggcctcgggacacctgccctgcccccacgagggtcaggactgtgactctttttagggccaggcaggtgcctggacatttgccttgctggacggggactggggatgtgggagggagcagacaggaggaatcatgtcaggcctgtgtgtgaaaggaagctccactgtcaccctccacctcttcaccccccactcaccagtgtcccctccactgtcacattgtaactgaacttcaggataataaagtgtttgcctcca

SEQ ID NO: 15312 - DNA, 624 bp, Artificial Sequence
  derived and/or modified sequence
atggcaggcccagcaacccagagtccaatgaagcttatggctctgcagttactattgtggcactccgccctctggaccgttcaggaagctactccacttggtcctgcatcttcattgccccaaagctttttgctgaaatgcctcgagcaggtccggaaaatacagggcgacggagccgccttacaggagaagctggtgtctgagtgtgccacatataagctgtgccaccctgaagagctagtgctcctaggccatagcttaggcatcccctgggcccctctatcaagttgcccttcccaagctctccagctcgctgggtgtctgtcccaactccatagtggtctgttcctttatcaagggctgctccaagcgctcgaggggatttcccctgaattggggcctaccttggacactctgcagcttgatgtcgcagacttcgccacgactatctggcagcagatggaggaactgggcatggctccagccctgcagccgacacagggagccatgcccgcctttgccagcgccttccaaagaagagcgggcggagtgctggtggcaagccacctccagagctttctggaggtatcttatcgcgtcctgcgccatctggcacagccatag

SEQ ID NO: 15313 - DNA, 624 bp, Artificial Sequence
  derived and/or modified sequence
atggccggccctgccacccagagccccatgaagctgatggccctgcagctgctgctgtggcacagcgccctgtggacagtgcaggaggccacccccctgggccctgccagcagcctgccccagagcttcctgctgaagtgcctggagcaggtgaggaagatccagggagatggagctgccctgcaggagaagctggtgtctgaatgtgccacctacaagctgtgccaccctgaggagctggtgctgctgggccacagcctgggcatcccctgggcccccctgagcagctgccccagccaggccctgcagctggccggctgcctgagccagctgcacagcggcctcttcctgtaccagggcctgctgcaggccctggagggcatcagccctgagctgggccccaccctggacaccctgcagctggatgtggccgactttgccaccaccatctggcagcagatggaggagctgggcatggccccagccctgcagcccacccagggcgccatgcctgcctttgccagcgccttccagaggagagctggaggagtgctggtggccagccacctgcagagcttcctggaggtgtcctacagagtgctgcggcacctggcccagccctag

SEQ ID NO: 15314 - DNA, 624 bp, Artificial Sequence
  derived and/or modified sequence
atggccggccccgccacccagagccccatgaagctgatggccctgcagctcttgctctggcattccgccttgtggactgtacaagaggcgacaccgctgggccccgcctctagtctgccccagagttttttgttgaagtgcctggagcaagtcagaaaaatccagggagacggggcggcgctccaggaaaagctggtgtctgagtgtgccacatacaaactgtgtcatcccgaagagttggtcctcctggggcattctctaggtatcccttgggcccccttgagctcatgccccagtcaggcgctccagttggcaggatgcctgtcgcagctccacagcggattgtttctctatcagggactgctgcaggccctggaaggaatttcaccggagttaggcccaacactcgacactctacagttggatgtcgctgacttcgcaacaactatctggcagcagatggaggagctgggcatggccccagctttgcaaccaacccagggggctatgcctgccttcgccagcgcttttcagcgtcgtgccggcggcgttctggttgctagtcacctgcaatctttccttgaagtctcctatagagttctccgacaccttgcgcagccgtag

SEQ ID NO: 15315 - DNA, 624 bp, Artificial Sequence
  derived and/or modified sequence
atggctggcccagctacccagtcgccaatgaagttaatggctctccagctgctgctgtggcactccgcactgtggactgtgcaggaagcaacacctttgggcccagcctcttctcttcctcagagtttcctgctgaaatgccttgagcaggtgcggaagattcagggcgacggcgcagctttgcaggagaagcttgtgtctgagtgtgccacatacaagctgtgccatccagaagagcttgtgctgctcggacatagcctcgggatcccatgggctcctttgagtagctgtccatcacaagccctccaactcgctggatgtctgtcccagcttcactccggcttgttcctttaccaaggacttcttcaggcccttgagggaatctcaccggaactcggcccaaccctagacacgctccagctcgatgtcgccgactttgccaccaccatctggcagcagatggaagagctagggatggccccagccctccagcccactcagggagcaatgccggctttcgcaagcgcgttccagagaagagccggaggagtgctggttgcatctcatcttcagagcttccttgaggtctcctaccgcgtactacggcatctggcccaaccctag

SEQ ID NO: 15316 - DNA, 624 bp, Artificial Sequence
  derived and/or modified sequence
atggcaggacctgccactcagagtcctatgaaacttatggctctacagcttctgctatggcacagcgcgctgtggacagtgcaggaggccaccccgctcggacccgcctcttccctaccccaatcttttttactgaaatgcctggaacaggtcagaaagatacagggcgatggcgccgctctgcaggaaaaactagtgtctgaatgtgcgacctacaaactctgccatcccgaagaattagttctgcttggtcacagcttgggcattccctgggcacccctctcctcctgtccctcacaggctttacagctggccggctgtctcagtcaactacacagtggtctctttttatatcaggggctcctgcaggctttagagggtattagccccgaactcggccctactctagacactctgcagctggacgtcgcagatttcgcaacgactatctggcaacagatggaagagctaggcatggccccggccttgcaaccaacccagggagcaatgcccgcttttgccagtgcgttccaacggagggcaggcggtgttttagtggcctcacatttgcagagtttcttagaagtgagctatcgcgtactgagacacctagcacaaccatag

SEQ ID NO: 15317 - DNA, 624 bp, Artificial Sequence
  derived and/or modified sequence
atggcaggacctgccactcagagtcctatgaaacttatggctctacagcttctgctatggcacagcgcgctgtggacagtgcaggaggccaccccgctcggacccgcctcttccctaccccaatcttttttactgaaatgcctggaacaggtcagaaagatacagggcgatggcgccgctctgcaggaaaaactagtgtctgaatgtgcgacctacaaactctgccatcccgaagaattagttctgcttggtcacagcttgggcattccctgggcacccctctcctcctgtccctcacaggctttacagctggccggctgtctcagtcaactacacagtggtctctttttatatcaggggctcctgcaggctttagagggtattagccccgaactcggccctactctagacactctgcagctggacgtcgcagatttcgcaacgactatctggcaacagatggaagagctaggcatggccccggccttgcaaccaacccagggagcaatgcccgcttttgccagtgcgttccaacggagggcaggcggtgttttagtggcctcacatttgcagagtttcttagaagtgagctatcgcgtactccgtcatttagcccagccatag

SEQ ID NO: 15318 - DNA, 624 bp, Artificial Sequence
  derived and/or modified sequence
atggccggccccgccacccagagccccatgaagctgatggccctgcagctgctgctgtggcacagcgccctgtggaccgtgcaggaggccacccccctgggccccgccagcagcctgccccagagcttcctgctgaagtgcctggagcaggtgagaaagatccagggcgacggcgccgccctgcaggagaagctggtgagcgagtgcgccacctacaagctgtgccaccccgaggagctggtgctgctgggccacagcctgggcatcccctgggcccccctgagcagctgccccagccaggccctgcagctggccggctgcctgagccagctgcacagcggcctgttcctgtaccagggcctgctgcaggccctggagggcatcagccccgagctgggccccaccctggacaccctgcagctggacgtggccgacttcgccaccaccatctggcagcagatggaggagctgggcatggcccccgccctgcagcccacccagggcgccatgcccgccttcgccagcgccttccagagaagagccggcggcgtgctggtggccagccacctgcagagcttcctggaggtgagctacagagtgctgagacacctggcccagccctag

SEQ ID NO: 15319 - RNA, 624 nt, Artificial Sequence
  derived and/or modified sequence
auggcaggaccugccacucagaguccuaugaaacuuauggcucuacagcuucugcuauggcacagcgcgcuguggacagugcaggaggccaccccgcucggacccgccucuucccuaccccaaucuuuuuuacugaaaugccuggaacaggucagaaagauacagggcgauggcgccgcucugcaggaaaaacuagugucugaaugugcgaccuacaaacucugccaucccgaagaauuaguucugcuuggucacagcuugggcauucccugggcaccccucuccuccugucccucacaggcuuuacagcuggccggcugucucagucaacuacacaguggucucuuuuuauaucaggggcuccugcaggcuuuagaggguauuagccccgaacucggcccuacucuagacacucugcagcuggacgucgcagauuucgcaacgacuaucuggcaacagauggaagagcuaggcauggccccggccuugcaaccaacccagggagcaaugcccgcuuuugccagugcguuccaacggagggcaggcgguguuuuaguggccucacauuugcagaguuucuuagaagugagcuaucgcguacugagacaccuagcacaaccauag

SEQ ID NO: 15320 - RNA, 624 nt, Artificial Sequence
  derived and/or modified sequence
auggcaggaccugccacucagaguccuaugaaacuuauggcucuacagcuucugcuauggcacagcgcgcuguggacagugcaggaggccaccccgcucggacccgccucuucccuaccccaaucuuuuuuacugaaaugccuggaacaggucagaaagauacagggcgauggcgccgcucugcaggaaaaacuagugucugaaugugcgaccuacaaacucugccaucccgaagaauuaguucugcuuggucacagcuugggcauucccugggcaccccucuccuccugucccucacaggcuuuacagcuggccggcugucucagucaacuacacaguggucucuuuuuauaucaggggcuccugcaggcuuuagaggguauuagccccgaacucggcccuacucuagacacucugcagcuggacgucgcagauuucgcaacgacuaucuggcaacagauggaagagcuaggcauggccccggccuugcaaccaacccagggagcaaugcccgcuuuugccagugcguuccaacggagggcaggcgguguuuuaguggccucacauuugcagaguuucuuagaagugagcuaucgcguacuccgucauuuagcccagccauag

SEQ ID NO: 15321 - protein, 516 aa, Artificial Sequence
  derived and/or modified sequence
MALSQSVPFSATELLLASAIFCLVFWVLKGLRPRVPKGLKSPPEPWGWPLLGHVLTLGKNPHLALSRMSQRYGDVLQIRIGSTPVLVLSRLDTIRQALVRQGDDFKGRPDLYTSTLITDGQSLTFSTDSGPVWAARRRLAQNALNTFSIASDPASSSSCYLEEHVSKEAKALISRLQELMAGPGHFDPYNQVVVSVANVIGAMCFGQHFPESSDEMLSLVKNTHEFVETASSGNPLDFFPILRYLPNPALQRFKAFNQRFLWFLQKTVQEHYQDFDKNSVRDITGALFKHSKKGPRASGNLIPQEKIVNLVNDIFGAGFDTVTTAISWSLMYLVTKPEIQRKIQKELDTVIGRERRPRLSDRPQLPYLEAFILETFRHSSFLPFTIPHSTTRDTTLNGFYIPKKCCVFVNQWQVNHDPELWEDPSEFRPERFLTADGTAINKPLSEKMMLFGMGKRRCIGEVLAKWEIFLFLAILLQQLEFSVPPGVKVDLTPIYGLTMKHARCEHVQARLRFSIN

SEQ ID NO: 15322 - DNA, 1551 bp, Artificial Sequence
  derived and/or modified sequence
atggccttgtcccaatccgtccccttctcagccacggagctgctcctggcgagcgccatcttttgtctcgtattctgggttctcaaaggtctgcgcccacgagtgccaaaaggactgaagtctcctcctgagccttggggctggcctcttctaggacatgtgcttacattaggaaagaacccccacctcgcattatcccgcatgagccagaggtatggtgatgtgttacagatccggattgggtccactccagtgctggtgctttcccgcctcgacacaattcggcaagctcttgtgcgacagggcgacgactttaaaggcagaccagatctctacacttcaactctcattactgatgggcagtccctcacattttccacggactccggtccagtgtgggctgcccgccggaggctggcccaaaatgccctgaatactttcagcatcgcttccgaccctgcgtcttccagctcatgctacttagaggagcacgtcagcaaagaggctaaggctctgataagtcgcttgcaagagctaatggcgggcccaggacactttgatccatacaaccaggttgtggtgtccgtggcaaatgtgatcggagccatgtgttttgggcagcatttccctgagtcttccgacgaaatgttgtctctcgtaaaaaacactcacgaatttgtcgagacagccagttctgggaatccgctggatttcttccctattttgaggtaccttccaaaccctgccctgcagcgttttaaggcattcaaccagagatttctgtggttcctccagaaaacagtgcaggagcattaccaggacttcgacaagaatagtgttcgcgacattacaggggccctgtttaagcacagcaagaagggcccgagggcatccggcaacctcattccccaggaaaaaattgtcaatttagtgaacgacattttcggggctggcttcgacacggttaccacagctatatcctggtcattgatgtacttagtcacaaaaccagagatccagcgaaagattcagaaggagctggacaccgtgattggccgggaaaggcgcccacgcctctccgataggccacagttaccatatttagaagcgttcattctagagacctttaggcactccagcttccttccttttaccataccacactctaccacacgcgataccaccctcaacgggttttatatcccaaagaagtgctgtgtatttgttaaccaatggcaagtgaaccatgatccagagctgtgggaggatccaagcgaattccggccggagcgattcctgactgcggacggcaccgctattaataagcctttgtccgagaagatgatgttgtttggcatgggcaagcgcagatgcattggcgaggtgctggctaagtgggagattttcctcttcctggcgattctgctacagcaactggagttctcggtaccgccaggcgttaaagtggatttaacaccgatttatggtctgacgatgaagcacgctaggtgtgaacatgtgcaagcgcgcctgcgcttctctattaattag

SEQ ID NO: 15323 - DNA, 1551 bp, Artificial Sequence
  derived and/or modified sequence
atggccctgagccagagcgtgcccttcagcgccacagagctgctgctggccagcgccatcttctgcctggtgttctgggtgctgaagggcctgcggccccgggtgcccaagggcctgaagagccccccagagccctggggctggcccctgctgggccacgtgctgaccctgggcaagaacccccacctggccctgagcaggatgagccagagatatggagatgtgctgcagatccgcatcggcagcacccctgtgctggtgctgagccggctggacaccatccggcaggccctggtgcggcagggagatgacttcaagggccgcccagacctgtacaccagcaccctcatcacagatggccagagcctgaccttcagcacagattctggccctgtgtgggccgcccggcggcggctggcccagaatgccctgaacaccttcagcatcgccagtgaccctgccagcagcagcagctgctacctggaggagcacgtgtccaaggaggccaaggccctgatcagccggctgcaggagctgatggccggccctggccactttgacccctacaaccaggtggtggtgtctgtggccaacgtcatcggggccatgtgcttcggccagcacttccctgagagcagtgatgagatgctgagcctggtgaagaacacccatgaatttgtggagacagccagcagcggcaaccccctggacttcttccccatcctgcgctacctgcccaacccagccctgcagcgcttcaaggccttcaaccagcgcttcctgtggttcctgcagaagacagtgcaggagcactaccaggactttgacaagaacagcgtgcgggacatcaccggggccctcttcaagcacagcaagaagggcccccgggccagcggcaacctgatcccccaggagaagatcgtgaacctggtgaatgacatctttggagctggctttgacacagtgaccacagccatctcctggagcctgatgtacctggtgaccaagccagagatccagaggaagatccagaaggagctggacacagtgattggccgggagcggcggccccggctgagtgaccggccccagctgccctacctggaggccttcatcctggagaccttccgccacagcagcttcctgcccttcaccatcccccacagcaccacccgggacaccaccctgaatggcttctacatccccaagaagtgctgcgtgtttgtgaaccagtggcaggtgaaccacgaccctgagctgtgggaggaccccagcgagttccggcctgagcgcttcctgacagcagatggaacagccatcaacaagcccctgtctgagaagatgatgctgtttggcatgggcaagaggcgctgcattggagaggtgctggccaagtgggagatcttcctgttcctggccatcctgctgcagcagctggagttctctgtgcccccaggagtgaaggtggacctgacccccatctacggcctgaccatgaagcacgcccgctgtgagcacgtgcaggcccggctgcgcttcagcatcaactag

SEQ ID NO: 15324 - DNA, 1551 bp, Artificial Sequence
  derived and/or modified sequence
atggccctgagccagagcgtgcccttcagcgccaccgagctgctgcttgcctctgctatcttctgccttgtgttttgggtgctgaagggactcagacctcgggtacccaagggcctaaagtcccctcccgagccatggggttggcctctgctcggccacgtattgacactcggtaaaaatccccaccttgcgttatcccggatgtcacagaggtacggtgacgttcttcagatacgcattggctctactccggttcttgtcctctccagacttgacacgatccggcaggcgctcgtccgacaaggcgatgactttaagggccggcctgacctttatacctcaaccctcatcactgacggtcagtctctgacctttagcaccgattccggtcctgtttgggctgctcgccgacgcctggcacaaaacgcccttaacaccttctcaatcgcaagtgaccctgcctcaagttcgtcttgctacctcgaggagcacgtttcaaaggaggccaaggctctgatcagcagactccaagagcttatggccggacccggacactttgatccctacaatcaggtggtggtctcggtggccaacgtgatcggagccatgtgttttggccagcattttcctgagagtagtgatgaaatgctttctctcgtgaagaatacacacgagttcgtagaaaccgcctcctctggcaacccattagactttttccctatcctgagatacctcccaaatccggctcttcagaggttcaaagcgttcaaccagaggttcttgtggtttctgcagaaaaccgtgcaggagcattatcaagatttcgataaaaattctgtgcgggacatcactggggcgctgttcaagcactccaagaaggggcctcgagcatctggtaacctgatcccgcaggagaaaatcgtaaatcttgtcaacgatatctttggtgctggcttcgacaccgtgacaacagccatttcatggagcctcatgtatttagtaacaaaacctgaaatccagagaaaaatacaaaaagaactggatactgttatcggacgagagagaaggccacgtctgtccgatcgcccccaactgccatatctggaggctttcatattggaaacttttagacactccagtttcttaccatttactatccctcatagcacgacacgagacactacgcttaacggattctacatacccaagaaatgttgcgtgtttgtgaaccagtggcaggtgaaccacgacccagaactgtgggaggatccaagcgagtttcgacctgaaagatttctgacagcggatggcacagccattaataaacctttgtcggaaaagatgatgctcttcgggatgggaaagaggcgatgtataggagaagtgctcgctaagtgggaaatctttctctttctcgcaatcttgcttcagcagctggagttctccgttcctccaggggtgaaggtagacttaactcccatatatggcttaacgatgaaacatgccagatgtgaacacgtgcaggccaggttgcggttcagtatcaactag

SEQ ID NO: 15325 - DNA, 1551 bp, Artificial Sequence
  derived and/or modified sequence
atggccctgagccagagcgttccattcagcgcaacggagctgctcctggcttcggctattttctgtctggtgttttgggttttgaaaggactgcggcctagagttccaaagggcctcaaaagtcctcctgagccctggggctggcctctgttaggccatgtactgacattgggcaaaaacccccacctagccttgtcccgtatgtctcagaggtacggagatgtgctgcagattagaattggctcgacgccagtgctggtgctgagccgactcgatactatcaggcaggcattggtgaggcagggcgacgattttaaaggcagaccggatctttacacgtccactttaatcaccgacgggcaatcgctcaccttcagcaccgattctggccctgtctgggctgcacgacgcagactggctcaaaacgccctgaacactttttctattgccagcgacccagcttcttcttcttcgtgctaccttgaggagcatgtctccaaggaggcgaaggctctgataagtaggttacaggagttgatggccggacccggtcatttcgacccctacaaccaggtcgtggtgtcggtggctaatgtaataggagccatgtgctttgggcagcattttccagaatcgagcgatgaaatgctatctttggtgaaaaacactcatgagttcgtggagacagcctcctcaggaaacccgctcgatttcttcccgattctgaggtacttaccaaacccggcactacagcgatttaaggcattcaatcagcgcttcctgtggtttctacagaagacagtgcaggagcattatcaagattttgataaaaactccgtcagggatataaccggcgcactcttcaaacattcaaagaaaggtcccagggcctccgggaacttgattccccaggaaaaaatcgtgaatttggtgaacgacattttcggagccggattcgatacagtgacaacggccatatcatggagtctgatgtacctcgtcactaagcctgaaattcaacgcaaaatccaaaaagagttagacaccgtgattgggagagagcgacggcctcggcttagcgatcgccctcagctgccatatctcgaggcatttatcttggagacctttcgtcacagcagtttcttaccattcacaatcccccacagcacaacccgcgacacaacactaaatggattctatatcccaaagaaatgctgtgtgttcgtgaaccagtggcaggtaaaccacgatccggagctttgggaagaccccagcgagtttcgtccagagagatttctgactgctgacggaactgcaatcaacaagcccctgagcgagaaaatgatgctcttcggaatgggcaagagacgttgtattggagaagtacttgctaaatgggagatctttctgttccttgccattctcctgcagcaactcgagttctccgtacctcccggagtcaaagtggatctgaccccaatttacggcctgactatgaagcacgctagatgtgaacatgtccaagcacgactgaggttcagcattaattag

SEQ ID NO: 15326 - DNA, 3127 bp, Artificial Sequence
  derived and/or modified sequence
gaagctccacaccagccattacaaccctgccaatctcaagcacctgcctctacagttggtacagatggcattgtcccagtctgttcccttctcggccacagagcttctcctggcctctgccatcttctgcctggtattctgggtgctcaagggtttgaggcctcgggtccccaaaggcctgaaaagtccaccagagccatggggctggcccttgctcgggcatgtgctgaccctggggaagaacccgcacctggcactgtcaaggatgagccagcgctacggggacgtcctgcagatccgcattggctccacgcccgtgctggtgctgagccgcctggacaccatccggcaggccctggtgcggcagggcgacgatttcaagggccggcctgacctctacacctccaccctcatcactgatggccagagcttgaccttcagcacagactctggaccggtgtgggctgcccgccggcgcctggcccagaatgccctcaacaccttctccatcgcctctgacccagcttcctcatcctcctgctacctggaggagcatgtgagcaaggaggctaaggccctgatcagcaggttgcaggagctgatggcagggcctgggcacttcgacccttacaatcaggtggtggtgtcagtggccaacgtcattggtgccatgtgcttcggacagcacttccctgagagtagcgatgagatgctcagcctcgtgaagaacactcatgagttcgtggagactgcctcctccgggaaccccctggacttcttccccatccttcgctacctgcctaaccctgccctgcagaggttcaaggccttcaaccagaggttcctgtggttcctgcagaaaacagtccaggagcactatcaggactttgacaagaacagtgtccgggacatcacgggtgccctgttcaagcacagcaagaaggggcctagagccagcggcaacctcatcccacaggagaagattgtcaaccttgtcaatgacatctttggagcaggatttgacacagtcaccacagccatctcctggagcctcatgtaccttgtgaccaagcctgagatacagaggaagatccagaaggagctggacactgtgattggcagggagcggcggccccggctctctgacagaccccagctgccctacttggaggccttcatcctggagaccttccgacactcctccttcttgcccttcaccatcccccacagcacaacaagggacacaacgctgaatggcttctacatccccaagaaatgctgtgtcttcgtaaaccagtggcaggtcaaccatgacccagagctgtgggaggacccctctgagttccggcctgagcggttcctcaccgccgatggcactgccattaacaagcccttgagtgagaagatgatgctgtttggcatgggcaagcgccggtgtatcggggaagtcctggccaagtgggagatcttcctcttcctggccatcctgctacagcaactggagttcagcgtgccgccgggcgtgaaagtcgacctgacccccatctacgggctgaccatgaagcacgcccgctgtgaacatgtccaggcgcggctgcgcttctccatcaactgaagaagacaccaccattctgaggccagggagcgagtgggggccagccacggggactcagcccttgtttctcttcctttctttttttaaaaaatagcagctttagccaagtgcagggcctgtaatcccagcattttaggaggccaaggttggaggatcatttgagcccaggaattggaaagcagcctggccaacatagtgggaccctgtctctacaaaaaaaaaatttgccaagagcctgagtgacagagcaagaccccatctcaaaaaaaaaaacaaacaaacaaaaaaaaaaccatatatatacatatatatatagcagctttatggagatataattcttatgccatataattcaccttctttttttttttttgtctgagacagaatctcagtctgtcacccaggttggagtgcagtggcgtgatctcagctcactgcaacctccacctcgcaggttcaagcaatcctcccacttcagcctcccaagcacctgggattacaagcatgagtcactacgcctggctgatttttgtagttttagtggagatggggtttcaccatgttggccaggcttgtctcgaactcctgaccccaagttatccacctgccttggcttcccaaagtcctgggattacaggtgtgagccaccacatccagcctaacttacattcttaaagtgtcgaatgacttctagtgtagaattgtgcaaccatcaccagaattaattttattattcttattatttttgagacagagtcttactctgttgccaggctggagtgcagtggcgcgatctcagctcactacaacctccgcctcccatgttcaagcgattctcctgcctcagcctcccgagtagctgggactataggcatgcgccaccatggccagctaatttttgtatttttagtagagacgaggtttcactgtgttggccaggatggtctccatctcttgacctcgtgatccacccgcctcagcctcccaaagtgctgggattaacaggtatgaaccaccgcgcccagcctttttgttttttttttttttgagacagagtcttcctctgtctcctaagctggagtgcagtggcatcatctcagctcactgcaacctctgcctcccaggttcaagtgcttctccagcctcagcctcccaagtagctgagactacaggcacacaccaccacgcctggctaatttttgtatttttagtagagacgggtttcaccatgttggctagactagtctcaaactcctgacctcaagtgatctgcccgcctcgacctctctcaaagtgctggcattacaggtgtgagccacggtgcccggcccacaattaattttagaacattttcatcacccctaaaagaaaccctgcacccattagcagtccctccacatttccccctagcctgcctcccctgcctcaccagccctggcaactgctaatctactttctgtgtctatggatttgccttctctaaacatttcatataaatggaattacacaatg

SEQ ID NO: 15327 - DNA, 1551 bp, Artificial Sequence
  derived and/or modified sequence
atggccctgagccagagcgtgcccttcagcgccaccgagctgctgctggccagcgccatcttctgcctggtgttctgggtgctgaagggcctgagacccagagtgcccaagggcctgaagagcccccccgagccctggggctggcccctgctgggccacgtgctgaccctgggcaagaacccccacctggccctgagcagaatgagccagagatacggcgacgtgctgcagatcagaatcggcagcacccccgtgctggtgctgagcagactggacaccatcagacaggccctggtgagacagggcgacgacttcaagggcagacccgacctgtacaccagcaccctgatcaccgacggccagagcctgaccttcagcaccgacagcggccccgtgtgggccgccagaagaagactggcccagaacgccctgaacaccttcagcatcgccagcgaccccgccagcagcagcagctgctacctggaggagcacgtgagcaaggaggccaaggccctgatcagcagactgcaggagctgatggccggccccggccacttcgacccctacaaccaggtggtggtgagcgtggccaacgtgatcggcgccatgtgcttcggccagcacttccccgagagcagcgacgagatgctgagcctggtgaagaacacccacgagttcgtggagaccgccagcagcggcaaccccctggacttcttccccatcctgagatacctgcccaaccccgccctgcagagattcaaggccttcaaccagagattcctgtggttcctgcagaagaccgtgcaggagcactaccaggacttcgacaagaacagcgtgagagacatcaccggcgccctgttcaagcacagcaagaagggccccagagccagcggcaacctgatcccccaggagaagatcgtgaacctggtgaacgacatcttcggcgccggcttcgacaccgtgaccaccgccatcagctggagcctgatgtacctggtgaccaagcccgagatccagagaaagatccagaaggagctggacaccgtgatcggcagagagagaagacccagactgagcgacagaccccagctgccctacctggaggccttcatcctggagaccttcagacacagcagcttcctgcccttcaccatcccccacagcaccaccagagacaccaccctgaacggcttctacatccccaagaagtgctgcgtgttcgtgaaccagtggcaggtgaaccacgaccccgagctgtgggaggaccccagcgagttcagacccgagagattcctgaccgccgacggcaccgccatcaacaagcccctgagcgagaagatgatgctgttcggcatgggcaagagaagatgcatcggcgaggtgctggccaagtgggagatcttcctgttcctggccatcctgctgcagcagctggagttcagcgtgccccccggcgtgaaggtggacctgacccccatctacggcctgaccatgaagcacgccagatgcgagcacgtgcaggccagactgagattcagcatcaactag

SEQ ID NO: 15328 - protein, 269 aa, Artificial Sequence
  derived and/or modified sequence
GLLLVALLASLTVMVLMSVWQQRKSRGKLPLGPTPLLFIGNYLQLNTEHICDSIMKISERYGPVFTIHLGPRRVVVLCGHDAVKEALVDQAEEFSGRGEQATFDWLFKGYGVTCRTWERTKPLRRFSIATLRDFGVGKRGIKEIQEKAGFLIKAHQSSDSSIYPTFFLSRTTSNVISSIVFGDRFDYEDKFLSLLCMMLESFQFTAPSTGQLYEMFSSVMKHLPGPQQQAFKELQGLEDFIAKKVEHNQCTLDPNSPRDFIDSFLIRMQ

SEQ ID NO: 15329 - protein, 219 aa, Artificial Sequence
  derived and/or modified sequence
LEKEEKNPNTEFYLKNLVLTTLNLFVGGTETVSTTLHYGFLLLMKHPEVEAKVHEIDRVIGKNQQPKFEDRAKTLYTEAVIHEIQRFGDLLPMGVSRRVKKDTKFRDFFLSKGIEVFPMLGSVLRDLRFFSNPRDFNPQHFLGEKGQFKKRDAFVPFSIRRRNCFREGLARMELFLYLTTIMQNFRFKSRQSPKDIVVSPKHVGFVTIPRNYTKCYLPC

SEQ ID NO: 15330 - protein, 494 aa, Artificial Sequence
  derived and/or modified sequence
MLASGMLLVALLVCLTVMVLMSVWQQRKSKGKLPPGPTPLPFIGNYLQLNTEQMYNSLMKISERYGPVFTIHLGPRRVVVLCGHDAVREALVDQAEEFSGRGEQATFDWVFKGYGVVFSNGERAKQLRRFSIATLRDFGVGKRGIEERIQEEAGFLIDALRGTGGANIDPTFFLSRTVSNVISSIVFGDRFDYKDKEFLSLLRMMLGIFQFTSTSTGQLYEMFSSVMKHLPGPQQQAFQLLQGLEDFIAKKVEHNQRTLDPNSPRDFIDSFLIRMQEEEKNPNTEFYLKNLVMTTLNLFIGGTETVSTTLRYGFLLLMKHPEVEAKVHEEIDRVIGKNRQPKFEDRAKMPYMEAVIHEIQRFGDVIPMSLARRVKKDTKFRDFFLPKGTEVFPMLGSVLRDPSFFSNPQDFNPQHFLNEKGQFKKSDAFVPFSIGKRNCFGEGLARMELFLFFTTVMQNFRLKSSQSPKDIDVSPKHVGFATIPRNYTMSFLPR

SEQ ID NO: 15331 - DNA, 1485 bp, Artificial Sequence
  derived and/or modified sequence
atgttagcaagcggcatgctcttagtggcccttctcgtctgcctcacggttatggttcttatgagcgtgtggcagcagagaaagtccaagggaaagctgccaccagggccaacccctctgcccttcatcgggaattacctgcagctgaatacagaacagatgtataactccttgatgaagatctcggaacgctacgggcccgtgtttacgattcatttgggaccaagacgcgtggttgtgctatgtgggcatgacgctgttagggaagccctggtcgaccaggcagaagaattcagcgggcgtggcgagcaggccacattcgactgggtattcaagggctatggcgtagtattcagtaatggggagagagccaagcagctgagacggttttcaatcgccacgctgagggatttcggagtggggaagagagggatcgaagagcgcatacaggaagaagcaggattcctgatcgatgctctgcgaggcaccggcggggccaacatcgatcccaccttcttcttaagccgtacggtgagcaacgttatatccagtatcgtgtttggcgataggttcgactataaggacaaggaattcctttctcttttacgcatgatgctcgggatcttccagtttacttctacttcaaccggtcagctgtatgaaatgttctcttctgtgatgaagcacctgccagggccccaacagcaggcattccagctactgcaggggctggaagattttatcgctaaaaaagtggaacacaatcaacgaacccttgatccgaacagtccccgcgatttcatagacagctttttgataaggatgcaggaagaagagaaaaatccgaataccgagttttatctcaagaatctcgtcatgaccaccctgaatctgttcatcgggggtaccgaaactgtgtcgacgacactgcggtacggcttcctcctactcatgaagcaccctgaagtggaggcaaaggtgcatgaagagattgaccgagttattgggaagaatagacagcctaaatttgaagacagggcgaagatgccatacatggaggctgtaatacatgaaattcagcggtttggcgacgtaatccccatgtctctggcccgcagggtcaaaaaggacaccaagtttagagacttcttcctgcctaaggggactgaggttttcccaatgctgggctctgtgctccgagatccatcattctttagtaatccacaggatttcaatccccagcactttttgaacgagaagggacagttcaaaaaatctgacgcatttgtacctttttccattggaaagcgtaactgttttggcgaagggctcgcgcgtatggaactcttcctgttctttaccacagttatgcaaaattttcgtctgaagagttctcagtccccaaaagacattgatgtgagccccaagcatgttgggttcgccacgattcctagaaactatacgatgagttttcttccccgctag

SEQ ID NO: 15332 - DNA, 1485 bp, Artificial Sequence
  derived and/or modified sequence
atgctggccagcggcatgctgctggtggccctgctggtgtgcctgactgtgatggtgctgatgtctgtgtggcagcagaggaagagcaagggcaagctgcccccaggccccacccccctgcccttcatcggcaactacctgcagctgaacacagagcagatgtacaacagcctgatgaagatcagcgagagatatggccctgtgttcaccatccacctgggcccccggcgggtggtggtgctgtgtggccatgatgctgtgcgggaggccctggtggaccaggccgaggagttcagcggccgcggggagcaggccacctttgactgggtgttcaagggctacggcgtggtgttcagcaatggagagcgggccaagcagctgcggcgcttcagcatcgccaccctgcgggactttggagtgggcaagaggggcatcgaggagcgcatccaggaggaggccggcttcctgattgatgccctgcggggcactggaggagccaacatcgaccccaccttcttcctgagcaggacagtgtccaatgtcatcagcagcatcgtgtttggagacagatttgactacaaggacaaggagttcctgagcctgctgaggatgatgctgggcatcttccagttcaccagcaccagcacaggccagctgtatgagatgttcagctctgtgatgaagcacctgcccggcccccagcagcaggccttccagctgctgcagggcctggaggacttcatcgccaagaaggtggagcacaaccagaggaccctggaccccaacagcccccgggacttcatcgacagcttcctgatccgcatgcaggaggaggagaagaaccccaacacagagttctacctgaagaacctggtgatgaccaccctgaacctcttcatcggcggcacagaaacagtgtccaccaccctgcgctatggcttcctgctgctgatgaagcaccctgaggtggaggccaaggtgcatgaggagattgacagagtgattggcaagaaccggcagcccaagtttgaggaccgggccaagatgccctacatggaggccgtcatccacgagatccagagatttggagatgtgatccccatgagcctggcccggcgggtgaagaaggacaccaagttccgggacttcttcctgcccaagggcacagaggtgttccccatgctgggctctgtgctgcgggaccccagcttcttcagcaacccccaggacttcaacccccagcacttcctgaatgagaagggccagttcaagaagagtgatgcctttgtgcccttcagcatcggcaagaggaactgcttcggggagggcctggccaggatggagctgttcctgttcttcaccaccgtgatgcagaacttccggctgaagagcagccagagccccaaggacattgatgtgagccccaagcacgtgggctttgccaccatccccaggaactacaccatgtccttcctgcccaggtag

SEQ ID NO: 15333 - DNA, 1485 bp, Artificial Sequence
  derived and/or modified sequence
atgctggccagcggcatgctgctggtggccctgctggtgtgcctgacagtaatggtactcatgtctgtctggcagcagcgcaagagtaaaggaaaactccctcctgggcccacaccgctgccatttatcggaaactatctccagctgaacaccgagcagatgtataacagcttgatgaagataagtgaacgatacgggcctgtgttcacaattcatcttgggcctagacgcgttgtggtcttgtgtggccatgacgcagtgagggaggcccttgtagatcaggccgaggagttctcgggccggggcgagcaggctacattcgattgggtgtttaaggggtacggtgttgtctttagtaatggtgaacgcgctaagcagcttagaaggttctctattgccaccttacgcgactttggagtgggcaagagaggaatcgaggagcgcatacaggaagaagccggtttcctcattgatgcactgcgcgggaccggcggtgctaatattgaccccacattcttcctgagcaggactgtgtcgaacgtgatctcatcaatagttttcggagatcggttcgactacaaggacaaggagtttttaagcttattgcggatgatgctggggatctttcaattcacaagcacatcaaccgggcagctgtatgaaatgttttccagtgttatgaaacatttgcccgggcctcagcagcaagccttccaactgttacagggtctggaagattttatcgctaagaaagtggaacacaatcagagaacccttgatcctaacagcccccgcgactttatagactccttcctgatcagaatgcaggaggaagaaaaaaacccaaacactgagttttatctaaagaatctggtgatgacgacattgaacctgttcattgggggaactgaaaccgtaagcaccacccttcggtacggctttcttttgttgatgaagcaccccgaggtggaagccaaggtgcacgaagaaatcgaccgcgtgattggaaagaacagacagccaaaatttgaagaccgcgcgaaaatgccctacatggaagctgtgatccatgagatccagaggttcggcgacgtgatccctatgagcctggcgaggagagtgaagaaagacacgaagtttagagattttttccttcctaaggggacagaagtgtttcccatgttgggttcagttcttagagatccatcgttcttttccaatccccaggactttaaccctcagcattttctgaacgagaaaggccagtttaagaaaagcgatgccttcgtccctttcagtattggaaagcgcaattgttttggcgaggggctggcaaggatggagttgttcctgttttttaccaccgtgatgcagaactttcggctaaagtctagtcaatcacctaaggacatagatgtgtctcctaagcacgtgggattcgcaactatccctagaaattacacaatgtctttcctgcctagatag

SEQ ID NO: 15334 - DNA, 1485 bp, Artificial Sequence
  derived and/or modified sequence
atgctggcttctggcatgctgctggttgcattactcgtgtgtctgacagtgatggtgctaatgtctgtctggcagcagcgaaagtcaaagggcaagttaccgccaggacctaccccactaccttttatcggaaactatctgcagctcaacactgaacagatgtacaacagcctgatgaagattagcgaacgctacggcccagtctttactatccaccttggcccaaggagagtggtggtgctgtgcggacacgacgctgttcgtgaagccctggtggaccaagctgaggaattctccggacgtggcgagcaggccaccttcgattgggtgttcaaggggtacggagtggtctttagcaatggcgaacgggctaagcaactacgtcgcttttctattgcaaccttgagagatttcggggtgggaaaacgcggtatcgaggaacggatccaggaggaagcaggttttctcatcgacgccctgagggggacaggcggtgcaaacattgatccaaccttctttctgtcacgaaccgtgagcaacgtcattagcagtatcgtgttcggtgaccggtttgactacaaggacaaagagttcctttcacttcttaggatgatgttagggatttttcaatttacatccacctcaaccggccagttatacgaaatgttctcttcggtgatgaaacatctgccaggaccacagcaacaggcatttcagctccttcaaggcctcgaagacttcatcgccaagaaagttgagcacaatcagagaacccttgacccaaatagcccgcgtgattttatcgactcattcttgatcaggatgcaggaggaagagaagaacccgaacactgagttctacctgaagaatctggtcatgactactctcaacttgtttatcgggggtacggaaaccgtttccactactctgagatacgggttcttgcttctgatgaagcatcctgaagtggaggccaaggtccacgaggaaatagatagggtaataggcaagaaccgccagcctaagttcgaagaccgggctaaaatgccatacatggaggcagtgattcatgagatccaaaggtttggcgatgtgatacctatgagtctagccagacgcgtgaaaaaagacaccaagttcagggatttcttcctgccaaagggaactgaagtgtttcctatgctgggaagcgtgctgagagatccatcttttttctccaacccacaagacttcaatccacagcacttcctgaacgagaaaggccagttcaaaaaatcagatgcctttgtcccattctctatcggcaagcgtaattgtttcggggaagggctagcgaggatggagttgtttctgttctttactaccgtgatgcagaattttagactcaaaagttcacagagtccaaaagacattgatgtgagtccaaaacacgttgggttcgccacgatccccagaaattacactatgtcattcctccccagatag

SEQ ID NO: 15335 - DNA, 1763 bp, Artificial Sequence
  derived and/or modified sequence
atctatcatcccactaccaccatgctggcctcagggatgcttctggtggccttgctggtctgcctgactgtaatggtcttgatgtctgtttggcagcagaggaagagcaaggggaagctgcctccgggacccaccccattgcccttcattggaaactacctgcagctgaacacagagcagatgtacaactccctcatgaagatcagtgagcgctatggccccgtgttcaccattcacttggggccccggcgggtcgtggtgctgtgtggacatgatgccgtcagggaggctctggtggaccaggctgaggagttcagcgggcgaggcgagcaagccaccttcgactgggtcttcaaaggctatggcgtggtattcagcaacggggagcgcgccaagcagctccggcgcttctccatcgccaccctgcgggacttcggggtgggcaagcgaggcatcgaggagcgcatccaggaggaggcgggcttcctcatcgacgccctccggggcactggcggcgccaatatcgatcccaccttcttcctgagccgcacagtctccaatgtcatcagctccattgtctttggggaccgctttgactataaggacaaagagttcctgtcactgttgcgcatgatgctaggaatcttccagttcacgtcaacctccacggggcagctctatgagatgttctcttcggtgatgaaacacctgccaggaccacagcaacaggcctttcagttgctgcaagggctggaggacttcatagccaagaaggtggagcacaaccagcgcacgctggatcccaattccccacgggacttcattgactcctttctcatccgcatgcaggaggaggagaagaaccccaacacggagttctacttgaaaaacctggtgatgaccacgttgaacctcttcattgggggcaccgagaccgtcagcaccaccctgcgctatggcttcttgctgctcatgaagcacccagaggtggaggccaaggtccatgaggagattgacagagtgatcggcaagaaccggcagcccaagtttgaggaccgggccaagatgccctacatggaggcagtgatccacgagatccaaagatttggagacgtgatccccatgagtttggcccgcagagtcaaaaaggacaccaagtttcgggatttcttcctccctaagggcaccgaagtgttccctatgctgggctctgtgctgagagaccccagtttcttctccaacccccaggacttcaatccccagcacttcctgaatgagaaggggcagtttaagaagagtgatgcttttgtgcccttttccatcggaaagcggaactgtttcggagaaggcctggccagaatggagctctttctcttcttcaccaccgtcatgcagaacttccgcctcaagtcctcccagtcacctaaggacattgacgtgtcccccaaacacgtgggctttgccacgatcccacgaaactacaccatgagcttcctgccccgctgagcgagggctgtgccggtgcaggtctggtgggcggggccagggaaagggcagggccaagaccgggcttgggagaggggcgcagctaagactgggggcaggatggcggaaaggaaggggcgtggtggctagagggaagagaagaaacagaagcggctcagttcaccttgataaggtgcttccgagctgggatgagaggaaggaaacccttacattatgctatgaagagtagtaataatagcagctcttatttcctgagc

SEQ ID NO: 15336 - DNA, 1485 bp, Artificial Sequence
  derived and/or modified sequence
atgctggccagcggcatgctgctggtggccctgctggtgtgcctgaccgtgatggtgctgatgagcgtgtggcagcagagaaagagcaagggcaagctgccccccggccccacccccctgcccttcatcggcaactacctgcagctgaacaccgagcagatgtacaacagcctgatgaagatcagcgagagatacggccccgtgttcaccatccacctgggccccagaagagtggtggtgctgtgcggccacgacgccgtgagagaggccctggtggaccaggccgaggagttcagcggcagaggcgagcaggccaccttcgactgggtgttcaagggctacggcgtggtgttcagcaacggcgagagagccaagcagctgagaagattcagcatcgccaccctgagagacttcggcgtgggcaagagaggcatcgaggagagaatccaggaggaggccggcttcctgatcgacgccctgagaggcaccggcggcgccaacatcgaccccaccttcttcctgagcagaaccgtgagcaacgtgatcagcagcatcgtgttcggcgacagattcgactacaaggacaaggagttcctgagcctgctgagaatgatgctgggcatcttccagttcaccagcaccagcaccggccagctgtacgagatgttcagcagcgtgatgaagcacctgcccggcccccagcagcaggccttccagctgctgcagggcctggaggacttcatcgccaagaaggtggagcacaaccagagaaccctggaccccaacagccccagagacttcatcgacagcttcctgatcagaatgcaggaggaggagaagaaccccaacaccgagttctacctgaagaacctggtgatgaccaccctgaacctgttcatcggcggcaccgagaccgtgagcaccaccctgagatacggcttcctgctgctgatgaagcaccccgaggtggaggccaaggtgcacgaggagatcgacagagtgatcggcaagaacagacagcccaagttcgaggacagagccaagatgccctacatggaggccgtgatccacgagatccagagattcggcgacgtgatccccatgagcctggccagaagagtgaagaaggacaccaagttcagagacttcttcctgcccaagggcaccgaggtgttccccatgctgggcagcgtgctgagagaccccagcttcttcagcaacccccaggacttcaacccccagcacttcctgaacgagaagggccagttcaagaagagcgacgccttcgtgcccttcagcatcggcaagagaaactgcttcggcgagggcctggccagaatggagctgttcctgttcttcaccaccgtgatgcagaacttcagactgaagagcagccagagccccaaggacatcgacgtgagccccaagcacgtgggcttcgccaccatccccagaaactacaccatgagcttcctgcccagatag

SEQ ID NO: 15337 - protein, 494 aa, Artificial Sequence
  derived and/or modified sequence
MLASGLLLVALLACLTVMVLMSVWQQRKSRGKLPPGPTPLPFIGNYLQLNTEHICDSIMKFSECYGPVFTIHLGPRRVVVLCGHDAVREALVDQAEEFSGRGEQATFDWVFKGYGVAFSNGERAKQLLRFAIATLRDFGVGKRGIEERIQEESGFLIEAIRSTHGANIDPTFFLSRTVSNVISSIVFGDRFDYEDKEFLSLLSMMLGIFQFTSTSTGQLYEMFSSVMKHLPGPQQQAFKLLQGLEDFIAKKVEHNQRTLDPNSPQDFIDSFLIHMQEEEKNPNTEFYLKNLMMSTLNLFIAGTETVSTTLRYGFLLLMKHPEVEAKVHEEIDRVIGKNRQPKFEDRTKMPYMEAVIHEIQRFGDVIPMSLARRVKKDTKFRDFFLPKGTEVFPMLGSVLRDPSFFSNPQDFNPQHFLDDKGQFKKSDAFVPFSIGKRNCFGEGLARMELFLFFTTVMQNFRLKSSQSPKDIDVSPKHVVFATIPRNYTMSFLPR

SEQ ID NO: 15338 - DNA, 1485 bp, Artificial Sequence
  derived and/or modified sequence
atgttggcttcagggctgttactggtcgctttacttgcctgtttgaccgtaatggttctgatgagtgtatggcagcagcgtaaaagccgcgggaaactgcctccaggacctaccccattgccattcattggaaactatctacagctgaacacggaacacatctgcgattcgattatgaagttcagtgaatgttacggcccagtattcactatccatctcgggccacggagggtggtagtgctctgcggtcatgatgcagttagggaagcgctggtggaccaggccgaagagttctcaggccgaggagaacaagccaccttcgactgggtgttcaagggttacggggtggcttttagtaacggggagagagcaaaacaacttttacggtttgcgatagccacattgcgcgatttcggagttggcaaaaggggcatagaggagcgcatccaggaggaaagcggctttttaatcgaagccatcaggagcacccacggcgcaaatattgatccgactttttttctgtcacgcactgtgtcaaacgtgatctctagcatcgtgtttggtgatcgatttgactacgaagacaaggaatttctctctctcctgagtatgatgctgggaatcttccagttcacctccacatcaaccggacagttgtacgagatgttttcctccgtgatgaaacatctacccggaccccagcagcaggcattcaagcttctgcaggggctggaagattttatcgcaaagaaagtcgagcacaatcaacgcaccctcgatcctaatagcccccaggattttatcgattccttcctgattcacatgcaggaagaagagaagaatcctaacaccgagttttacttgaaaaacctgatgatgtccaccctgaacctgttcattgccgggactgagaccgtctcgaccaccctccggtacggatttctgctcctcatgaagcatccggaggtcgaggcaaaggtccacgaggaaatagatcgagtgatcggcaagaacagacagcccaaattcgaggatcgcaccaagatgccttacatggaggccgtcatccatgagattcaaagatttggcgacgtaattcccatgtctctcgcgaggagggtgaaaaaggatactaagtttcgcgacttcttcctgcccaaaggaacagaggtgttccccatgctcgggagcgtgcttcgagacccatcatttttcagcaatccccaagacttcaaccctcaacattttttagatgataaaggtcaattcaagaaaagcgacgcttttgtgcctttttctataggcaagaggaactgcttcggggagggactggctcgaatggaattattcctctttttcaccacagtgatgcagaatttccgactcaaatccagccagagtccaaaggatatagacgtctcacctaaacacgtagtgttcgcgaccatcccccgcaactataccatgtcattcttgccacgttag

SEQ ID NO: 15339 - DNA, 1485 bp, Artificial Sequence
  derived and/or modified sequence
atgctggccagcggcctgctgctggtggccctgctggcctgcctgactgtgatggtgctgatgtctgtgtggcagcagaggaagagccggggcaagctgcccccaggccccacccccctgcccttcatcggcaactacctgcagctgaacacagagcacatctgtgacagcatcatgaagttctctgaatgttatggccctgtgttcaccatccacctgggcccccggcgggtggtggtgctgtgtggccatgatgctgtgcgggaggccctggtggaccaggccgaggagttcagcggccgcggggagcaggccacctttgactgggtgttcaagggctacggcgtggccttcagcaatggagagcgggccaagcagctgctgcgctttgccatcgccaccctgcgggactttggagtgggcaagaggggcatcgaggagcgcatccaggaggagagcggcttcctgattgaggccatccgcagcacccacggggccaacatcgaccccaccttcttcctgagcaggacagtgtccaatgtcatcagcagcatcgtgtttggagacagatttgattatgaggacaaggagttcctgagcctgctgtccatgatgctgggcatcttccagttcaccagcaccagcacaggccagctgtatgagatgttcagctctgtgatgaagcacctgcccggcccccagcagcaggccttcaagctgctgcagggcctggaggacttcatcgccaagaaggtggagcacaaccagaggaccctggaccccaacagcccccaggacttcatcgacagcttcctgatccacatgcaggaggaggagaagaaccccaacacagagttctacctgaagaacctgatgatgagcaccctgaacctcttcatcgccggcacagaaacagtgtccaccaccctgcgctatggcttcctgctgctgatgaagcaccctgaggtggaggccaaggtgcatgaggagattgacagagtgattggcaagaaccggcagcccaagtttgaggacaggaccaagatgccctacatggaggccgtcatccacgagatccagagatttggagatgtgatccccatgagcctggcccggcgggtgaagaaggacaccaagttccgggacttcttcctgcccaagggcacagaggtgttccccatgctgggctctgtgctgcgggaccccagcttcttcagcaacccccaggacttcaacccccagcacttcctggatgacaagggccagttcaagaagagtgatgcctttgtgcccttcagcatcggcaagaggaactgcttcggggagggcctggccaggatggagctgttcctgttcttcaccaccgtgatgcagaacttccggctgaagagcagccagagccccaaggacattgatgtgagccccaagcacgtggtgtttgccaccatccccaggaactacaccatgtccttcctgcccaggtag

SEQ ID NO: 15340 - DNA, 1485 bp, Artificial Sequence
  derived and/or modified sequence
atgctggccagcggcctgctgctggtggccctgctggcctgcctgaccgttatggtgctaatgtcagtgtggcagcagagaaagtcccgaggtaagctccctcctggccccacccccctcccttttatcggtaattatctgcagctgaacacagaacacatatgcgactcaattatgaagttcagcgagtgttacggacctgtcttcacaatccacctaggccctaggcgggtcgttgttctctgcggacatgacgctgtgagggaagcattggtggatcaagctgaagaattctctggccggggggaacaggcaacattcgactgggtgttcaagggctacggggttgccttttccaacggagaacgcgctaagcagttgttaaggtttgccatcgctacacttcgggatttcggcgtgggcaaaaggggtattgaagaacgcatccaggaagaatccggctttctgattgaggctattcggtcgactcatggcgccaatatagatccgacgtttttcttatcgagaaccgtttccaatgtgatctcctctattgtctttggggatagattcgactacgaagataaggagttcctgtccttgcttagtatgatgctaggcattttccagtttacatcgaccagcacagggcagctctacgaaatgttttcgagtgtgatgaagcacttgcccggcccgcaacagcaagcctttaaactcttgcaagggctggaggatttcattgcaaagaaggtggagcacaaccagcggacgctggaccccaactccccacaggatttcatagacagttttctgatccacatgcaagaggaagagaagaatcctaacactgaattttacctgaaaaatttaatgatgtctaccctgaatctgttcatagccgggacagaaactgtgtctactaccttaaggtatggcttcctgctgctgatgaaacatcctgaagtggaagcaaaggtccatgaggagatcgatcgtgtgatcggcaagaacagacaaccaaaattcgaggacaggaccaagatgccgtacatggaagcggtgattcatgagattcagaggtttggcgatgtcattccaatgagcttggcccgaagggttaaaaaggatactaagttccgggactttttcctcccaaagggcacagaggttttccccatgcttggatcagtgctgagggacccgtcattttttagtaacccacaggatttcaatccacaacatttcctggacgacaagggccagtttaagaagtctgatgcctttgtacctttttccatcggcaagcgtaattgtttcggagaggggctcgctcgtatggagctttttttattttttaccacagtgatgcagaactttaggttgaagtctagccaatcacctaaggatatagatgtctctcccaaacatgtcgtctttgccaccatcccacgcaattacacaatgtcctttcttcccagatag

SEQ ID NO: 15341 - DNA, 1485 bp, Artificial Sequence
  derived and/or modified sequence
atgctggcctctggtctcctgttggtcgccctgctggcttgtttgacggtgatggtgctgatgtctgtgtggcagcaacggaagtcgcgcggtaagcttccacccggacccacacccctgcctttcatcggtaattacttacagctgaataccgagcacatctgcgactcaattatgaagtttagtgaatgttacggaccagtcttcaccatccatctgggaccgcgtcgcgtagtcgtgttgtgcggccacgacgccgttcgcgaggccctagtcgatcaagccgaagaattttccgggaggggtgaacaggcaacgttcgattgggtgtttaaaggatacggggtggcattcagcaatggggagagggctaaacaactcctgcgcttcgcaattgcaacccttcgggacttcggcgtcggtaaacggggaatcgaagaacgcattcaggaggaatcaggattcctcatagaggctattaggagtacccatggtgccaacatcgacccgacttttttcctttctcgcacagtgagcaacgtgatctcctctattgttttcggggacaggttcgattacgaggacaaggagtttctgagtttactgtcaatgatgttgggtattttccagttcacgagtacttctaccggccagctttatgaaatgttttcatccgtcatgaagcacttgccgggaccacaacagcaggcattcaagctgcttcaggggctggaagattttatcgccaagaaagtcgaacacaatcagagaactctagaccctaacagccctcaggacttcatagattcctttttaattcatatgcaggaggaggagaaaaaccctaacaccgaattctatctcaagaatctcatgatgtccacacttaatctcttcatagctggaaccgaaaccgtgtccaccacacttaggtacggctttctgctacttatgaaacatccagaggttgaggcaaaggtgcatgaagaaattgatcgggtgatcgggaaaaatcgacagccgaaattcgaggatcgcacaaagatgccctatatggaggccgtgatacacgaaattcagcgatttggcgacgtcattcctatgtcccttgcacgacgggtcaaaaaggacacaaagtttagagatttttttctgcccaagggaaccgaagtgtttcctatgctaggttctgtcctgagggacccatcattcttctccaaccctcaggatttcaacccgcagcacttccttgacgataaagggcagtttaaaaaaagcgacgctttcgtgccctttagtatcggcaagcgtaactgtttcggtgaggggctggccagaatggaactgtttctgttttttactacagtaatgcagaatttcaggctgaagtccagtcagtcacccaaagacatcgatgtgagtcccaagcacgtggtcttcgccacgatccctcggaactatacaatgtcctttctacctcgctag

SEQ ID NO: 15342 - DNA, 2281 bp, Artificial Sequence
  derived and/or modified sequence
ccctgggtcttcctagccccgagactttcaagtccatatgcctggagtcccccctcctgagacccttaaccctgcatcctccgcaacagaagacctccagatgcacagccacacttccatctcaccctaataaaacccagacctttggattcctctcccttggaatgcccaaatccacaactttggggtgcattctcactctcagaccccaaatccaaagcccaagtgctcccctatgcaaatattccaaactcttcagttctacagtttatcggttgccccctcctaaatccacagccctgcggcacccctcctgaagtaccacagatttagtctggaggccccctctctgttcagctgccctggggtccccttatcctcccttgctggctgtgtcccaagctaggtggcattcatggtggggcgtgtagttgggaggtgaaataaggtgattatgtaattagccaaagtccatccctctttttcaggcagtataaaggcaaaccaccccacccatcaccatctgtcatctcactaccaccatgctggcctcagggctgcttctggtggccttgctggcctgcctgactgtgatggtcttgatgtctgtctggcagcagaggaagagcagggggaagctgcctccgggacccaccccactgcccttcattggaaactacctccagctgaacacagagcacatatgtgactccatcatgaagttcagtgagtgctatggccccgtgttcaccattcacttggggccccggcgggtcgtggtgctgtgtggacatgatgccgtcagggaggctctggtggaccaggctgaggagttcagcgggcgaggcgagcaagccaccttcgactgggtcttcaaaggctatggcgtggcgttcagcaacggggagcgcgccaagcagctcctgcgctttgccatcgccaccctgagggacttcggggtgggcaagcgaggcatcgaggagcgcatccaggaggagtcgggcttcctcatcgaggccatccggagcacgcacggcgccaatatcgatcccaccttcttcctgagccgcacagtctccaatgtcatcagctccattgtctttggggaccgctttgactatgaggacaaagagttcctgtcactgctgagcatgatgctaggaatcttccagttcacgtcaacctccacggggcagctctatgagatgttctcttcggtgatgaaacacctgccaggaccacagcaacaggcctttaagttgctgcaagggctggaggacttcatagccaagaaggtggagcacaaccagcgcacgctggatcccaattccccacaggacttcatcgactcctttctcatccacatgcaggaggaggagaagaaccccaacacggagttctacttgaagaacctgatgatgagcacgttgaacctcttcattgcaggcaccgagacggtcagcaccaccctgcgctatggcttcttgctgctcatgaagcacccagaggtggaggccaaggtccatgaggagattgacagagtgatcggcaagaaccggcagcccaagtttgaggaccggaccaagatgccctacatggaggcagtgatccacgagatccaaagatttggagacgtgatccccatgagtttggcccgcagggttaaaaaggacaccaagtttcgggattttttcctccctaagggcaccgaagtgttccctatgctgggctccgtgctgagagaccccagcttcttctccaaccctcaggacttcaatccccagcatttcctggatgacaaggggcagtttaagaagagtgatgcttttgtgcccttttccatcggaaagcggaactgtttcggagaaggcctggccagaatggagctctttctcttcttcaccaccgtcatgcagaacttccgcctcaagtcctcccagtcacctaaggacattgacgtgtcccccaaacacgtggtctttgccacgatcccacgaaactacaccatgagcttcctgccccgctgagcgagggctgtgccggtgcaggtctggtgggcggggccagggaaaggcggggtcagggcggggttcgcggaagaggcgggtataagaatggggggaagatgcgggaaaggaaggggcgtggtggctagagggaagagaagaaacagaagcggctcagttcaccttgataaggtgcttccgagctgggatgagaggaagggaaaccttacattatgctatgaagagtagtaataatagcagctcttatttcctga

SEQ ID NO: 15343 - DNA, 1485 bp, Artificial Sequence
  derived and/or modified sequence
atgctggccagcggcctgctgctggtggccctgctggcctgcctgaccgtgatggtgctgatgagcgtgtggcagcagagaaagagcagaggcaagctgccccccggccccacccccctgcccttcatcggcaactacctgcagctgaacaccgagcacatctgcgacagcatcatgaagttcagcgagtgctacggccccgtgttcaccatccacctgggccccagaagagtggtggtgctgtgcggccacgacgccgtgagagaggccctggtggaccaggccgaggagttcagcggcagaggcgagcaggccaccttcgactgggtgttcaagggctacggcgtggccttcagcaacggcgagagagccaagcagctgctgagattcgccatcgccaccctgagagacttcggcgtgggcaagagaggcatcgaggagagaatccaggaggagagcggcttcctgatcgaggccatcagaagcacccacggcgccaacatcgaccccaccttcttcctgagcagaaccgtgagcaacgtgatcagcagcatcgtgttcggcgacagattcgactacgaggacaaggagttcctgagcctgctgagcatgatgctgggcatcttccagttcaccagcaccagcaccggccagctgtacgagatgttcagcagcgtgatgaagcacctgcccggcccccagcagcaggccttcaagctgctgcagggcctggaggacttcatcgccaagaaggtggagcacaaccagagaaccctggaccccaacagcccccaggacttcatcgacagcttcctgatccacatgcaggaggaggagaagaaccccaacaccgagttctacctgaagaacctgatgatgagcaccctgaacctgttcatcgccggcaccgagaccgtgagcaccaccctgagatacggcttcctgctgctgatgaagcaccccgaggtggaggccaaggtgcacgaggagatcgacagagtgatcggcaagaacagacagcccaagttcgaggacagaaccaagatgccctacatggaggccgtgatccacgagatccagagattcggcgacgtgatccccatgagcctggccagaagagtgaagaaggacaccaagttcagagacttcttcctgcccaagggcaccgaggtgttccccatgctgggcagcgtgctgagagaccccagcttcttcagcaacccccaggacttcaacccccagcacttcctggacgacaagggccagttcaagaagagcgacgccttcgtgcccttcagcatcggcaagagaaactgcttcggcgagggcctggccagaatggagctgttcctgttcttcaccaccgtgatgcagaacttcagactgaagagcagccagagccccaaggacatcgacgtgagccccaagcacgtggtgttcgccaccatccccagaaactacaccatgagcttcctgcccagatag

SEQ ID NO: 15344 - protein, 503 aa, Artificial Sequence
  derived and/or modified sequence
MDLIPNLAVETWLLLAVSLILLYLYGTRTHGLFKKLGIPGPTPLPFLGNALSFRKGYWTFDMECYKKYRKVWGIYDCQQPMLAITDPDMIKTVLVKECYSVFTNRRPFGPVGFMKNAISIAEDEEWKRIRSLLSPTFTSGKLKEMVPIIAQYGDVLVRNLRREAETGKPVTLKHVFGAYSMDVITSTSFGVSIDSLNNPQDPFVENTKKLLRFNPLDPFVLSIKVFPFLTPILEALNITVFPRKVISFLTKSVKQIKEGRLKETQKHRVDFLQLMIDSQNSKDSETHKALSDLELMAQSIIFIFAGYETTSSVLSFIIYELATHPDVQQKVQKEIDTVLPNKAPPTYDTVLQLEYLDMVVNETLRLFPVAMRLERVCKKDVEINGMFIPKGVVVMIPSYVLHHDPKYWREPEKFLPERFSKKNKDNIDPYIYTPFGSGPRNCIGMRFALVNMKLALVRVLQNFSFKPCKETQIPLKLRFGGLLLTEKPIVLKAESRDETVSGA

SEQ ID NO: 15345 - DNA, 1512 bp, Artificial Sequence
  derived and/or modified sequence
atggacctaatccccaacctcgcagtcgagacgtggttactgctggccgtatcgctaatcctgctatatttgtacggaacacggacgcatggattgttcaaaaagcttggcattccaggccctactcccctgccatttctcgggaatgctctctcctttaggaagggctattggacctttgatatggagtgttacaaaaagtatcggaaggtgtggggaatttatgattgccaacagcccatgctggcgatcactgaccctgacatgattaaaaccgtgctggtgaaggagtgttacagcgtgttcaccaaccggcgaccatttggaccagtcggcttcatgaagaatgccatcagcattgccgaggacgaagagtggaagagaattcggagccttctcagccccacatttacatcaggcaaactgaaggagatggttcctattattgcccagtacggtgatgtgctggtccgcaatttgagaagggaagcagaaaccgggaagcccgttacattgaagcatgtcttcggtgcgtattcgatggatgtcatcacttccactagcttcggagtttctatcgattccttaaacaatccacaagatcctttcgtcgaaaacaccaagaaactgctccggttcaatcccctggatcctttcgtccttagtattaaagtgttcccatttctcacccctatcttggaggcgctcaatatcaccgttttccctaggaaagttatcagctttctaacgaaatcagttaaacagatcaaggagggccggctcaaggagactcagaagcacagggtggactttcttcagttaatgattgattctcagaactccaaggactccgagactcacaaggccttaagcgacctggagctgatggcccaatctataatctttattttcgcagggtacgagactacttcatctgtgctgagttttattatctacgaattggcaactcatcccgacgtgcagcaaaaggtacagaaagaaattgataccgtgctgccaaataaggctcctcccacttatgatacagtgcttcagttggaatatttagatatggttgtgaacgagactttgagactcttccctgtggccatgaggctcgaaagggtgtgcaaaaaagacgtggagatcaatggaatgttcatacccaagggcgtcgtggtgatgatcccatcatatgtgctgcaccacgaccccaagtattggagggaaccggagaagtttctgcccgaaagattttctaaaaaaaataaagacaacattgatccctatatttacactccctttggttccggtcctagaaattgcattggcatgcgattcgcgctagtgaatatgaaactggctttggtgagggtgctccagaattttagctttaagccctgcaaagagacacagataccgcttaagctgcgctttggaggtctgctcctgacagaaaaacccatagtcctgaaggcggagagtcgcgacgagacagtgtctggggcctag

SEQ ID NO: 15346 - DNA, 1512 bp, Artificial Sequence
  derived and/or modified sequence
atggacctgatccccaacctggccgtggagacctggctgctgctggccgtgtccctcatcctgctgtacctgtatggcaccaggacccacggcctcttcaagaagctgggcatccctggccccacccccctgcccttcctgggcaatgccctgtccttcaggaagggctactggacctttgacatggagtgctacaagaagtacaggaaggtgtggggcatctatgactgccagcagcccatgctggccatcacagatcctgacatgatcaagacagtgctggtgaaggagtgctacagcgtcttcaccaacagaagacccttcggccctgtgggcttcatgaagaatgccatcagcattgctgaagatgaggagtggaagaggatccgcagcctgctgagccccaccttcaccagcggcaagctgaaggagatggtgcccatcatcgcccagtatggagatgtgctggtgaggaacctgcggcgggaggccgagaccgggaagcctgtgaccctgaagcacgtgtttggagcctacagcatggatgtgatcaccagcaccagctttggagtgtccattgacagcctgaacaacccccaggacccctttgtggagaacaccaagaagctgctgcgcttcaaccccctggacccctttgtgctgagcatcaaggtgttccccttcctgacccccatcctggaggccctgaacatcaccgtcttccccaggaaggtgatctccttcctgaccaagtctgtgaagcagatcaaggagggccgcctgaaggagacccagaagcaccgggtggacttcctgcagctgatgattgacagccagaacagcaaggacagcgagacccacaaggccctgagtgacctggagctgatggcccagagcatcatcttcatctttgctggctatgagaccaccagctctgtgctgtccttcatcatctatgagctggccacccacccagatgtgcagcagaaggtgcagaaggagattgacacagtgctgcccaacaaggccccacccacctatgacacagtgctgcagctggagtacctggacatggtggtgaatgagaccctgcggctcttccctgtggccatgaggctggagcgggtgtgcaagaaggatgtggagatcaatggcatgttcatccccaagggcgtggtggtgatgatccccagctatgtgctgcaccacgaccccaagtactggagggagcctgagaagttcctgcctgagcgcttcagcaagaagaacaaggacaacatcgacccctacatctacaccccatttggaagtggccccaggaactgcatcggcatgagatttgccctggtgaacatgaagctggccctggtgcgggtgctgcagaacttctccttcaagccctgcaaggagacccagatccccctgaagctgcgctttggaggcctgctgctgacagagaagcccatcgtgctgaaggccgagagcagagatgaaacagtgtctggggcctag

SEQ ID NO: 15347 - DNA, 1512 bp, Artificial Sequence
  derived and/or modified sequence
atggacctgatccccaacctggccgtggagacctggctgctgctggcagtcagtcttatcctgctgtatctttacggaacccgcactcatggattgttcaagaagcttggtatcccgggtcctacccccctgcccttcctgggcaatgcgctgtcttttaggaaaggctactggacatttgatatggaatgttacaagaaataccgtaaggtgtggggcatatacgactgccagcaaccaatgctggcgattaccgatccagacatgattaaaaccgtcctggtcaaggagtgctatagcgtgtttactaaccggagacccttcggcccagttggtttcatgaaaaatgccattagcatagctgaagatgaagaatggaaaagaatccgctcactcttgtctccaacctttacatctggaaagcttaaggagatggtccctatcatcgcacagtacggcgacgtgttggttaggaacttgaggagagaagctgaaacagggaagcccgtcactctcaaacacgtgttcggagcctattctatggatgttatcacctccacatctttcggcgtgtcaatcgactcattgaacaacccccaggatccattcgtggagaacaccaaaaaactcctccgctttaaccccttagacccattcgtgctctcaattaaggtgttccccttcctcaccccaattttagaagcgcttaacattactgtcttccctcgtaaggtcatttcctttctcacaaagtccgtcaaacaaattaaggagggtaggctgaaggagacacagaaacatagagttgattttctccagctgatgatcgatagccagaactccaaagattcggaaacacacaaagccctgtcggacttagaactgatggcccagagtatcatctttatcttcgcaggctacgaaaccaccagctctgtgctcagttttatcatttatgagctggccacccaccccgacgtccagcaaaaggttcaaaaggagattgataccgtgcttccaaacaaggccccgcccacctacgataccgttctgcagctcgagtacctggacatggtggtgaacgagaccttgcgcctgttccccgtcgccatgaggttggagagggtatgtaaaaaggacgtcgagatcaatgggatgtttattcccaaaggtgttgtggtgatgattccgtcttatgtcctgcaccatgaccctaagtactggagagaaccagaaaagttcctgccagagcggttttcgaaaaagaataaggataacatcgacccatatatctatacgcctttcggttctggtcctcgtaattgcatcggaatgaggttcgcattggtgaatatgaagttggccctcgttagagtcctccagaattttagcttcaagccttgcaaagagacccagatcccacttaagctgaggttcggcggcttgctcctgaccgagaagcccattgtactgaaagcagagtctagggacgagacggtgtcaggagcctag

SEQ ID NO: 15348 - DNA, 1512 bp, Artificial Sequence
  derived and/or modified sequence
atggaccttattcccaatctggccgtcgaaacctggctgctgttagccgtgagcctcattttgttgtatctctatggcaccagaacccacgggctgtttaaaaagctgggcatcccaggccctactcccctgccctttctgggtaacgctctgtcctttcgtaagggttactggacttttgacatggaatgttataaaaagtaccggaaggtgtggggcatttatgactgtcagcagcctatgttggcaattaccgacccagatatgatcaaaacagtgctggttaaggagtgctactccgtcttcactaaccggcgtccttttggcccagttggatttatgaaaaacgcaatatctattgcagaggatgaagaatggaagcggatcaggagtctgctgtcccctactttcacttctggcaagctgaaagagatggtgccaatcatcgcacagtatggagacgtcctggtaaggaacctgcggcgtgaggccgagacaggcaaacctgttaccttaaaacatgtgttcggtgcttacagtatggacgtcattacgtctacctcatttggtgtgtctatcgactctctgaacaatccccaggatccttttgtggaaaacacaaaaaaactgttgagattcaacccattagacccatttgtgttgtctatcaaggtgttccctttccttaccccgattcttgaggccctgaatataaccgtgttcccaaggaaagtgatctcatttctcaccaaatccgtaaagcagatcaaagagggcagactgaaggagacccagaaacatcgggtggactttctgcagctcatgattgactcgcagaactctaaggattcagagactcacaaggcactgtctgatctggaacttatggcccagtccataattttcatcttcgcgggttacgaaaccacctcctctgtgctgtctttcattatctacgagctggcaactcaccctgatgtgcagcaaaaggtgcagaaagagatcgacaccgtgctaccaaacaaggcacctccaacctacgacaccgtcctccagctggaatacctagatatggtggttaacgaaaccttgaggttatttccggttgccatgaggctggagagagtttgcaagaaagacgtcgagatcaacgggatgtttattcccaagggagtggtggtgatgatccccagctacgttcttcaccatgatcccaaatactggcgggagcctgagaaatttttgcccgaacggttcagcaagaaaaacaaggacaacattgatccatacatatatacccctttcggatccggccctcgcaactgcatcgggatgcggtttgcacttgtgaacatgaagcttgcactggtgcgcgttctgcagaatttttctttcaaaccttgcaaggaaactcagatccctctgaaattgcgatttggtggtctgctactgactgagaagcctatcgtcctgaaagctgagagccgagatgaaaccgttagtggggcatag

SEQ ID NO: 15349 - DNA, 1971 bp, Artificial Sequence
  derived and/or modified sequence
gtgatggatctcatcccaaacttggccgtggaaacctggcttctcctggctgtcagcctgatactcctctatctatatggaacccgtacacatggactttttaagaagcttggaattccagggcccacacctctgccttttttgggaaatgctttgtccttccgtaagggctattggacgtttgacatggaatgttataaaaagtatagaaaagtctggggtatttatgactgtcaacagcctatgctggctatcacagatcccgacatgatcaaaacagtgctagtgaaagaatgttattctgtcttcacaaaccggaggcctttcgggccagtgggatttatgaaaaatgccatctctatagctgaggatgaagaatggaagagaatacgatcattgctgtctccaacattcaccagcggaaaactcaaggagatggtccctatcattgcccagtatggagatgtgttggtgagaaatctgaggcgggaagcagagacaggcaagcctgtcaccttgaaacacgtctttggggcctacagcatggatgtgatcactagcacatcatttggagtgagcatcgactctctcaacaatccacaagacccctttgtggaaaacaccaagaagcttttaagatttaatccattagatccattcgttctctcaataaaagtctttccattccttaccccaattcttgaagcattaaatatcactgtgtttccaagaaaagttataagttttctaacaaaatctgtaaaacagataaaagaaggtcgcctcaaagagacacaaaagcaccgagtggatttccttcagctgatgattgactctcagaattcaaaagactctgagacccacaaagctctgtctgatctggagctcatggcccaatcaattatctttatttttgctggctatgaaaccacgagcagtgttctctccttcattatatatgaactggccactcaccctgatgtccagcagaaagtgcagaaggaaattgatacagttttacccaataaggcaccacccacctatgatactgtgctacagttggagtatcttgacatggtggtgaatgaaacactcagattattcccagttgctatgagacttgagagggtctgcaaaaaagatgttgaaatcaatgggatgtttattcccaaaggggtggtggtgatgattccaagctatgttcttcatcatgacccaaagtactggagagagcctgagaagttcctccctgaaaggttcagtaaaaagaacaaggacaacatagatccttacatatacacaccctttggaagtggacccagaaactgcattggcatgaggtttgctctcgtgaacatgaaacttgctctagtcagagtccttcagaacttctccttcaaaccttgtaaagaaacacagatccccctgaaattacgctttggaggacttcttctaacagaaaaacccattgttctaaaggctgagtcaagggatgagaccgtaagtggagcctgatttccctaaggacttctggtttgctcttcaagaaagctgtgccccagaacaccagagacctcaaattactttacaaatagaaccctgaaatgaagacgggcttcatccaatgtgctgcataaataatcggggattctgtacgtgcattgtgctctctcatggtctgtatagagtgttatacttggtaatatagaggagatgaccaaatcagtgctggggaagtagatttggcttctctgcttctcataggactatctccaccacccccagttagcaccattaactcctcctgagctctgataacataattaacatttctcaataatttcaaccacaatcattaataaaaataggaattattttgatggctctaacagtgacatttatatcatgtgttatatctgtagtattctatagtaagctttatattaagcaaatcaataaaaacctctttac

SEQ ID NO: 15350 - DNA, 1512 bp, Artificial Sequence
  derived and/or modified sequence
atggacctgatccccaacctggccgtggagacctggctgctgctggccgtgagcctgatcctgctgtacctgtacggcaccagaacccacggcctgttcaagaagctgggcatccccggccccacccccctgcccttcctgggcaacgccctgagcttcagaaagggctactggaccttcgacatggagtgctacaagaagtacagaaaggtgtggggcatctacgactgccagcagcccatgctggccatcaccgaccccgacatgatcaagaccgtgctggtgaaggagtgctacagcgtgttcaccaacagaagacccttcggccccgtgggcttcatgaagaacgccatcagcatcgccgaggacgaggagtggaagagaatcagaagcctgctgagccccaccttcaccagcggcaagctgaaggagatggtgcccatcatcgcccagtacggcgacgtgctggtgagaaacctgagaagagaggccgagaccggcaagcccgtgaccctgaagcacgtgttcggcgcctacagcatggacgtgatcaccagcaccagcttcggcgtgagcatcgacagcctgaacaacccccaggaccccttcgtggagaacaccaagaagctgctgagattcaaccccctggaccccttcgtgctgagcatcaaggtgttccccttcctgacccccatcctggaggccctgaacatcaccgtgttccccagaaaggtgatcagcttcctgaccaagagcgtgaagcagatcaaggagggcagactgaaggagacccagaagcacagagtggacttcctgcagctgatgatcgacagccagaacagcaaggacagcgagacccacaaggccctgagcgacctggagctgatggcccagagcatcatcttcatcttcgccggctacgagaccaccagcagcgtgctgagcttcatcatctacgagctggccacccaccccgacgtgcagcagaaggtgcagaaggagatcgacaccgtgctgcccaacaaggccccccccacctacgacaccgtgctgcagctggagtacctggacatggtggtgaacgagaccctgagactgttccccgtggccatgagactggagagagtgtgcaagaaggacgtggagatcaacggcatgttcatccccaagggcgtggtggtgatgatccccagctacgtgctgcaccacgaccccaagtactggagagagcccgagaagttcctgcccgagagattcagcaagaagaacaaggacaacatcgacccctacatctacacccccttcggcagcggccccagaaactgcatcggcatgagattcgccctggtgaacatgaagctggccctggtgagagtgctgcagaacttcagcttcaagccctgcaaggagacccagatccccctgaagctgagattcggcggcctgctgctgaccgagaagcccatcgtgctgaaggccgagagcagagacgagaccgtgagcggcgcctag

SEQ ID NO: 15351 - protein, 494 aa, Artificial Sequence
  derived and/or modified sequence
MLASGLLLVTLLACLTVMVLMSVWRQRKSRGKLPPGPTPLPFIGNYLQLNTEQMYNSLMKISERYGPVFTIHLGPRRVVVLCGHDAVKEALVDQAEEFSGRGEQATFDWLFKGYGVAFSNGERAKQLRRFSIATLRGFGVGKRGIEERIQEEAGFLIDALRGTHGANIDPTFFLSRTVSNVISSIVFGDRFDYEDKEFLSLLRMMLGSFQFTATSTGQLYEMFSSVMKHLPGPQQQAFKELQGLEDFIAKKVEHNQRTLDPNSPRDFIDSFLIRMQEEEKNPNTEFYLKNLVMTTLNLFFAGTETVSTTLRYGFLLLMKHPEVEAKVHEEIDRVIGKNRQPKFEDRAKMPYTEAVIHEIQRFGDMLPMGLAHRVNKDTKFRDFFLPKGTEVFPMLGSVLRDPRFFSNPRDFNPQHFLDKKGQFKKSDAFVPFSIGKRYCFGEGLARMELFLFFTTIMQNFRFKSPQSPKDIDVSPKHVGFATIPRNYTMSFLPR

SEQ ID NO: 15352 - DNA, 810 bp, Artificial Sequence
  derived and/or modified sequence
ggcctgctgctggtggccctgctggccagcctgaccgtgatggtgctgatgagcgtgtggcagcagagaaagagcagaggcaagctgcccctgggccccacccccctgctgttcatcggcaactacctgcagctgaacaccgagcacatctgcgacagcatcatgaagatcagcgagagatacggccccgtgttcaccatccacctgggccccagaagagtggtggtgctgtgcggccacgacgccgtgaaggaggccctggtggaccaggccgaggagttcagcggcagaggcgagcaggccaccttcgactggctgttcaagggctacggcgtgacctgcagaacctgggagagaaccaagcccctgagaagattcagcatcgccaccctgagagacttcggcgtgggcaagagaggcatcaaggagatccaggagaaggccggcttcctgatcaaggcccaccagagcagcgacagcagcatctaccccaccttcttcctgagcagaaccaccagcaacgtgatcagcagcatcgtgttcggcgacagattcgactacgaggacaagttcctgagcctgctgtgcatgatgctggagagcttccagttcaccgcccccagcaccggccagctgtacgagatgttcagcagcgtgatgaagcacctgcccggcccccagcagcaggccttcaaggagctgcagggcctggaggacttcatcgccaagaaggtggagcacaaccagtgcaccctggaccccaacagccccagagacttcatcgacagcttcctgatcagaatgcagtag

SEQ ID NO: 15353 - DNA, 660 bp, Artificial Sequence
  derived and/or modified sequence
ctggagaaggaggagaagaaccccaacaccgagttctacctgaagaacctggtgctgaccaccctgaacctgttcgtgggcggcaccgagaccgtgagcaccaccctgcactacggcttcctgctgctgatgaagcaccccgaggtggaggccaaggtgcacgagatcgacagagtgatcggcaagaaccagcagcccaagttcgaggacagagccaagaccctgtacaccgaggccgtgatccacgagatccagagattcggcgacctgctgcccatgggcgtgagcagaagagtgaagaaggacaccaagttcagagacttcttcctgagcaagggcatcgaggtgttccccatgctgggcagcgtgctgagagacctgagattcttcagcaaccccagagacttcaacccccagcacttcctgggcgagaagggccagttcaagaagagagacgccttcgtgcccttcagcatcagaagaagaaactgcttcagagagggcctggccagaatggagctgttcctgtacctgaccaccatcatgcagaacttcagattcaagagcagacagagccccaaggacatcgtggtgagccccaagcacgtgggcttcgtgaccatccccagaaactacaccaagtgctacctgccctgctag

SEQ ID NO: 15354 - DNA, 807 bp, Artificial Sequence
  derived and/or modified sequence
gggctgcttctggtggccttgctggccagcctgactgtgatggtcttgatgtcagtctggcagcagaggaagagcagggggaagctgcctttgggacccaccccattgctctttattggaaactacctgcagctgaacacagagcacatatgtgactccatcatgaagatcagtgagcgctatggccccgtgttcaccattcacctggggccccggcgggtcgtggtgctgtgcggacatgatgccgtcaaggaggctctggtggaccaggctgaggagttcagcgggcgaggcgagcaggccaccttcgactggctcttcaaaggctatggagtgacctgccgcacctgggagcgcaccaagccgctcaggcgcttctccatcgccaccctgcgggacttcggggtgggcaagcgcggcatcaaggagatccaggagaaggcgggcttcctcatcaaggcccatcagagctctgactccagcatctatcccaccttcttcctaagccgtaccacctccaatgtcatcagctccattgtctttggggaccgctttgactatgaggacaaattcctgtcactgctgtgcatgatgctggaaagcttccagttcacggcaccctccacggggcagctctatgagatgttctcttcggtgatgaaacacctgccaggaccacagcaacaggcctttaaggagctgcaagggctggaggacttcattgccaagaaagtggagcacaaccagtgcacgctggatcccaattccccacgggacttcattgactcgtttctcatccgcatgcaa

SEQ ID NO: 15355 - DNA, 810 bp, Artificial Sequence
  derived and/or modified sequence
gggctgttacttgtggcactgctagcctctttaacagtgatggtcctgatgagcgtttggcagcagcgaaagtcacgagggaagctgcccctgggtcctacgcctctgctgttcatcggtaattatctgcagctgaatacagaacacatttgcgattctatcatgaaaatctccgaaaggtatggccccgtgttcactatccatctgggccctcggcgggtcgtggttctctgcggccacgatgcagtgaaggaggcactggtggatcaagctgaggagttctccggaagaggggaacaggcgacctttgattggctctttaagggatatggtgttacctgtaggacctgggagagaactaaaccactgagacggttcagcatcgcaaccctgagagatttcggcgtcggcaaaagaggtattaaagagattcaggagaaggcagggttcctcattaaagcccaccagagctctgatagctctatttatccaaccttttttttgagtagaaccacttccaatgtaatttcaagtatagtgttcggggatcgattcgactatgaggacaaatttctgagcttgttgtgtatgatgctcgagagtttccagttcaccgcccccagtactggacagctttacgaaatgttttcctcggtcatgaagcacttgccgggaccccagcaacaggcgttcaaagaactgcagggccttgaagattttatcgcaaagaaagtggagcataatcagtgcactcttgatccaaatagtcctcgtgactttatcgatagcttcctaatcagaatgcaatag

SEQ ID NO: 15356 - DNA, 660 bp, Artificial Sequence
  derived and/or modified sequence
ctggagaaggaagagaaaaatccgaataccgaattctaccttaaaaacctggtcctgaccacactgaatctgtttgtcggcgggactgaaacggtaagcactaccctgcattatggcttccttctgctgatgaaacacccagaggtggaggcaaaagtgcacgaaatcgatagagtcatcggcaagaaccaacagcctaagttcgaggatcgcgccaagacattgtatacggaagctgtcattcacgagattcagcggttcggtgacctcctgccgatgggggtgtccagaagggtcaaaaaagataccaaattccgtgactttttccttagcaaaggcattgaggtgtttccaatgcttggcagtgtgttgcgggacctcaggttcttctccaatcccagggacttcaaccctcaacactttctcggagagaaagggcaatttaagaagagggatgcgttcgtgccattctccataagacgcagaaattgcttccgggagggtttagccaggatggagctgttcttgtaccttactacaatcatgcagaactttaggtttaaaagccgacagagtcccaaggatattgtcgtctcccctaagcacgtgggttttgtcacaatccccaggaattataccaagtgctacctcccatgctag

SEQ ID NO: 15357 - DNA, 810 bp, Artificial Sequence
  derived and/or modified sequence
ggcctgctgctggtggccctgctggccagcctgactgtgatggtgctgatgtctgtgtggcagcagaggaagagccggggcaagctgcccctgggccccacccccctgctcttcatcggcaactacctgcagctgaacacagagcacatctgtgacagcatcatgaagatcagcgagagatatggccctgtgttcaccatccacctgggcccccggcgggtggtggtgctgtgtggccatgatgctgtgaaggaggccctggtggaccaggccgaggagttcagcggccgcggggagcaggccacctttgactggctgttcaagggctacggcgtgacctgcaggacctgggagaggaccaagcccctgcggcgcttcagcatcgccaccctgcgggactttggagtgggcaagaggggcatcaaggagatccaggagaaggccggcttcctgatcaaggcccaccagagcagtgacagcagcatctaccccaccttcttcctgagcaggaccaccagcaatgtcatcagcagcatcgtgtttggagacagatttgattatgaggacaagttcctgagcctgctgtgcatgatgctggagagcttccagttcaccgcccccagcacaggccagctgtatgagatgttcagctctgtgatgaagcacctgcccggcccccagcagcaggccttcaaggagctgcagggcctggaggacttcatcgccaagaaggtggagcacaaccagtgcaccctggaccccaacagcccccgggacttcatcgacagcttcctgatccgcatgcagtag

SEQ ID NO: 15358 - DNA, 660 bp, Artificial Sequence
  derived and/or modified sequence
ctggagaaggaggagaagaaccccaacacagagttctacctgaagaacctggtgctgaccaccctgaacctgtttgtgggcggcacagaaacagtgtccaccaccctgcactacggcttcctgctgctgatgaagcaccctgaggtggaggccaaggtgcatgaaattgacagagtcatcggcaagaaccagcagcccaagtttgaagatcgggccaagaccctgtacacagaagctgtgatccacgagatccagagatttggagacctgctgcccatgggcgtgtccagaagagtgaagaaggacaccaagttccgggacttcttcctgagcaagggcatcgaggtgttccccatgctgggctctgtgctgcgggacctgcgcttcttcagcaacccccgggacttcaacccccagcacttcctgggggagaagggccagttcaagaagagagatgcctttgtgcccttcagcatcagaagaagaaactgcttccgggagggcctggccaggatggagctgttcctgtacctgaccaccatcatgcagaacttccgcttcaagagccggcagagccccaaggacatcgtggtgagccccaagcacgtgggctttgtgaccatccccaggaactacaccaagtgctacctgccctgctag

SEQ ID NO: 15359 - DNA, 810 bp, Artificial Sequence
  derived and/or modified sequence
ggcctgctgctggtggccctgctggccagcctgaccgtgatggtgcttatgagtgtctggcagcagcgaaaatctcgcggcaagcttcctctcgggcctactcccttgctgttcatcgggaactatcttcagttaaataccgagcatatctgtgatagcatcatgaaaataagcgaaagatacgggcccgtgtttaccattcacctgggtccccgcagagtggtcgtgctttgtggccacgatgccgtgaaggaggcgcttgtggaccaggcagaagaattctctggacggggggagcaggccacatttgactggctgttcaagggatatggggtgacttgcagaacatgggagaggaccaaaccgttgagaagatttagcatcgcaacactgcgcgatttcggagtgggtaaacggggtataaaagaaatccaggaaaaggcaggttttttaatcaaggcacaccagtccagcgatagctcgatttaccccacttttttcctctcccggacgacatccaatgttatctcctcaattgtgttcggggacaggttcgactacgaggacaaatttttgtccctcttgtgtatgatgctggagtcttttcaattcaccgcccctagcactggccagctctacgaaatgttctcatccgtgatgaagcatctacccggcccccagcagcaggcatttaaagaacttcagggcctcgaagattttattgcgaagaaggtggagcacaaccagtgtacccttgatccaaattccccgcgggactttatcgacagttttctcataaggatgcagtag

SEQ ID NO: 15360 - DNA, 660 bp, Artificial Sequence
  derived and/or modified sequence
ctggagaaggaggagaagaaccccaacaccgagttctacctgaagaaccttgttctaaccactttaaatttgttcgtcggcggcaccgagacagtttcaacaacactccattatgggttcctgctgttgatgaaacatcctgaggtcgaggcaaaggtgcacgaaatcgaccgtgtgattggaaaaaatcagcaacctaaatttgaggatagggctaaaacgttgtacactgaagcagttatccacgaaatacagcgattcggggatttactcccgatgggcgtgtctcggcgggtgaaaaaagacaccaaatttcgcgatttttttctctccaagggcattgaggtgttccccatgctgggcagcgtcctgcgggacctgcggttcttcagtaatccccgggatttcaacccacagcatttcctcggcgagaagggacagtttaagaaacgagacgcattcgtgccttttagcattcggaggcgaaattgcttccgcgaaggtttggcacgaatggagctcttcctttatctgacgacaattatgcagaattttaggtttaagagcaggcagtcccctaaggacatcgttgtgagccccaaacatgtgggctttgtcactattccccgtaattacaccaaatgttaccttccatgctag

SEQ ID NO: 15361 - DNA, 810 bp, Artificial Sequence
  derived and/or modified sequence
ggtctgctcctggtggctttactggcatctcttacagtgatggtcttaatgagcgtgtggcagcagagaaagtcccgcggaaagctcccactaggcccaactcccctgttgttcataggaaactacctgcaacttaacacagagcatatctgtgacagcattatgaaaatctcagaacggtacggtcccgtcttcacgattcacttaggacccagaagagtggtcgtgctgtgtggacacgacgctgtgaaggaggccctcgtggaccaggcggaggaattcagcggcagaggcgagcaggcgactttcgattggctcttcaaagggtatggcgttacctgccgtacgtgggagcgaaccaagccactgcggaggtttagtattgctactctcagggattttggagtaggtaaaagagggatcaaagaaattcaggaaaaggcaggcttcttgataaaagctcatcagagcagtgacagcagtatttatcccacctttttcctgtccagaaccacttctaatgttattagtagcattgtgtttggcgacagatttgattatgaggacaagtttctgagcttactgtgcatgatgctcgaatccttccagtttactgctccctccactggacagctgtacgagatgttttccagcgtaatgaagcacttgcctggccctcagcagcaagctttcaaggagctccagggccttgaagacttcattgctaagaaggtggagcataaccaatgcacactcgatccaaactccccaagggatttcatcgattccttcctgatccggatgcagtag

SEQ ID NO: 15362 - DNA, 660 bp, Artificial Sequence
  derived and/or modified sequence
cttgagaaagaggagaagaaccccaacacagaattttacttgaagaacctggtcttgacaactctaaatctctttgtgggcggtacagagactgtttccacaactctgcactatggatttctcctcctgatgaaacatccggaggtggaggcaaaagttcacgagattgaccgcgtgatcggcaaaaaccaacagcctaaattcgaagacagagctaaaacactgtatacggaagccgtgattcacgaaattcagcgctttggcgaccttctgcccatgggggtctcccggagggtgaaaaaggacaccaaatttcgggattttttcttgtcaaaaggcattgaagtgttccccatgttagggtctgttctgcgtgatctgaggtttttcagtaaccccagggattttaacccacagcattttttaggagagaaggggcagttcaagaagcgcgacgcttttgtcccattttccattcgtagaagaaattgcttccgcgaaggtctggcaaggatggagttgttcttgtacctgacgactataatgcagaattttcgttttaagtctaggcagagccccaaggacatagtagtctcccctaagcacgtgggatttgtgaccatcccacgcaactataccaagtgctacctgccgtgctag

SEQ ID NO: 15363 - DNA, 660 bp, Artificial Sequence
  derived and/or modified sequence
ctggaaaaggaggagaagaaccccaacacagagttctacttgaagaacctggtgctgaccacgttgaacctcttcgttgggggcactgagaccgtcagcaccaccctgcactacggcttcctgctgctcatgaagcacccagaggtggaggcaaaggtccatgagattgacagagtgatcggcaagaaccagcagcccaagtttgaggaccgggccaagacgctctacacagaggcagtgatccatgagatccaaagatttggagacttgctccccatgggtgtgtcccgcagggtcaagaaggacaccaagtttcgggatttcttcctctccaagggcatagaagtgttccctatgctgggctccgtgctgagagacctcaggttcttctccaacccccgggacttcaatccccagcacttcctgggtgagaaggggcagtttaagaagcgtgatgcttttgtgcccttctccatcagaaggcggaactgtttcagagaaggcctggccagaatggagctctttctctacctcaccaccatcatgcagaacttccgcttcaaatcgcggcagtcgcctaaggacattgttgtgtcccccaaacacgtgggctttgtcacaatcccacgaaactacaccaagtgctacttgccttgctga

SEQ ID NO: 15364 - DNA, 1485 bp, Artificial Sequence
  derived and/or modified sequence
atgctggcctccgggctcctcctggtcacgctgctggcttgcctgacagtcatggttctgatgagcgtctggaggcagcgcaagtcccgaggcaaactgccgcccggacccacacccttacccttcattggcaattaccttcagctcaatactgagcagatgtacaatagtctgatgaagatatccgagcgctatggacccgtattcactatccacctgggccctcgacgcgttgtggtgctgtgcggccacgatgccgtgaaagaagcactcgtagatcaggctgaagaattcagcggcagaggtgaacaagcaaccttcgattggctgttcaaggggtacggcgtggctttcagtaatggcgaaagagcgaagcagctgagacggttctccatagcaactctgcggggattcggcgtgggaaagcgaggcatcgaggaacgcattcaggaggaagccggcttcctcattgacgcgctccgggggacccatggcgcaaacattgaccccacgttctttctgtcccgcactgtgtctaacgtgatttccagcatcgtcttcggcgatagattcgactacgaggacaaggaatttttaagcctcctgaggatgatgctggggtccttccagtttactgctactagtactggccagctgtatgagatgtttagctccgtcatgaagcatctgcccggtcctcagcagcaggctttcaaggaactgcaggggttagaggatttcatagccaaaaaggttgagcacaaccagcggacacttgatcccaacagccccagagactttatcgatagtttcctgatccggatgcaggaagaggaaaagaatccaaacactgagttctacctgaaaaacctggtcatgaccaccctcaatctcttttttgccggtaccgagaccgtctccacgacattgcggtatggattcctcctcttgatgaagcatcctgaggtggaagctaaagtgcacgaagagatagatcgggtcatcgggaaaaacagacagcctaagtttgaagaccgagctaagatgccgtacacagaggccgtgatccatgaaatacagcgattcggagatatgctcccaatggggttggctcatcgtgtgaacaaggatactaagtttcgcgattttttcctccccaaaggcactgaagtcttccctatgctcggctccgtgcttcgcgacccaaggttttttagcaatccccgagacttcaatccacagcacttccttgacaaaaaaggacaatttaagaagtctgatgcattcgtgcctttcagtattggtaagcggtactgtttcggagagggtttggcacgaatggaattatttctgttcttcactaccataatgcaaaacttccggttcaaatccccacaaagtcccaaggatattgatgtatctcccaagcacgtgggctttgctactattccccgtaattacactatgtcttttttaccgaggtag

SEQ ID NO: 15365 - DNA, 1485 bp, Artificial Sequence
  derived and/or modified sequence
atgctggccagcggcctgctgctggtgaccctgctggcctgcctgactgtgatggtgctgatgtctgtgtggaggcagaggaagagccggggcaagctgcccccaggccccacccccctgcccttcatcggcaactacctgcagctgaacacagagcagatgtacaacagcctgatgaagatcagcgagagatatggccctgtgttcaccatccacctgggcccccggcgggtggtggtgctgtgtggccatgatgctgtgaaggaggccctggtggaccaggccgaggagttcagcggccgcggggagcaggccacctttgactggctgttcaagggctacggcgtggccttcagcaatggagagcgggccaagcagctgcggcgcttcagcatcgccaccctgcggggcttcggcgtgggcaagaggggcatcgaggagcgcatccaggaggaggccggcttcctgattgatgccctgcggggcacccacggggccaacatcgaccccaccttcttcctgagcaggacagtgtccaatgtcatcagcagcatcgtgtttggagacagatttgattatgaggacaaggagttcctgagcctgctgaggatgatgctgggcagcttccagttcaccgccaccagcacaggccagctgtatgagatgttcagctctgtgatgaagcacctgcccggcccccagcagcaggccttcaaggagctgcagggcctggaggacttcatcgccaagaaggtggagcacaaccagaggaccctggaccccaacagcccccgggacttcatcgacagcttcctgatccgcatgcaggaggaggagaagaaccccaacacagagttctacctgaagaacctggtgatgaccaccctgaacctcttctttgctggaacagaaacagtgtccaccaccctgcgctatggcttcctgctgctgatgaagcaccctgaggtggaggccaaggtgcatgaggagattgacagagtgattggcaagaaccggcagcccaagtttgaggaccgggccaagatgccctacacagaggccgtcatccacgagatccagagatttggagacatgctgcccatgggcctggcccaccgggtgaacaaggacaccaagttccgggacttcttcctgcccaagggcacagaggtgttccccatgctgggctctgtgctgcgggacccccgcttcttcagcaacccccgggacttcaacccccagcacttcctggacaagaagggccagttcaagaagagtgatgcctttgtgcccttcagcatcggcaagcgctactgcttcggggagggcctggccaggatggagctgttcctgttcttcaccaccatcatgcagaacttccgcttcaagagcccccagagccccaaggacattgatgtgagccccaagcacgtgggctttgccaccatccccaggaactacaccatgtccttcctgcccaggtag

SEQ ID NO: 15366 - DNA, 1485 bp, Artificial Sequence
  derived and/or modified sequence
atgctggccagcggcctgctgctggtgaccctgctggcctgcctgacagtgatggtacttatgtccgtgtggcggcagagaaagagtagaggcaagttaccccctggcccaacccctctgccatttataggaaattatttacagctgaataccgaacagatgtataacagcttaatgaagatctctgaacggtacggccctgtgtttaccatacatctgggacctagaagagtcgtggttctgtgtggccacgatgcagttaaggaggcactggtggatcaggctgaggagttctctgggcggggggagcaggctacttttgactggctctttaagggatacggtgttgcattttccaatggcgaaagggcaaagcagctgagacgcttctcaattgccacacttcgcggatttggggtggggaagagagggattgaggagaggatccaggaggaggctggattcctgatcgacgccctgcgcggaacccatggagccaatattgatccgaccttctttctgtccaggacagtctctaatgtgatttcatccatcgtgttcggcgatagatttgattacgaggacaaagagttcctcagtttgctgcggatgatgctgggtagttttcagttcactgcaacttcgacaggccagctctacgaaatgtttagctcagtaatgaagcatctccccggccctcagcagcaggctttcaaggagctgcagggcttagaggactttattgccaagaaagttgagcacaatcagcggaccctggatcccaactcccctagggactttattgatagttttctcataagaatgcaggaagaggagaaaaatccgaataccgagttttacctgaagaatcttgttatgaccaccttgaacctatttttcgcggggactgagactgtttccaccactctgcgatacggattcctgctcctgatgaagcacccagaggtcgaggcaaaggtccatgaggaaatcgatcgcgtgatcggaaaaaacagacagccaaaatttgaggaccgggctaagatgccatacactgaggcggtgatccacgaaatacaaagatttggcgacatgctgcctatgggcctggcacatagagtaaacaaggacacaaaatttcgtgattttttcctgccaaaggggactgaggtgttccctatgcttggaagcgtgttgagagatccgagattcttctcgaacccacgagacttcaaccctcagcacttccttgacaagaaggggcagtttaaaaaatccgacgcatttgtgccgttttcgatcggaaagagatattgcttcggggaggggctggctcgaatggaattgtttttgttcttcacaactatcatgcagaacttcaggtttaagagccctcaatctcctaaggacatagacgtgagcccaaagcacgtgggcttcgctaccattccacgaaattacaccatgagctttcttccacggtag

SEQ ID NO: 15367 - DNA, 1485 bp, Artificial Sequence
  derived and/or modified sequence
atgctcgcctcaggcctcctcctggtgacgttactcgcctgtctcactgtgatggtgctcatgtccgtctggcggcagcggaaatcccgcggaaaacttcccccaggacccacccctcttccctttatcggtaactatctacagcttaacactgagcaaatgtataatagcctgatgaaaattagcgagcggtatggtcctgtgtttaccattcacttgggccctcggagggtcgtggtcctatgtggccacgatgccgtaaaggaggcactggtggatcaggctgaggaattttccggtaggggggagcaggcaactttcgactggctgtttaaaggttatggggtggctttcagtaacggcgagagagcaaagcaacttcgaagattctcaattgctaccttgagggggttcggagtcggcaaaaggggcattgaagagcggattcaagaggaggcaggtttcttaatcgacgcactgagagggacccacggtgctaacatagaccccactttctttctctctaggactgtttcaaatgtgataagcagcatcgtgtttggtgaccgctttgactatgaggataaggaattcttgtcacttctgcggatgatgctcggctcgttccagtttacagctacgtcaacaggtcagctctatgagatgttcagcagtgtcatgaagcatctcccaggccctcagcagcaagcctttaaagagctgcagggtctggaagacttcattgcaaaaaaagtggagcataatcagcgaactcttgaccctaactcccccagggattttatagatagctttttgattagaatgcaggaggaagagaaaaatcccaatacagagttttaccttaagaacttagtgatgaccacgctaaacctgttcttcgctggaacggagaccgtctcaaccaccctacggtatgggttcctgcttctaatgaagcacccagaggttgaggcaaaagtgcatgaggagattgaccgcgtgatcggcaagaacagacaaccgaaatttgaggatagagccaagatgccatacactgaagccgtaattcatgaaattcaacggtttggagatatgctgcctatgggactcgcccaccgggtgaacaaggatacaaaatttcgagacttcttcctgcccaaaggtactgaggtgttcccgatgttaggctccgtgctgcgggaccctagatttttctcaaatccaagagattttaatccccagcattttctcgataagaaagggcagttcaagaaaagcgatgctttcgtcccattctccataggcaagcggtattgttttggagagggcctggctcggatggaactgtttctcttttttacgactatcatgcagaacttccgctttaagagtcctcagtctcctaaagacattgacgtctctcccaagcacgtggggttcgcgacgatacccaggaactatactatgtcattcctgccccgttag

SEQ ID NO: 15368 - DNA, 1747 bp, Artificial Sequence
  derived and/or modified sequence
actgccaccatgctggcctcagggctgcttctggtgaccttgctggcctgcctgactgtgatggtcttgatgtcagtctggcggcagaggaagagcagggggaagctgcctccgggacccaccccattgcccttcattggaaactacctgcagctgaacacagagcagatgtacaactccctcatgaagatcagtgagcgctatggccctgtgttcaccattcacttggggccccggcgggtcgtggtgctgtgcggacatgatgccgtcaaggaggctctggtggaccaggctgaggagttcagcgggcgaggcgagcaggccaccttcgactggctcttcaaaggctatggcgtggcgttcagcaacggggagcgcgccaagcagctccggcgcttctccatcgccaccctaaggggttttggcgtgggcaagcgcggcatcgaggaacgcatccaggaggaggcgggcttcctcatcgacgccctccggggcacgcacggcgccaatatcgatcccaccttcttcctgagccgcacagtctccaatgtcatcagctccattgtctttggggaccgctttgactatgaggacaaagagttcctgtcactgttgcgcatgatgctgggaagcttccagttcacggcaacctccacggggcagctctatgagatgttctcttcggtgatgaaacacctgccaggaccacagcaacaggcctttaaggagctgcaagggctggaggacttcatcgccaagaaggtggagcacaaccagcgcacgctggatcccaattccccacgggacttcatcgactcctttctcatccgcatgcaggaggaggagaagaaccccaacacagagttctacttgaagaacctggtgatgaccaccctgaacctcttctttgcgggcactgagaccgtgagcaccaccctgcgctacggtttcctgctgctcatgaagcacccagaggtggaggccaaggtccatgaggagattgacagagtgatcggcaagaaccggcagcccaagtttgaggaccgggccaagatgccctacacagaggcagtgatccacgagatccaaagatttggagacatgctccccatgggtttggcccacagggtcaacaaggacaccaagtttcgggatttcttcctccctaagggcactgaagtgttccctatgctgggctccgtgctgagagaccccaggttcttctccaacccccgggacttcaatccccagcacttcctggataagaaggggcagtttaagaagagtgatgcttttgtgcccttttccatcggaaagcggtactgttttggagaaggcctggccagaatggagctctttctcttcttcaccaccatcatgcagaactttcgcttcaagtcccctcagtcgcctaaggatatcgacgtgtcccccaaacacgtgggctttgccacgatcccacgaaactacaccatgagcttcctgccccgctgagcgagggctgtgctggtgcagggctggtgggcggggccagggaaacggccggggcaggggcggggcttgtgggaggggcggggctaagaatgggggcagtgggggaaggaaggggagaggtggttagagggaacagaagaaacagaaggggctcagttcaccttgatgatgtccttcagagctgtgatgagaggaagggaaaccttacagtatgctacaaagagtagtaataatagcagctcttatttcctga

SEQ ID NO: 15369 - DNA, 1485 bp, Artificial Sequence
  derived and/or modified sequence
atgctggccagcggcctgctgctggtgaccctgctggcctgcctgaccgtgatggtgctgatgagcgtgtggagacagagaaagagcagaggcaagctgccccccggccccacccccctgcccttcatcggcaactacctgcagctgaacaccgagcagatgtacaacagcctgatgaagatcagcgagagatacggccccgtgttcaccatccacctgggccccagaagagtggtggtgctgtgcggccacgacgccgtgaaggaggccctggtggaccaggccgaggagttcagcggcagaggcgagcaggccaccttcgactggctgttcaagggctacggcgtggccttcagcaacggcgagagagccaagcagctgagaagattcagcatcgccaccctgagaggcttcggcgtgggcaagagaggcatcgaggagagaatccaggaggaggccggcttcctgatcgacgccctgagaggcacccacggcgccaacatcgaccccaccttcttcctgagcagaaccgtgagcaacgtgatcagcagcatcgtgttcggcgacagattcgactacgaggacaaggagttcctgagcctgctgagaatgatgctgggcagcttccagttcaccgccaccagcaccggccagctgtacgagatgttcagcagcgtgatgaagcacctgcccggcccccagcagcaggccttcaaggagctgcagggcctggaggacttcatcgccaagaaggtggagcacaaccagagaaccctggaccccaacagccccagagacttcatcgacagcttcctgatcagaatgcaggaggaggagaagaaccccaacaccgagttctacctgaagaacctggtgatgaccaccctgaacctgttcttcgccggcaccgagaccgtgagcaccaccctgagatacggcttcctgctgctgatgaagcaccccgaggtggaggccaaggtgcacgaggagatcgacagagtgatcggcaagaacagacagcccaagttcgaggacagagccaagatgccctacaccgaggccgtgatccacgagatccagagattcggcgacatgctgcccatgggcctggcccacagagtgaacaaggacaccaagttcagagacttcttcctgcccaagggcaccgaggtgttccccatgctgggcagcgtgctgagagaccccagattcttcagcaaccccagagacttcaacccccagcacttcctggacaagaagggccagttcaagaagagcgacgccttcgtgcccttcagcatcggcaagagatactgcttcggcgagggcctggccagaatggagctgttcctgttcttcaccaccatcatgcagaacttcagattcaagagcccccagagccccaaggacatcgacgtgagccccaagcacgtgggcttcgccaccatccccagaaactacaccatgagcttcctgcccagatag

SEQ ID NO: 15370 - protein, 491 aa, Artificial Sequence
  derived and/or modified sequence
MELSVLLFLALLTGLLLLLVQRHPNTHDRLPPGPRPLPLLGNLLQMDRRGLLKSFLRFREKYGDVFTVHLGPRPVVMLCGVEAIREALVDKAEAFSGRGKIAMVDPFFRGYGVIFANGNRWKVLRRFSVTTMRDFGMGKRSVEERIQEEAQCLIEELRKSKGALMDPTFLFQSITANIICSIVFGKRFHYQDQEFLKMLNLFYQTFSLISSVFGQLFELFSGFLKYFPGAHRQVYKNLQEINAYIGHSVEKHRETLDPSAPKDLIDTYLLHMEKEKSNAHSEFSHQNLNLNTLSLFFAGTETTSTTLRYGFLLMLKYPHVAERVYREIEQVIGPHRPPELHDRAKMPYTEAVIYEIQRFSDLLPMGVPHIVTQHTSFRGYIIPKDTEVFLILSTALHDPHYFEKPDAFNPDHFLDANGALKKTEAFIPFSLGKRICLGEGIARAELFLFFTTILQNFSMASPVAPEDIDLTPQECGVGKIPPTYQIRFLPR

SEQ ID NO: 15371 - DNA, 1476 bp, Artificial Sequence
  derived and/or modified sequence
atggagctcagcgtcctcctcttccttgcactcctcacaggcctcttgctactcctggttcagcgtcaccctaactcccatggcaccctcccaccagggccccgccctctgccccttttggggaaccttctgcagatggacagaagaggcctactcaaatcctttctgaggttccgagagaaatatggggacgtcttcacggtacacctgggaccgaggcccgtggtcatgctgtgtggagtagaggccatacgggaggccctggtggacaacgctgaggccttctctggccggggaaaaatcgtcatcatggacccagtctaccagggatatggcatgctctttgccaatggaaaccgctggaaggtgcttcggcgattctctgtgaccaccatgagggacttcgggatgggaaagcggagtgtggaggagcggattcaggacgaggctcagtgtctgatagaggaacttcggaaatccaagggagccctcgtggaccccaccttcctcttccattccattaccgccaacatcatctgctccatcatctttggaaaacgcttccactaccaagatcaagagttcctgaagacgctgaacttgttctgccagagtttcttactcatcagctctatatccagccagctgtttgagctcttctctggcttcttgaaatactttcctggggcacacaggcaagtttacaaaaacctacaggaaatcaatgcttacattggccacagtgtggagaagcaccgtgaaaccctggaccccagcgcccccagggacctcatcgacacctacctgctccacatggaaaaagagaaatccaacccacacagtgaattcagccaccagaacctcatcatcaacacgctctcgctcttctttgctggcactgagaccaccagcaccactctccgctacggcttcctgctcatgctcaaataccctcatgtcgcagagagagtctacaaggagattgaacaggtggttggcccacatcgccctccagcgcttgatgaccgagccaaaatgccatacacagaggcagtcatccgtgagattcagagatttgctgaccttctccccatgggtgtgccccacattgtcacccaacacaccagcttctgagggtacaccatccccaaggacacggaagtatttctcatcctgagcactgctctccgtgacccacactactttgaaaaaccagacgccttcaatcctgaccactttctggatgccaatggggcactgaaaaagaatgaagcttttatccccttctccttagggaagcggatttgtcttggtgaaggcattgcccgtgcggaattgttcctcttcttcaccaccatcctccagaacttctccgtggccagccccgtggctcctgaagacatcgatctgacaccccaggagtgtggtgtgggcaaaatacccccaacataccagatctgcttcctgccccgctga

SEQ ID NO: 15372 - DNA, 1476 bp, Artificial Sequence
  derived and/or modified sequence
atggagctttctgtcctgttgttcctggcactgttaactgggctgctgctgctgctggtgcagcgtcaccccaatacacacgatcgccttcccccaggccccaggcctctgcctctattaggcaatctgctgcagatggatagacgcggtctcctcaagtcctttctccgctttcgggaaaagtacggggatgttttcacagtgcacctcggaccgagaccggttgtgatgctgtgtggtgtcgaagccatccgcgaggccctcgtggacaaggcggaggctttttccggaaggggcaagatagctatggtggacccattttttagaggatacggagtgatttttgccaatggcaacaggtggaaagttctaagaagattctctgtgacgactatgagggactttgggatggggaaacgaagtgtggaggaaagaattcaggaagaggcacagtgcctgatcgaggagctgcgaaagtctaaaggggctctgatggaccccacttttctgttccaatccatcactgccaacatcatctgttctatcgttttcgggaagcgatttcattaccaagaccaggaatttctgaagatgctcaatctgttctaccagactttcagtctgataagcagtgtcttcgggcagttattcgagctgtttagcggatttcttaaatatttcccaggggcccaccggcaagtgtacaagaatctgcaagagattaacgcctacattgggcactctgtggaaaagcacagagagaccttggacccatcggcccccaaggatctgattgatacctacctgctccacatggagaaggagaagtccaacgctcacagcgaattctcacatcagaatttaaaccttaacaccttgtctctgtttttcgcaggaactgagaccacatcaaccaccctcagatacgggttcctgcttatgctgaagtacccacacgttgccgaacgagtgtaccgtgaaatcgagcaggttattggtcctcacaggcccccggagctccacgatagggctaagatgccgtacacggaggccgttatctacgagatccagcgtttcagtgacctccttcccatgggcgtgccacacattgtgacccagcatacctctttcaggggctacattatccccaaagacacggaggtcttcctaattctttcgacagcccttcatgaccctcactacttcgagaagcctgacgcttttaatcctgatcatttccttgatgcaaacggggctctaaaaaaaacagaggcattcattcctttctctctcggaaaacggatttgtcttggagaagggatcgccagagcggagttatttctctttttcactacaatcttacaaaacttttctatggccagtcccgtagcgcccgaagacattgaccttacgcctcaagagtgcggcgttggaaagatcccccctacgtatcaaatccgcttcctgccacggtag

SEQ ID NO: 15373 - DNA, 1476 bp, Artificial Sequence
  derived and/or modified sequence
atggagctgtctgtgctgctcttcctggccctgctgaccggcctgctgctgctgctggtgcagaggcaccccaacacccatgaccggctgcccccaggcccccggcccctgcccctgctgggcaacctgctgcagatggaccggcggggcctgctgaagagcttcctgcgcttccgggagaagtatggagatgtgttcaccgtgcacctgggccccaggcctgtggtgatgctgtgtggggtggaggccatccgggaggccctggtggacaaggccgaggccttcagcggccggggcaagatcgccatggtggaccccttcttccggggctatggagtcatctttgccaatggaaaccgctggaaggtgctgcggcgcttctctgtgaccaccatgagggactttggcatgggcaagaggtctgtggaggagcgcatccaggaggaggcccagtgcctgattgaggagctgaggaagagcaaaggagccctgatggaccccaccttcctgttccagagcatcacagccaacatcatctgcagcatcgtgtttgggaagcgcttccactaccaggaccaggagttcctgaagatgctgaacctcttctaccagaccttcagcctcatcagctctgtgtttggccagctgtttgagctgttcagcggcttcctgaagtacttccctggggcccaccggcaggtgtacaagaacctgcaggagatcaatgcctacatcggccacagcgtggagaagcaccgggagaccctggaccccagcgcccccaaggacctgattgacacctacctgctgcacatggagaaggagaagagcaatgcccacagcgagttcagccaccagaacctgaacctgaacaccctgagcctcttctttgctggaacagagaccaccagcaccaccctgcgctatggcttcctgctgatgctgaagtacccccacgtggccgagcgggtgtaccgggagattgagcaggtgattggcccccacaggcctcctgagctgcatgaccgggccaagatgccctacacagaagctgtgatctatgagatccagcgcttcagtgacctgctgcccatgggcgtgccccacatcgtgacccagcacaccagcttccggggctacatcatccccaaggacacagaggtgttcctgatcctgagcacagccctgcatgacccccactactttgagaagccagatgccttcaacccagaccacttcctggatgccaatggagccctgaagaagacagaggccttcatccccttcagcctgggcaagaggatctgcctgggggagggcatcgcccgggcagagctgttcctgttcttcaccaccatcctgcagaacttctccatggccagccctgtggcccctgaggacatcgacctgaccccccaggagtgtggggtgggcaagatcccccccacctaccagatccgcttcctgcccaggtag

SEQ ID NO: 15374 - DNA, 1476 bp, Artificial Sequence
  derived and/or modified sequence
atggagctgagcgtgctgctgttcctggccctgctgaccggcctgctgctgctgttagtacagaggcaccccaacacgcacgaccggttgcctccaggaccacgtcccctgcccttgttgggtaacctgctgcaaatggatcgccgcggcctcctaaagtcgttcctgcgcttccgagagaaatacggagacgtgttcactgtccatctaggaccacgccccgtcgtgatgctttgtggagtcgaagcgatccgggaagcccttgtggataaggccgaagcgttttcaggccgaggaaagattgcaatggtggacccatttttccgcggttatggcgtcatctttgcaaacgggaaccgctggaaagttctgcggcgattttctgttactaccatgagggatttcggtatgggaaaacgatccgtggaagagagaattcaggaggaggcgcaatgtctgattgaagagcttcgcaagagcaaaggagccttaatggatccaacatttctgtttcagtccatcaccgcgaacataatctgttccatcgtcttcgggaaaagattccattaccaggaccaagagtttctaaaaatgcttaatctgttttatcagacattttccttgatatcctctgtctttggccaactgttcgaactgttttccggatttctcaagtactttcctggggcgcacaggcaggtgtacaagaatctgcaggagattaatgcctacattggccatagtgtggaaaaacacagagagacgttggaccccagtgcgccgaaggatctgattgatacatacctcctgcatatggaaaaagagaaatcgaatgctcactccgaattttcccaccagaacttgaatctgaacaccttgagcctgttcttcgcaggcaccgaaaccacgtctaccactcttcgctacggcttcctgctaatgctcaaatacccgcatgttgccgagcgagtttatagggagatcgaacaggtgatcggaccccacagacccccggagctccatgatcgggcgaaaatgccgtatacagaggctgtaatatatgagatccaacggttcagcgaccttttgccaatgggggttcctcacattgtcacacagcatacctccttccgcggctatattatccctaaggatacagaggtatttctaatcttgtcgactgcacttcatgatccccactactttgaaaaacctgatgcattcaatccagaccacttcttagatgccaatggcgccttgaagaagactgaggctttcattcccttctctctggggaagcgcatatgcctgggagagggtattgcgcgagcagaactgtttctgttcttcacaacgatcctacagaacttcagcatggcttcccccgtcgcaccagaggatatcgacctgacccctcaggagtgcggcgttggaaaaatacctccaacatatcagatcagattcctgcctcgctag

SEQ ID NO: 15375 - DNA, 1476 bp, Artificial Sequence
  derived and/or modified sequence
atggagctcagtgttctgctatttctggccctgctgacagggcttctgctgttgttggtacaacgtcacccaaatacacacgatcgactgcctcccggtccccgtcctctgcccttactgggcaatttgttgcagatggatagacggggtctccttaagtccttcctgcgctttcgcgagaagtacggggatgtgttcacagtgcacctgggccctagaccggtggttatgttatgtggtgtggaggcaatccgcgaggccctcgtggacaaagctgaggccttctccggtcggggaaagatcgctatggtggatccgttttttcgaggctacggtgtgatctttgcaaatgggaaccgatggaaggtgcttcgcagattttccgttacaacgatgcgcgactttggcatgggcaagagatccgtggaggagaggattcaggaggaagcacagtgtctgatcgaagaattgaggaagagtaaaggagcattgatggaccctactttcttattccagagcattaccgctaatattatctgcagtatcgtgttcggcaaacggttccactatcaggatcaagagttcttaaaaatgctgaatttattctaccagacattcagtctgataagcagcgtgttcggtcagctgtttgagctcttctcagggttcctaaagtattttcctggtgcacataggcaggtatacaaaaatctgcaggagatcaacgcatacatcgggcatagtgttgagaaacacagagagacactagacccgtccgccccaaaggaccttatcgacacctatttactacacatggaaaaggagaagtctaatgcccattccgaatttagccaccagaacctcaatcttaacacactttccctatttttcgcaggcacagaaacaacctcaactacactgaggtatggattcctcctgatgttgaagtatccacacgtggcagagagggtctaccgggagattgaacaggtcataggtccacacaggccgcctgagctccacgaccgcgctaaaatgccatacaccgaagccgtcatctacgagatacagagattttctgacctgctgccgatgggcgtgcctcacattgtcacacagcataccagcttccggggatatataattcctaaggataccgaggtctttctgattctgagcaccgctcttcatgatccccactacttcgaaaagccagatgcatttaatccggaccattttcttgacgcaaatggagccctgaagaagaccgaggccttcataccattctctctgggcaaacgcatatgccttggggaggggatcgctcgcgctgaattgttcctgtttttcacaaccattctgcagaacttttccatggctagcccggttgcaccagaagatatcgatctcactccacaggagtgtggtgtcggtaagattcctccgacatatcagattagattcctgcctcggtag

SEQ ID NO: 15376 - DNA, 3052 bp, Artificial Sequence
  derived and/or modified sequence
caggaccatggaactcagcgtcctcctcttccttgcactcctcacaggactcttgctactcctggttcagcgccaccctaacacccatgaccgcctcccaccagggccccgccctctgccccttttgggaaaccttctgcagatggatagaagaggcctactcaaatcctttctgaggttccgagagaaatatggggacgtcttcacggtacacctgggaccgaggcccgtggtcatgctgtgtggagtagaggccatacgggaggcccttgtggacaaggctgaggccttctctggccggggaaaaatcgccatggtcgacccattcttccggggatatggtgtgatctttgccaatggaaaccgctggaaggtgcttcggcgattctctgtgaccactatgagggacttcgggatgggaaagcggagtgtggaggagcggattcaggaggaggctcagtgtctgatagaggagcttcggaaatccaagggggccctcatggaccccaccttcctcttccagtccattaccgccaacatcatctgctccatcgtctttggaaaacgattccactaccaagatcaagagttcctgaagatgctgaacttgttctaccagactttttcactcatcagctctgtattcggccagctgtttgagctcttctctggcttcttgaaatactttcctggggcacacaggcaagtttacaaaaacctgcaggaaatcaatgcttacattggccacagtgtggagaagcaccgtgaaaccctggaccccagcgcccccaaggacctcatcgacacctacctgctccacatggaaaaagagaaatccaacgcacacagtgaattcagccaccagaacctcaacctcaacacgctctcgctcttctttgctggcactgagaccaccagcaccactctccgctacggcttcctgctcatgctcaaataccctcatgttgcagagagagtctacagggagattgaacaggtgattggcccacatcgccctccagagcttcatgaccgagccaaaatgccatacacagaggcagtcatctatgagattcagagattttccgaccttctccccatgggtgtgccccacattgtcacccaacacaccagcttccgagggtacatcatccccaaggacacagaagtatttctcatcctgagcactgctctccatgacccacactactttgaaaaaccagacgccttcaatcctgaccactttctggatgccaatggggcactgaaaaagactgaagcttttatccccttctccttagggaagcggatttgtcttggtgaaggcatcgcccgtgcggaattgttcctcttcttcaccaccatcctccagaacttctccatggccagccccgtggccccagaagacatcgatctgacaccccaggagtgtggtgtgggcaaaatacccccaacataccagatccgcttcctgccccgctgaaggggctgagggaagggggtcaaaggattccagggtcattcagtgtccccgcctctgtagacaatggctctgactccccgcaacttcctgcctctgagagacctgctacaagccagcttccttcccctccatggcaccagttgtctgaggtcacattgcaagtgagtgcaggagtgagattatcgaaaattataatatacaaaatcatatatatatatatgttcttgttttttgagacagagtctcacactgttgcccaggctggagtgcagtggcgtgatctcggctcactgcaacctccacccccggggatcaagcaactctcctgcctcagcctccctagtagctgggattacaggcatgcactaccacgcttggctaatttttgtatttttagtagagatggggtttcactgtgtaggccaggctggtctcgaactcctgaactcaagtgattcacccaccttagcctcccaaagtgctgggattacaggcgtgagtcaccgtgcccagccatgtatatatataattttaaaaattaagctgaaattcacataacataaaattagctgttttaaagtgtaaaatttagtggcgtgtggttcattcacaaagctgtacaaccaccaccatctagttccaaacattttctttttttctgagatggagtctcactctgtcacccaggttcgagttcagtggtgccatctctgtccactgcaacctccacatcctgggttcaagtgattctcctgcctcagcctctggaggagctggtatcacaggcgtcccccaccacgcctggctaaattttgtatttttaggtggtcttgaactcctgatgtcaggtgattctcctagctccaaatgttttcattatctctcccccaacaaaacccatacctatcaagctgtcactccccataccccattctctttttcatctcggcccctgtcaatctggtttttgtcactatggacttaccaattctgaatatttcccataaacagaatcatacaatatttgattttttttttttttttgaaactaagccttgctctgtctcccaggctggagtgctatggtgcaatttttgttcactgcaacctctgccttccaagatcaagagattctccagtctcagctcccaagtagctgggattacaggcatgtactaccatgcctggctaattttcttgtagttttagtagggacatgttggccaggctggtggtgagctcctggcctcaggtgatccacccacctcagtgttccaaagtgctgatattacaggcataatatgtgatcttttgtgtctggttgctttcatgttgaatgctatttttgaggttcatgcctgttgtagaccacagtcacacactgctgtagtcttccccagtcctcattcccagctgcctcttcctactgcttccgtctatcaaaaagcccccttggcccaggttccctgagctgtgggattctgcactggtgctttggattccctgatatgttccttcaaatctgctgagaattaaataaacatctctaaagcctgacctccccacgtc

SEQ ID NO: 15377 - DNA, 1476 bp, Artificial Sequence
  derived and/or modified sequence
atggagctgagcgtgctgctgttcctggccctgctgaccggcctgctgctgctgctggtgcagagacaccccaacacccacgacagactgccccccggccccagacccctgcccctgctgggcaacctgctgcagatggacagaagaggcctgctgaagagcttcctgagattcagagagaagtacggcgacgtgttcaccgtgcacctgggccccagacccgtggtgatgctgtgcggcgtggaggccatcagagaggccctggtggacaaggccgaggccttcagcggcagaggcaagatcgccatggtggaccccttcttcagaggctacggcgtgatcttcgccaacggcaacagatggaaggtgctgagaagattcagcgtgaccaccatgagagacttcggcatgggcaagagaagcgtggaggagagaatccaggaggaggcccagtgcctgatcgaggagctgagaaagagcaagggcgccctgatggaccccaccttcctgttccagagcatcaccgccaacatcatctgcagcatcgtgttcggcaagagattccactaccaggaccaggagttcctgaagatgctgaacctgttctaccagaccttcagcctgatcagcagcgtgttcggccagctgttcgagctgttcagcggcttcctgaagtacttccccggcgcccacagacaggtgtacaagaacctgcaggagatcaacgcctacatcggccacagcgtggagaagcacagagagaccctggaccccagcgcccccaaggacctgatcgacacctacctgctgcacatggagaaggagaagagcaacgcccacagcgagttcagccaccagaacctgaacctgaacaccctgagcctgttcttcgccggcaccgagaccaccagcaccaccctgagatacggcttcctgctgatgctgaagtacccccacgtggccgagagagtgtacagagagatcgagcaggtgatcggcccccacagaccccccgagctgcacgacagagccaagatgccctacaccgaggccgtgatctacgagatccagagattcagcgacctgctgcccatgggcgtgccccacatcgtgacccagcacaccagcttcagaggctacatcatccccaaggacaccgaggtgttcctgatcctgagcaccgccctgcacgacccccactacttcgagaagcccgacgccttcaaccccgaccacttcctggacgccaacggcgccctgaagaagaccgaggccttcatccccttcagcctgggcaagagaatctgcctgggcgagggcatcgccagagccgagctgttcctgttcttcaccaccatcctgcagaacttcagcatggccagccccgtggcccccgaggacatcgacctgaccccccaggagtgcggcgtgggcaagatcccccccacctaccagatcagattcctgcccagatag

SEQ ID NO: 15378 - protein, 490 aa, Artificial Sequence [sequence omitted]

SEQ ID NO: 15379 - DNA, 1473 bp, Artificial Sequence
  derived and/or modified sequence
atggatcccttcgtggttctggtcctgtgtctttcttgcctgcttctgttgtcgatttggcgccagagctcaggacgaggcaaactgccccctggacccacgccactgcccgtgatcgggaacatcctccagatcgatatcaaggatgtctcaaagtcactgacgaacttatcaaaaatttacggtccagtgttcactttgtactttggtctggagcgtatggtggtccttcacggctacgaagtagtgaaggaggccctcattgatctcggcgaggaattctctggacggggccatttccccctggccgagagagcaaatagaggatttggcattgttttcagcaacggtaaacgttggaaggaaatcaggaggttttccctaatgacactaagaaatttcgggatgggaaaacgctccattgaagaccgcgtgcaggaggaagcacgctgcttagtggaggagctgcggaagaccaaggcttccccatgcgacccgacttttatcttgggatgtgcgccctgcaatgtaatctgctcaattatcttccaaaaacgtttcgactacaaagatcagcagttcctaaatttgatggaaaagttgaacgagaacatccggatcgttagcacaccctggattcaaatctgtaataattttccaacaattatcgattattttccaggcacacacaacaagttgctgaaaaatctcgctttcatggaatccgatatactggagaaggtgaaggaacatcaagagagtatggatattaacaacccccgcgatttcatagattgtttcttaataaaaatggagaaggaaaaacagaaccaacaatctgaattcaccattgagaacctagtgatcactgcggccgatctactaggagccggcactgagacaacttccaccacccttcggtacgccttgctactgcttctgaaacaccctgaagtgacagccaaagtacaggaagagatagagcgagttgtgggtcgcaacagatctccttgtatgcaggatagaggacatatgccctacacagacgccgtggtccatgaagtgcagaggtatatcgacctcatccccacctccctcccccatgcggtcacatgtgatgtgaaattcagaaattacttaattccaaaaggtacaacaatcttgacaagcctaacaagcgtcctgcacgataacaaagagttccctaaccccgagatgttcgatcctaggcatttcctggacgaaggcggaaacttcaagaagagcaactattttatgcccttcagcgcggggaagcgcatttgtgtcggggaagggctagcacgaatggagttattcctgttcttgactttcattctgcaaaatttcaacctgaagtcattaattgacccaaaagatcttgatacaaccccggtggtcaacggctttgcctctgtgccaccattttatcagctgtgctttattcctgtgtag

SEQ ID NO: 15380 - DNA, 1473 bp, Artificial Sequence
  derived and/or modified sequence
atggacccctttgtggtgctggtgctgtgcctgagctgcctgctgctgctgagcatctggaggcagagcagcggccggggcaagctgcccccaggccccacccccctgcctgtgattggcaacatcctgcagattgacatcaaggatgtgtccaagagcctgaccaacctgagcaagatctacggccctgtgttcaccctgtacttcggcctggagaggatggtggtgctgcacggctatgaggtggtgaaggaggccctgattgacctgggggaggagttcagcggccggggccacttccccctggccgagcgggccaacagaggcttcggcatcgtgttcagcaatggcaagcgctggaaggagatccgccgcttcagcctgatgaccctgaggaactttggcatgggcaagaggagcattgaggacagagtgcaggaggaggcccgctgcctggtggaggagctgaggaagaccaaggccagcccctgtgaccccaccttcatcctgggctgtgccccctgcaacgtcatctgcagcatcatcttccagaagagatttgactacaaggaccagcagttcctgaacctgatggagaagctgaatgaaaacatcagaattgtgtccaccccctggatccagatctgcaacaacttccccaccatcatcgactacttccctggcacccacaacaagctgctgaagaacctggccttcatggagagtgacatcctggagaaggtgaaggagcaccaggagagcatggacatcaacaacccccgggacttcatcgactgcttcctgatcaagatggagaaggagaagcagaaccagcagagcgagttcaccatcgagaacctggtgatcacagctgctgacctgctgggcgccggcacagagaccaccagcaccaccctgcgctatgccctgctgctgctgctgaagcaccctgaggtgacagccaaggtgcaggaggagattgagcgggtggtgggcaggaacagaagcccctgcatgcaggaccggggccacatgccctacacagatgctgtggtgcatgaggtgcagcgctacatcgacctgatccccaccagcctgccccatgctgtgacctgtgatgtgaagttcaggaactacctgatccccaagggcaccaccatcctgaccagcctgacctctgtgctgcatgacaacaaggagttccccaaccctgagatgtttgaccccaggcacttcctggatgagggcggcaacttcaagaagagcaactacttcatgcccttctctgctgggaagaggatctgtgtgggggagggcctggccaggatggagctgttcctgttcctgaccttcatcctgcagaacttcaacctgaagagcctgattgaccccaaggacctggacaccacccctgtggtgaatggatttgcctctgtgccccccttctaccagctgtgcttcatccctgtgtag

SEQ ID NO: 15381 - DNA, 1473 bp, Artificial Sequence
  derived and/or modified sequence
atggaccccttcgtggtgctggtgctgtgcctgagctgcctgctgctgcttagcatctggcgtcagagcagcggtcgcggaaagctgccacccggacccaccccattgccagtgataggcaacattcttcaaatcgacatcaaggacgtttccaaatccctgacaaacctgtccaagatctacggccctgtatttaccctatacttcggactggaaaggatggtggtgcttcacgggtacgaagtggttaaggaggctttaattgacctgggcgaagagtttagcggccgcgggcattttcctctcgccgagagggctaatagaggcttcggtatcgtctttagcaacggaaagcgctggaaggagataagacgcttctccctcatgacactccggaacttcgggatgggcaagagatccattgaggacagagtgcaggaagaagcccgatgcttggtggaggaactgcgcaagaccaaagctagcccatgcgatccaacttttattctgggatgtgcgccctgcaatgtgatctgctctattattttccaaaaacggttcgattacaaggatcagcagtttttgaatctcatggaaaagctgaatgagaacattcgcatcgtgtccaccccttggatccagatctgcaataatttccctaccataatcgattacttcccaggaacacacaacaaactgctcaaaaacctggctttcatggagtccgacatattggagaaggtgaaggaacatcaggaatcaatggacataaacaacccgcgggatttcatagattgttttctgatcaaaatggagaaagaaaagcagaatcagcagagcgaattcacaatagaaaacctggttatcacagccgcagacctcctgggggctggtacggagaccacaagtactactctgcgctatgccttattgctgctgctgaagcaccccgaggtgaccgctaaggtgcaagaagagatagaacgcgtggtagggcgtaaccgttctccatgcatgcaggatcgaggccatatgccctatacagacgccgtcgtgcatgaggtgcagcgctatatagacctgattccaacaagtcttccccacgccgtaacttgcgatgttaaattccgaaattatttgattcccaagggcaccaccatcttgacttccctaacttcagtgttacacgacaacaaggagttccccaatcctgagatgtttgatcccaggcacttcttggatgaaggtgggaattttaaaaaatccaattactttatgccttttagtgccgggaagaggatttgcgtcggggaggggttggctagaatggaactctttctgttccttaccttcattcttcagaacttcaacctcaaaagcctcatcgaccctaaagaccttgacaccacaccagtcgtgaatgggtttgcctccgtgccccccttctatcagctttgttttatcccagtttag

SEQ ID NO: 15382 - DNA, 1473 bp, Artificial Sequence
  derived and/or modified sequence
atggatccgtttgtagttctggtattgtgcctgtcctgcctcctgctcctgagcatttggcgccaaagctccggtcggggtaagctgcccccaggcccaactcccttgccagtgattggtaatattctgcagattgatattaaggatgtaagcaagtctttgaccaacctctcaaagatatacggtcccgttttcacgctctattttggcctagaacgcatggttgtccttcatggatacgaggtggtcaaagaggctctgatcgatttgggcgaggaattttccgggcgtggtcactttccattagcagagcgcgctaaccgcggtttcggtatcgtattctcaaacggcaagcggtggaaggaaattcgtcgtttctctctgatgactctgcggaattttggaatgggcaagaggagcatagaggaccgggtgcaagaggaggcgaggtgtctggtggaggaacttcggaaaaccaaagcctcaccttgcgacccgacctttatcttagggtgtgccccatgtaacgtgatctgtagcattatctttcaaaaacggttcgattataaagaccagcagtttctaaatttaatggagaagctgaatgagaatataaggatcgtttccaccccatggattcaaatctgtaacaattttccaactattatcgactacttccctggcacacataataagctactgaaaaatctggctttcatggaaagcgatatactggaaaaggtgaaagagcaccaggagagcatggacatcaacaacccgagagattttattgattgtttcctgatcaagatggaaaaagagaaacagaatcagcaatctgaattcactattgaaaacctggttattacagcagcagacttgctgggtgcaggaactgaaacaacttctacgaccctgaggtatgccctattgctgctcctgaaacaccctgaggtcacggccaaggtgcaggaagaaatagaaagggttgttggacgcaacagatcaccctgcatgcaagatcgaggccacatgccttacactgatgccgtggtacacgaggtacagcggtatatagaccttatccctacctcccttccccatgcagtaacgtgcgacgtgaagtttaggaactacttgatccctaagggcaccacaatattaacctccttgacgtccgtgctgcacgacaataaagaattcccaaaccccgagatgttcgaccctaggcactttttagacgagggcggaaatttcaagaagtccaattacttcatgccatttagtgctggcaaacgcatttgcgtgggggaaggcttagctcgtatggaactgtttctgtttctgacattcatcctgcagaactttaatcttaagtctttgatcgaccccaaagaccttgacaccacgccagtggttaacgggttcgcttccgtgccccctttttaccaactgtgtttcattcccgtatag

SEQ ID NO: 15383 - DNA, 1901 bp, Artificial Sequence
  derived and/or modified sequence
acacacacttaattagcatggagtgttataaaaagcttggagtgcaagctcacggttgtcttaacaagaggagaaggcttcaatggatccttttgtggtccttgtgctctgtctctcatgtttgcttctcctttcaatctggagacagagctctgggagaggaaaactccctcctggccctactcctctcccagtgattggaaatatcctacagatagatattaaggatgtcagcaaatccttaaccaatctctcaaaaatctatggccctgtgttcactctgtattttggcctggaacgcatggtggtgctgcatggatatgaagtggtgaaggaagccctgattgatcttggagaggagttttctggaagaggccatttcccactggctgaaagagctaacagaggatttggaatcgttttcagcaatggaaagagatggaaggagatccggcgtttctccctcatgacgctgcggaattttgggatggggaagaggagcattgaggaccgtgttcaagaggaagcccgctgccttgtggaggagttgagaaaaaccaaggcttcaccctgtgatcccactttcatcctgggctgtgctccctgcaatgtgatctgctccattattttccagaaacgtttcgattataaagatcagcaatttcttaacttgatggaaaaattgaatgaaaacatcaggattgtaagcaccccctggatccagatatgcaataattttcccactatcattgattatttcccgggaacccataacaaattacttaaaaaccttgcttttatggaaagtgatattttggagaaagtaaaagaacaccaagaatcgatggacatcaacaaccctcgggactttattgattgcttcctgatcaaaatggagaaggaaaagcaaaaccaacagtctgaattcactattgaaaacttggtaatcactgcagctgacttacttggagctgggacagagacaacaagcacaaccctgagatatgctctccttctcctgctgaagcacccagaggtcacagctaaagtccaggaagagattgaacgtgtcgttggcagaaaccggagcccctgcatgcaggacaggggccacatgccctacacagatgctgtggtgcacgaggtccagagatacatcgacctcatccccaccagcctgccccatgcagtgacctgtgacgttaaattcagaaactacctcattcccaagggcacaaccatattaacttccctcacttctgtgctacatgacaacaaagaatttcccaacccagagatgtttgaccctcgtcactttctggatgaaggtggaaattttaagaaaagtaactacttcatgcctttctcagcaggaaaacggatttgtgtgggagagggcctggcccgcatggagctgtttttattcctgaccttcattttacagaactttaacctgaaatctctgattgacccaaaggaccttgacacaactcctgttgtcaatggatttgcttctgtcccgcccttctatcagctgtgcttcattcctgtctgaagaagcacagatggtctggctgctcctgtgctgtccctgcagctctctttcctctggtccaaatttcactatctgtgatgcttcttctgacccgtcatctcacattttcccttcccccaagatctagtgaacattcagcctccattaaaaaagtttcactgtgcaaatatatctgctattccccatactctataatagttacattgagtgccacataatgctgatacttgtctaatgttgagttattaacatattattattaaatagagaaagatgatttgtgtattataattcaaaggcatttcttctctgcatgttctaaacaaaaagcattattatttgctga

SEQ ID NO: 15384 - DNA, 1473 bp, Artificial Sequence
  derived and/or modified sequence
atggaccccttcgtggtgctggtgctgtgcctgagctgcctgctgctgctgagcatctggagacagagcagcggcagaggcaagctgccccccggccccacccccctgcccgtgatcggcaacatcctgcagatcgacatcaaggacgtgagcaagagcctgaccaacctgagcaagatctacggccccgtgttcaccctgtacttcggcctggagagaatggtggtgctgcacggctacgaggtggtgaaggaggccctgatcgacctgggcgaggagttcagcggcagaggccacttccccctggccgagagagccaacagaggcttcggcatcgtgttcagcaacggcaagagatggaaggagatcagaagattcagcctgatgaccctgagaaacttcggcatgggcaagagaagcatcgaggacagagtgcaggaggaggccagatgcctggtggaggagctgagaaagaccaaggccagcccctgcgaccccaccttcatcctgggctgcgccccctgcaacgtgatctgcagcatcatcttccagaagagattcgactacaaggaccagcagttcctgaacctgatggagaagctgaacgagaacatcagaatcgtgagcaccccctggatccagatctgcaacaacttccccaccatcatcgactacttccccggcacccacaacaagctgctgaagaacctggccttcatggagagcgacatcctggagaaggtgaaggagcaccaggagagcatggacatcaacaaccccagagacttcatcgactgcttcctgatcaagatggagaaggagaagcagaaccagcagagcgagttcaccatcgagaacctggtgatcaccgccgccgacctgctgggcgccggcaccgagaccaccagcaccaccctgagatacgccctgctgctgctgctgaagcaccccgaggtgaccgccaaggtgcaggaggagatcgagagagtggtgggcagaaacagaagcccctgcatgcaggacagaggccacatgccctacaccgacgccgtggtgcacgaggtgcagagatacatcgacctgatccccaccagcctgccccacgccgtgacctgcgacgtgaagttcagaaactacctgatccccaagggcaccaccatcctgaccagcctgaccagcgtgctgcacgacaacaaggagttccccaaccccgagatgttcgaccccagacacttcctggacgagggcggcaacttcaagaagagcaactacttcatgcccttcagcgccggcaagagaatctgcgtgggcgagggcctggccagaatggagctgttcctgttcctgaccttcatcctgcagaacttcaacctgaagagcctgatcgaccccaaggacctggacaccacccccgtggtgaacggcttcgccagcgtgccccccttctaccagctgtgcttcatccccgtgtag

SEQ ID NO: 15385 - protein, 83 aa, Artificial Sequence
  derived and/or modified sequence
MEPFVVLVLCLSFMLLFSLWRQSCRRRKLPPGPTPLPIIGNMLQIDVKDICKSFTNVSLPYVPPANCKGSQKSMVLCSPCILA

SEQ ID NO: 15386 - protein, 72 aa, Artificial Sequence
  derived and/or modified sequence
MEPFVVLVLCLSFMLLFSLWRQSCRRRKLPPGPTPLPIIGNMLQIDVKDICKSFTNVSLPYVPPANCKGVLL

SEQ ID NO: 15387 - protein, 490 aa, Artificial Sequence
  derived and/or modified sequence
MEPFVVLVLCLSFMLLFSLWRQSCRRRKLPPGPTPLPIIGNMLQIDVKDICKSFTNFSKVYGPVFTVYFGMNPIVVFHGYEAVKEALIDNGEEFSGRGNSPISQRITKGLGIISSNGKRWKEIRRFSLTTLRNFGMGKRSIEDRVQEEAHCLVEELRKTKASPCDPTFILGCAPCNVICSVVFQKRFDYKDQNFLTLMKRFNENFRILNSPWIQVCNNFPLLIDCFPGTHNKVLKNVALTRSYIREKVKEHQASLDVNNPRDFIDCFLIKMEQEKDNQKSEFNIENLVGTVADLFVAGTETTSTTLRYGLLLLLKHPEVTAKVQEEIDHVIGRHRSPCMQDRSHMPYTDAVVHEIQRYSDLVPTGVPHAVTTDTKFRNYLIPKGTTIMALLTSVLHDDKEFPNPNIFDPGHFLDKNGNFKKSDYFMPFSAGKRICAGEGLARMELFLFLTTILQNFNLKSVDDLKNLNTTAVTKGIVSLPPSYQICFIPV

SEQ ID NO: 15388 - DNA, 252 bp, Artificial Sequence
  derived and/or modified sequence
atggaaccgtttgtcgtgttggtgctgtgcctgtcatttatgttgctcttctctttgtggagacaatcatgccgccgaaggaagctgcccccaggccctacccctctccccatcattggcaacatgctccagatcgacgtgaaagacatatgtaaatcttttacaaacgtgagtctgccgtacgtgcctccggcgaactgcaagggctcccagaagagcatggtcttgtgttcaccatgtatcctggcttag

SEQ ID NO: 15389 - DNA, 219 bp, Artificial Sequence
  derived and/or modified sequence
atggagccgttcgtcgttctggtgctgtgcctttcttttatgttactgttttctctgtggcggcagtcttgtagaaggagaaagctcccccccggccccaccccattgcccattattggaaatatgcttcagatcgatgtgaaggatatttgcaaaagcttcactaacgtctcgcttccatatgtcccaccagcaaattgcaaaggggtgctgctgtag

SEQ ID NO: 15390 - DNA, 1473 bp, Artificial Sequence
  derived and/or modified sequence
atggaaccctttgtagttctggttctgtgcctgagcttcatgctacttttcagcctttggcgacagagctgtcgacgcagaaagttacccccgggccccaccccgctgccgatcatcgggaacatgttacaaattgacgtgaaagacatctgtaagtcttttaccaatttctcaaaggtttatggccccgtctttactgtgtattttgggatgaacccgattgtggtatttcacggatacgaggcagtgaaggaggccctcattgacaacggtgaagagttttcgggacggggcaatagtcctataagccagagaattacaaaagggttgggtatcatcagttccaatgggaaacggtggaaggagattcgtagattcagcctgacaactctgcggaactttggcatgggcaagcgcagcattgaagacagagttcaggaggaagcacactgtctcgtcgaggaactgagaaaaacaaaggcaagcccatgtgatcctacatttatcctcggatgtgcgccatgcaacgtaatctgctcggtcgtgtttcagaaaaggttcgactataaggatcaaaattttctgacccttatgaaaagatttaatgagaattttcgaattctaaactccccttggatccaggtgtgtaacaactttccgctcctcattgactgttttcccggcacacataataaagtgctgaaaaacgtcgctctcacgcgctcctatataagagaaaaggtcaaggagcaccaagccagccttgacgtaaataaccccagagactttatcgattgtttcctgatcaaaatggaacaagagaaggacaatcaaaagagcgaatttaatatagagaaccttgtgggtaccgtggcagacctcttcgttgcaggaacagagactacttctacaactctacggtacgggctattgctgctcctcaaacatccggaggtcacagccaaagtacaggaagagatcgatcacgtcattgggcgacaccgctcaccttgcatgcaggacaggtcacacatgccatacactgacgccgtcgtgcacgagattcagcggtatagcgaccttgtgcccaccggcgtgcctcacgccgtgacaacggacaccaagttccggaattatcttattccgaagggcactacgattatggcccttcttactagcgtgctgcatgacgacaaggagttcccaaatcctaatatatttgatcctggccacttcttggataagaacggcaacttcaaaaaatcagattattttatgcctttctccgccgggaagcgaatttgcgctggtgaaggactcgctcgcatggaactatttctgtttcttacaaccatccttcagaatttcaacctgaagtcagtggacgatctcaagaacctgaataccacagccgttactaaaggtattgtttcccttccgccaagttaccagatctgcttcattcctgtgtag

SEQ ID NO: 15391 - DNA, 252 bp, Artificial Sequence
  derived and/or modified sequence
atggagccctttgtggtgctggtgctgtgcctgtccttcatgctgctcttcagcctgtggaggcagagctgcagaagaaggaagctgcccccaggccccacccccctgcccatcatcggcaacatgctgcagattgatgtgaaggacatctgcaagagcttcaccaacgtgtccctgccctacgtgcccccagccaactgcaagggcagccagaagtccatggtgctgtgcagcccctgcatcctggcctag

SEQ ID NO: 15392 - DNA, 219 bp, Artificial Sequence
  derived and/or modified sequence
atggagccctttgtggtgctggtgctgtgcctgtccttcatgctgctcttcagcctgtggaggcagagctgcagaagaaggaagctgcccccaggccccacccccctgcccatcatcggcaacatgctgcagattgatgtgaaggacatctgcaagagcttcaccaacgtgtccctgccctacgtgcccccagccaactgcaagggcgtgctgctgtag

SEQ ID NO: 15393 - DNA, 1473 bp, Artificial Sequence
  derived and/or modified sequence
atggagccctttgtggtgctggtgctgtgcctgtccttcatgctgctcttcagcctgtggaggcagagctgcagaagaaggaagctgcccccaggccccacccccctgcccatcatcggcaacatgctgcagattgatgtgaaggacatctgcaagagcttcaccaacttcagcaaggtgtatggccctgtgttcaccgtgtacttcggcatgaaccccatcgtggtgttccacggctatgaggccgtgaaggaggccctgattgacaacggggaggagttcagcggccggggcaacagccccatcagccagaggatcaccaagggcctgggcatcatcagcagcaatggcaagcgctggaaggagatccgccgcttcagcctgaccaccctgaggaactttggcatgggcaagaggagcattgaggacagagtgcaggaggaggcccactgcctggtggaggagctgaggaagaccaaggccagcccctgtgaccccaccttcatcctgggctgtgccccctgcaacgtcatctgcagcgtggtgttccagaagagatttgactacaaggaccagaacttcctgaccctgatgaagcgcttcaatgaaaacttccgcatcctgaacagcccctggatccaggtgtgcaacaacttccccctgctgattgactgcttccctggcacccacaacaaggtgctgaagaatgtggccctgaccaggagctacatccgggagaaggtgaaggagcaccaggccagcctggatgtgaacaacccccgggacttcatcgactgcttcctgatcaagatggagcaggagaaggacaaccagaagtctgagttcaacatcgagaacctggtgggcaccgtggccgacctgtttgtggccggcacagagaccaccagcaccaccctgcgctatggcctgctgctgctgctgaagcaccctgaggtgacagccaaggtgcaggaggagattgaccacgtgattggccgccacaggagcccctgcatgcaggacaggagccacatgccctacacagatgctgtggtgcatgagatccagcgctacagcgacctggtgcccaccggggtgccccatgctgtgaccacagacaccaagttcaggaactacctgatccccaagggcaccaccatcatggccctgctgacctctgtgctgcatgatgacaaggagttccccaaccccaacatctttgatcctggccacttcctggacaagaatggaaacttcaagaagagtgactacttcatgcccttctctgctgggaagaggatctgtgccggggagggcctggccaggatggagctgttcctgttcctgaccaccatcctgcagaacttcaacctgaagtctgtggatgacctgaagaacctgaacaccacagctgtgaccaagggcatcgtgtccctgccccccagctaccagatctgcttcatccctgtgtag

SEQ ID NO: 15394 - DNA, 252 bp, Artificial Sequence
  derived and/or modified sequence
atggagcccttcgtggtgctggtgctgtgcctgagcttcatgctgctatttagcctgtggcgccagagttgcagaagaagaaaattgccaccaggtcctactccactgccgatcatcggcaacatgctgcagatcgacgtcaaggacatctgtaagtcatttacaaatgtatctctgccatatgtaccacctgccaactgtaagggaagtcagaaatccatggtgctctgctcgccctgcatcctcgcttag

SEQ ID NO: 15395 - DNA, 219 bp, Artificial Sequence
  derived and/or modified sequence
atggagcccttcgtggtgctggtgctgtgcctgagcttcatgctgctcttcagcctttggaggcagtcctgtcgccgcagaaagctcccgcccggtcccacccccttacccattatcgggaacatgctgcagatcgacgttaaggatatttgcaaatcttttactaacgtgtcattgccatatgtcccgcctgcgaattgcaaaggcgttttgctttag

SEQ ID NO: 15396 - DNA, 1473 bp, Artificial Sequence
  derived and/or modified sequence
atggagcccttcgtggtgctggtgctgtgcctgagcttcatgctgcttttcagcctctggcggcaaagctgccgcagaaggaagttgcccccaggacctacccctctacctatcatcggtaacatgcttcagattgacgtaaaagacatttgcaagtccttcactaatttctctaaagtttacggccccgtgtttaccgtctatttcggaatgaacccaattgtggtatttcatggatatgaggctgtcaaagaagccttgatagataacggcgaagaattcagcggccggggcaactcacccatcagtcagagaatcactaagggactgggcattatatccagcaacggaaaaagatggaaagaaatccgaagattcagtttgacaaccctgaggaatttcgggatgggaaagcgctccattgaagaccgagtgcaggaggaggctcactgccttgtggaggaacttagaaagaccaaagccagcccttgtgatccaacctttatacttggctgtgccccatgtaacgtaatttgctctgttgtttttcagaagcgcttcgattacaaggaccagaattttttgaccctgatgaagagatttaatgaaaacttccgaatactcaattccccctggatccaggtgtgcaacaattttccgctgttaatagactgtttccctgggactcacaataaggtgctgaaaaatgtggcgctcactaggagttacatccgggagaaagtgaaagaacatcaagccagcttggatgtgaacaacccaagagactttatcgattgcttcctgatcaagatggaacaggaaaaggacaatcagaagagcgaattcaacatcgagaatttagtagggacagtggctgacttgttcgtcgccgggacagaaaccacaagcaccactctacgctacggactgttgcttctgttgaagcatccagaagtcactgctaaagtgcaggaagaaattgaccacgtgattggcagacatcgttctccctgcatgcaggatcggagtcacatgccctacacggatgcggtcgttcacgaaattcaacggtattccgatcttgtacctacaggcgttccccatgctgtaaccaccgatacaaaatttcggaactacctgatccctaagggaactaccattatggccctcctcacctccgtccttcatgatgacaaggagtttccaaaccccaacatcttcgatcccggacatttccttgacaagaacggaaacttcaagaagagtgactatttcatgccgttctcagccgggaagaggatttgtgccggagagggattggcacgcatggaattattcctcttcttaacgaccatccttcaaaactttaatctgaagtctgtggatgatttgaaaaacctaaacacaacggccgtgactaaaggtattgtgagcctacctccttcataccagatttgttttattcccgtctag

SEQ ID NO: 15397 - DNA, 252 bp, Artificial Sequence
  derived and/or modified sequence
atggagcccttcgtggtcctggtactatgcctcagttttatgctgctttttagtctgtggagacagtcgtgtcgaagaagaaagttgcctcctgggccaacgccgctgccaatcataggcaatatgcttcagattgatgtcaaagacatttgtaaaagctttaccaatgtgagtttaccatacgttccccctgccaactgcaagggcagccagaaatccatggtgctctgcagtccttgtattctggcctag

SEQ ID NO: 15398 - DNA, 219 bp, Artificial Sequence
  derived and/or modified sequence
atggaaccctttgtggttctggtgctctgtctgagcttcatgttgctgttttccctatggaggcaatcctgtcggcgacgcaagctaccgccaggaccaaccccactgcccatcataggcaatatgctccaaatagacgtgaaggacatctgcaagagctttaccaacgttagtctgccctacgtgcctcccgctaattgcaaaggcgtgctgctttag

SEQ ID NO: 15399 - DNA, 1473 bp, Artificial Sequence
  derived and/or modified sequence
atggagccattcgtggtcctggtactgtgtctgtcatttatgttattattttctctctggaggcagtcatgccgacggaggaagctgcctcctggaccaacgccactgcctatcatcggaaacatgttgcagatcgacgtgaaggacatatgtaagtcatttacgaacttttctaaagtctacggcccagtgttcacagtctatttcggcatgaatcctatagtcgtgtttcatgggtatgaggccgtgaaggaggccttgattgataatggtgaagaattttctggcagaggtaacagcccgatcagtcagaggatcaccaaggggctggggatcatctcaagcaacgggaaaagatggaaagaaatcaggaggttctcgctgaccactctccgaaacttcggcatgggtaagcgatccatcgaggaccgggtccaggaggaagctcattgcttggtggaggagcttcgcaaaacaaaggccagtccgtgcgaccccacatttattttgggctgcgccccatgtaatgtgatttgtagtgtggttttccaaaaacggttcgattacaaggaccagaattttttgactctgatgaaacgattcaatgagaactttcgcattctcaactcaccctggatccaagtgtgcaataattttcctcttctgatagactgtttccccggaactcataacaaggtcctgaagaacgtggctctgacccggtcttacattcgcgaaaaggtgaaagaacaccaggcctccctggacgtcaataatccgagagactttatcgattgtttcttgattaaaatggaacaagagaaagataaccagaagtccgagtttaatattgagaatcttgtgggcacagtggccgatctcttcgttgccggtacagaaactacctcgacaactttgcgatacgggttgcttcttctcctcaagcatcccgaggtaactgctaaagtgcaggaggaaatcgaccacgtgatcggccgacaccgctccccatgcatgcaggaccgaagtcatatgccctacaccgatgcagtggtacatgaaattcagcggtactccgatctagtgccaactggagtgccgcatgctgtcacaacagacacaaagtttcgaaactaccttatcccaaaggggactactatcatggcactgcttacctctgtgttgcatgatgataaagagtttcccaaccctaacatctttgaccccggacactttctcgacaagaacgggaatttcaagaagtctgattattttatgcccttctcggccggaaagcggatttgtgctggcgaaggattggcgcgtatggaactttttctatttttaacgactatactccagaacttcaacctcaaaagcgtggacgatcttaagaacttaaataccacagccgtgactaaggggatcgtgagtctgcccccttcttaccagatctgttttattccggtgtag

SEQ ID NO: 15400 - DNA, 1961 bp, Artificial Sequence
  derived and/or modified sequence
acatgtcaaagagacacacactaaattagcagggagtgttataaaaactttggagtgcaagctcacagctgtcttaataagaagagaaggcttcaatggaaccttttgtggtcctggtgctgtgtctctcttttatgcttctcttttcactctggagacagagctgtaggagaaggaagctccctcctggccccactcctcttcctattattggaaatatgctacagatagatgttaaggacatctgcaaatctttcaccaatgtaagtctgccttatgttcctccagccaattgcaaaggttctcaaaagtctatggtcctgtgttcaccgtgtattttggcatgaatcccatagtggtgtttcatggatatgaggcagtgaaggaagccctgattgataatggagaggagttttctggaagaggcaattccccaatatctcaaagaattactaaaggacttggaatcatttccagcaatggaaagagatggaaggagatccggcgtttctccctcacaaccttgcggaattttgggatggggaagaggagcattgaggaccgtgttcaagaggaagctcactgccttgtggaggagttgagaaaaaccaaggcttcaccctgtgatcccactttcatcctgggctgtgctccctgcaatgtgatctgctccgttgttttccagaaacgatttgattataaagatcagaattttctcaccctgatgaaaagattcaatgaaaacttcaggattctgaactccccatggatccaggtctgcaataatttccctctactcattgattgtttcccaggaactcacaacaaagtgcttaaaaatgttgctcttacacgaagttacattagggagaaagtaaaagaacaccaagcatcactggatgttaacaatcctcgggactttatcgattgcttcctgatcaaaatggagcaggaaaaggacaaccaaaagtcagaattcaatattgaaaacttggttggcactgtagctgatctatttgttgctggaacagagacaacaagcaccactctgagatatggactcctgctcctgctgaagcacccagaggtcacagctaaagtccaggaagagattgatcatgtaattggcagacacaggagcccctgcatgcaggataggagccacatgccttacactgatgctgtagtgcacgagatccagagatacagtgaccttgtccccaccggtgtgccccatgcagtgaccactgatactaagttcagaaactacctcatccccaagggcacaaccataatggcattactgacttccgtgctacatgatgacaaagaatttcctaatccaaatatctttgaccctggccactttctagataagaatggcaactttaagaaaagtgactacttcatgcctttctcagcaggaaaacgaatttgtgcaggagaaggacttgcccgcatggagctatttttatttctaaccacaattttacagaactttaacctgaaatctgttgatgatttaaagaacctcaatactactgcagttaccaaagggattgtttctctgccaccctcataccagatctgcttcatccctgtctgaagaatgctagcccatctggctgccgatctgctatcacctgcaactctttttttatcaaggacattcccactattatgtcttctctgacctctcatcaaatcttcccattcactcaatatcccataagcatccaaactccattaaggagagttgttcaggtcactgcacaaatatatctgcaattattcatactctgtaacacttgtattaattgctgcatatgctaatacttttctaatgctgactttttaatatgttatcactgtaaaacacagaaaagtgattaatgaatgataatttagatccatttcttttgtgaatgtgctaaataaaaagtgttattaattgctggttc

SEQ ID NO: 15401 - DNA, 2018 bp, Artificial Sequence
  derived and/or modified sequence
acatgtcaaagagacacacactaaattagcagggagtgttataaaaactttggagtgcaagctcacagctgtcttaataagaagagaaggcttcaatggaaccttttgtggtcctggtgctgtgtctctcttttatgcttctcttttcactctggagacagagctgtaggagaaggaagctccctcctggccccactcctcttcctattattggaaatatgctacagatagatgttaaggacatctgcaaatctttcaccaatgtaagtctgccttatgttcctccagccaattgcaaaggtgttttgctatgatttttgactgaaggtgaagggaagtgtgtgtgattagaaatttcatccattctcaaaagtctatggtcctgtgttcaccgtgtattttggcatgaatcccatagtggtgtttcatggatatgaggcagtgaaggaagccctgattgataatggagaggagttttctggaagaggcaattccccaatatctcaaagaattactaaaggacttggaatcatttccagcaatggaaagagatggaaggagatccggcgtttctccctcacaaccttgcggaattttgggatggggaagaggagcattgaggaccgtgttcaagaggaagctcactgccttgtggaggagttgagaaaaaccaaggcttcaccctgtgatcccactttcatcctgggctgtgctccctgcaatgtgatctgctccgttgttttccagaaacgatttgattataaagatcagaattttctcaccctgatgaaaagattcaatgaaaacttcaggattctgaactccccatggatccaggtctgcaataatttccctctactcattgattgtttcccaggaactcacaacaaagtgcttaaaaatgttgctcttacacgaagttacattagggagaaagtaaaagaacaccaagcatcactggatgttaacaatcctcgggactttatcgattgcttcctgatcaaaatggagcaggaaaaggacaaccaaaagtcagaattcaatattgaaaacttggttggcactgtagctgatctatttgttgctggaacagagacaacaagcaccactctgagatatggactcctgctcctgctgaagcacccagaggtcacagctaaagtccaggaagagattgatcatgtaattggcagacacaggagcccctgcatgcaggataggagccacatgccttacactgatgctgtagtgcacgagatccagagatacagtgaccttgtccccaccggtgtgccccatgcagtgaccactgatactaagttcagaaactacctcatccccaagggcacaaccataatggcattactgacttccgtgctacatgatgacaaagaatttcctaatccaaatatctttgaccctggccactttctagataagaatggcaactttaagaaaagtgactacttcatgcctttctcagcaggaaaacgaatttgtgcaggagaaggacttgcccgcatggagctatttttatttctaaccacaattttacagaactttaacctgaaatctgttgatgatttaaagaacctcaatactactgcagttaccaaagggattgtttctctgccaccctcataccagatctgcttcatccctgtctgaagaatgctagcccatctggctgccgatctgctatcacctgcaactctttttttatcaaggacattcccactattatgtcttctctgacctctcatcaaatcttcccattcactcaatatcccataagcatccaaactccattaaggagagttgttcaggtcactgcacaaatatatctgcaattattcatactctgtaacacttgtattaattgctgcatatgctaatacttttctaatgctgactttttaatatgttatcactgtaaaacacagaaaagtgattaatgaatgataatttagatccatttcttttgtgaatgtgctaaataaaaagtgttattaattgct

SEQ ID NO: 15402 - DNA, 1923 bp, Artificial Sequence
  derived and/or modified sequence
acatgtcaaagagacacacactaaattagcagggagtgttataaaaactttggagtgcaagctcacagctgtcttaataagaagagaaggcttcaatggaaccttttgtggtcctggtgctgtgtctctcttttatgcttctcttttcactctggagacagagctgtaggagaaggaagctccctcctggccccactcctcttcctattattggaaatatgctacagatagatgttaaggacatctgcaaatctttcaccaatttctcaaaagtctatggtcctgtgttcaccgtgtattttggcatgaatcccatagtggtgtttcatggatatgaggcagtgaaggaagccctgattgataatggagaggagttttctggaagaggcaattccccaatatctcaaagaattactaaaggacttggaatcatttccagcaatggaaagagatggaaggagatccggcgtttctccctcacaaccttgcggaattttgggatggggaagaggagcattgaggaccgtgttcaagaggaagctcactgccttgtggaggagttgagaaaaaccaaggcttcaccctgtgatcccactttcatcctgggctgtgctccctgcaatgtgatctgctccgttgttttccagaaacgatttgattataaagatcagaattttctcaccctgatgaaaagattcaatgaaaacttcaggattctgaactccccatggatccaggtctgcaataatttccctctactcattgattgtttcccaggaactcacaacaaagtgcttaaaaatgttgctcttacacgaagttacattagggagaaagtaaaagaacaccaagcatcactggatgttaacaatcctcgggactttatcgattgcttcctgatcaaaatggagcaggaaaaggacaaccaaaagtcagaattcaatattgaaaacttggttggcactgtagctgatctatttgttgctggaacagagacaacaagcaccactctgagatatggactcctgctcctgctgaagcacccagaggtcacagctaaagtccaggaagagattgatcatgtaattggcagacacaggagcccctgcatgcaggataggagccacatgccttacactgatgctgtagtgcacgagatccagagatacagtgaccttgtccccaccggtgtgccccatgcagtgaccactgatactaagttcagaaactacctcatccccaagggcacaaccataatggcattactgacttccgtgctacatgatgacaaagaatttcctaatccaaatatctttgaccctggccactttctagataagaatggcaactttaagaaaagtgactacttcatgcctttctcagcaggaaaacgaatttgtgcaggagaaggacttgcccgcatggagctatttttatttctaaccacaattttacagaactttaacctgaaatctgttgatgatttaaagaacctcaatactactgcagttaccaaagggattgtttctctgccaccctcataccagatctgcttcatccctgtctgaagaatgctagcccatctggctgccgatctgctatcacctgcaactctttttttatcaaggacattcccactattatgtcttctctgacctctcatcaaatcttcccattcactcaatatcccataagcatccaaactccattaaggagagttgttcaggtcactgcacaaatatatctgcaattattcatactctgtaacacttgtattaattgctgcatatgctaatacttttctaatgctgactttttaatatgttatcactgtaaaacacagaaaagtgattaatgaatgataatttagatccatttcttttgtgaatgtgctaaataaaaagtgttattaattgctggttc

SEQ ID NO: 15403 - DNA, 252 bp, Artificial Sequence
  derived and/or modified sequence
atggagcccttcgtggtgctggtgctgtgcctgagcttcatgctgctgttcagcctgtggagacagagctgcagaagaagaaagctgccccccggccccacccccctgcccatcatcggcaacatgctgcagatcgacgtgaaggacatctgcaagagcttcaccaacgtgagcctgccctacgtgccccccgccaactgcaagggcagccagaagagcatggtgctgtgcagcccctgcatcctggcctag

SEQ ID NO: 15404 - DNA, 219 bp, Artificial Sequence
  derived and/or modified sequence
atggagcccttcgtggtgctggtgctgtgcctgagcttcatgctgctgttcagcctgtggagacagagctgcagaagaagaaagctgccccccggccccacccccctgcccatcatcggcaacatgctgcagatcgacgtgaaggacatctgcaagagcttcaccaacgtgagcctgccctacgtgccccccgccaactgcaagggcgtgctgctgtag

SEQ ID NO: 15405 - DNA, 1473 bp, Artificial Sequence
  derived and/or modified sequence
atggagcccttcgtggtgctggtgctgtgcctgagcttcatgctgctgttcagcctgtggagacagagctgcagaagaagaaagctgccccccggccccacccccctgcccatcatcggcaacatgctgcagatcgacgtgaaggacatctgcaagagcttcaccaacttcagcaaggtgtacggccccgtgttcaccgtgtacttcggcatgaaccccatcgtggtgttccacggctacgaggccgtgaaggaggccctgatcgacaacggcgaggagttcagcggcagaggcaacagccccatcagccagagaatcaccaagggcctgggcatcatcagcagcaacggcaagagatggaaggagatcagaagattcagcctgaccaccctgagaaacttcggcatgggcaagagaagcatcgaggacagagtgcaggaggaggcccactgcctggtggaggagctgagaaagaccaaggccagcccctgcgaccccaccttcatcctgggctgcgccccctgcaacgtgatctgcagcgtggtgttccagaagagattcgactacaaggaccagaacttcctgaccctgatgaagagattcaacgagaacttcagaatcctgaacagcccctggatccaggtgtgcaacaacttccccctgctgatcgactgcttccccggcacccacaacaaggtgctgaagaacgtggccctgaccagaagctacatcagagagaaggtgaaggagcaccaggccagcctggacgtgaacaaccccagagacttcatcgactgcttcctgatcaagatggagcaggagaaggacaaccagaagagcgagttcaacatcgagaacctggtgggcaccgtggccgacctgttcgtggccggcaccgagaccaccagcaccaccctgagatacggcctgctgctgctgctgaagcaccccgaggtgaccgccaaggtgcaggaggagatcgaccacgtgatcggcagacacagaagcccctgcatgcaggacagaagccacatgccctacaccgacgccgtggtgcacgagatccagagatacagcgacctggtgcccaccggcgtgccccacgccgtgaccaccgacaccaagttcagaaactacctgatccccaagggcaccaccatcatggccctgctgaccagcgtgctgcacgacgacaaggagttccccaaccccaacatcttcgaccccggccacttcctggacaagaacggcaacttcaagaagagcgactacttcatgcccttcagcgccggcaagagaatctgcgccggcgagggcctggccagaatggagctgttcctgttcctgaccaccatcctgcagaacttcaacctgaagagcgtggacgacctgaagaacctgaacaccaccgccgtgaccaagggcatcgtgagcctgccccccagctaccagatctgcttcatccccgtgtag

SEQ ID NO: 15406 - protein, 490 aa, Artificial Sequence [sequence omitted]

SEQ ID NO: 15407 - protein, 453 aa, Artificial Sequence
  derived and/or modified sequence
MDSLVVLVLCLSCLLLLSLWRQSSGRGKLPPGPTPLPVIGNILQIGIKDISKSLTNLSKVYGPVFTLYFGLKPIVVLHGYEAVKEALIDLGEEFSGRGIFPLAERANRGFGIVFSNGKKWKEIRRFSLMTLRNFGMGKRSIEDRVQEEARCLVEELRKTKASPCDPTFILGCAPCNVICSIIFHKRFDYKDQQFLNLMEKLNENIKILSSPWIQICNNFSPIIDYFPGTHNKLLKNVAFMKSYILEKVKEHQESMDMNNPQDFIDCFLMKMEKEKHNQPSEFTIESLENTAVDLFGAGTETTSTTLRYALLLLLKHPEVTAKVQEEIERVIGRNRSPCMQDRSHMPYTDAVVHEVQRYIDLLPTSLPHAVTCDIKFRNYLIPKGTTILISLTSVLHDNKEFPNPEMFDPHHFLDEGGNFKKSKYFMLVLKMIRTERTKRKRVGKLFWVSVRVT

SEQ ID NO: 15408 - DNA, 1473 bp, Artificial Sequence
  derived and/or modified sequence
atggactccctggttgtgttagtgctgtgtctgtcttgcctacttctcctcagtctgtggcgtcagtcgtcgggtcgcggtaaactgccccccggacccactccactgccagtcatcggcaacatcttgcagatcggcatcaaggacatttcaaaatccctgaccaatctctccaaagtgtacggccccgtttttacactgtatttcgggctcaagccaatcgttgtccttcacggctatgaagccgtgaaggaggccttaattgatttgggcgaagagttttccggccgcggtatattccctctcgctgagcgggccaaccgggggttcgggatcgtgtttagtaacgggaaaaaatggaaggaaatccgcagattcagtctgatgaccctccgaaactttggtatgggcaaaaggagcattgaagatagagtgcaggaggaggcaagatgtcttgtggaggaattgagaaagacgaaggcctcgccctgcgaccctacattcatcctggggtgcgctccatgcaacgtgatatgttctatcatttttcataaacggttcgactataaagatcaacaatttctcaatcttatggaaaaactcaatgaaaacattaaaatcctgagtagcccgtggatccagatttgcaataacttctctccaatcatcgactattttcccgggactcataacaagttgttaaagaatgtggcctttatgaaatcatacatactggaaaaagtcaaggagcaccaggaatcgatggacatgaacaacccgcaggacttcattgattgctttctgatgaagatggagaaggaaaaacataatcagcctagtgaattcaccattgaaagcctcgagaatacagctgtggacctcttcggggcggggaccgagaccacgagtacaaccttacgctacgccctgctactcctcctcaaacaccctgaagttacagcaaaagtgcaggaggaaatcgagagagtgattggaagaaacaggtccccatgtatgcaggatagatcccatatgccatacacggatgccgtcgttcatgaggtccagaggtatatcgatctcttgcctaccagcctgccacacgcggtcacctgcgatattaaatttagaaattacctgatccccaaggggactacaattttgatctccctgacaagcgtcctgcacgacaacaaagagttcccgaacccagagatgttcgaccctcaccacttcctagacgagggcggtaactttaagaagtcaaaatatttcatgccctttagcgctgggaaaaggatctgcgtgggggaggccctcgccggcatggaattgttcctctttttaacctctattctccagaatttcaacctgaagtcccttgtggatcctaagaacctggacactaccccagtggtaaatgggttcgcgtccgtgcctcctttttaccagctctgtttcatccctgtgtag

SEQ ID NO: 15409 - DNA, 1362 bp, Artificial Sequence
  derived and/or modified sequence
atggattccctggtggtgctggtcctctgtttgagctgtctgctcctcctgtcactctggcgacagagctcgggtcgtggcaagctgccacccggcccgactccactgcctgttatcggcaacatcttacagattggcatcaaagacatttctaaaagtctgaccaatctgagtaaggtctatgggccagtgttcactctttatttcggactgaaacccatcgtagtcctgcatggctacgaagcagtgaaagaggctttgatagatcttggggaagaattttcagggcggggtatctttcctctcgctgaaagggctaatcgtgggtttgggatcgtcttttccaacggaaagaagtggaaggagattaggcggttttccttaatgacgctgcggaattttggcatgggtaagcgaagtatcgaggaccgcgtacaggaagaggcccgttgtctggtggaagaactacgaaagaccaaagcttctccctgcgatcccaccttcattctggggtgtgccccctgtaatgtaatctgttccatcattttccacaaacgatttgattataaggatcaacagttcttaaacctgatggaaaagctcaacgagaacatcaagatcctttcgagcccatggattcaaatctgcaacaacttctcccctattattgactactttcccggtacccacaacaaactactgaaaaacgtcgcattcatgaagtcttacatactcgagaaggtcaaagagcaccaggagagcatggatatgaataacccccaggattttatagactgtttcttaatgaagatggagaaggaaaaacataaccagccaagtgagtttaccatcgaatccttggaaaatactgccgtggatctctttggcgctgggacagagactacttctaccacgctgcgctacgctcttctactgcttctaaaacacccggaagtgacggccaaagtgcaggaggagatagaacgggtgatagggcgcaaccgctccccttgtatgcaagacaggtcccatatgccatataccgatgccgtggtgcatgaagtgcagaggtacatagatctcttgcccacgagtctgccacacgcagtgacctgtgacattaagtttcggaattacctaatccccaaagggactaccatactgatcagccttacttcagtccttcacgacaacaaagagttcccaaaccctgaaatgtttgacccacaccactttttggacgaggggggtaattttaagaagagcaagtacttcatgcttgtgttgaagatgatacgtacagagaggacaaaacgaaagagagtgggcaagcttttctgggtgtcagtccgagtaacttag

SEQ ID NO: 15410 - DNA, 1473 bp, Artificial Sequence
  derived and/or modified sequence
atggacagcctggtggtgctggtgctgtgcctgagctgcctgctgctgctgagcctgtggaggcagagcagcggccggggcaagctgcccccaggccccacccccctgcctgtgattggcaacatcctgcagatcggcatcaaggacatcagcaagagcctgaccaacctgagcaaggtgtatggccctgtgttcaccctgtacttcggcctgaagcccatcgtggtgctgcacggctatgaggccgtgaaggaggccctgattgacctgggggaggagttcagcggccggggcatcttccccctggccgagcgggccaacagaggcttcggcatcgtgttcagcaatggcaagaagtggaaggagatccgccgcttcagcctgatgaccctgaggaactttggcatgggcaagaggagcattgaggacagagtgcaggaggaggcccgctgcctggtggaggagctgaggaagaccaaggccagcccctgtgaccccaccttcatcctgggctgtgccccctgcaacgtcatctgcagcatcatcttccacaagagatttgactacaaggaccagcagttcctgaacctgatggagaagctgaatgaaaacatcaagatcctgagcagcccctggatccagatctgcaacaacttcagccccatcatcgactacttccctggcacccacaacaagctgctgaagaatgtggccttcatgaagagctacatcctggagaaggtgaaggagcaccaggagagcatggacatgaacaacccccaggacttcatcgactgcttcctgatgaagatggagaaggagaagcacaaccagcccagcgagttcaccatcgagagcctggagaacacagctgtggacctgtttggagctggaacagagaccaccagcaccaccctgcgctatgccctgctgctgctgctgaagcaccctgaggtgacagccaaggtgcaggaggagattgagcgggtgattggaagaaacagaagcccctgcatgcaggacaggagccacatgccctacacagatgctgtggtgcatgaggtgcagcgctacatcgacctgctgcccaccagcctgccccatgctgtgacctgtgacatcaagttcaggaactacctgatccccaagggcaccaccatcctgatcagcctgacctctgtgctgcatgacaacaaggagttccccaaccctgagatgtttgacccccaccacttcctggatgagggcggcaacttcaagaagagcaagtacttcatgcccttctctgctgggaagaggatctgtgtgggggaggccctggccggcatggagctgttcctgttcctgaccagcatcctgcagaacttcaacctgaagagcctggtggaccccaagaacctggacaccacccctgtggtgaatggatttgcctctgtgccccccttctaccagctgtgcttcatccctgtgtag

SEQ ID NO: 15411 - DNA, 1362 bp, Artificial Sequence
  derived and/or modified sequence
atggacagcctggtggtgctggtgctgtgcctgagctgcctgctgctgctgagcctgtggaggcagagcagcggccggggcaagctgcccccaggccccacccccctgcctgtgattggcaacatcctgcagatcggcatcaaggacatcagcaagagcctgaccaacctgagcaaggtgtatggccctgtgttcaccctgtacttcggcctgaagcccatcgtggtgctgcacggctatgaggccgtgaaggaggccctgattgacctgggggaggagttcagcggccggggcatcttccccctggccgagcgggccaacagaggcttcggcatcgtgttcagcaatggcaagaagtggaaggagatccgccgcttcagcctgatgaccctgaggaactttggcatgggcaagaggagcattgaggacagagtgcaggaggaggcccgctgcctggtggaggagctgaggaagaccaaggccagcccctgtgaccccaccttcatcctgggctgtgccccctgcaacgtcatctgcagcatcatcttccacaagagatttgactacaaggaccagcagttcctgaacctgatggagaagctgaatgaaaacatcaagatcctgagcagcccctggatccagatctgcaacaacttcagccccatcatcgactacttccctggcacccacaacaagctgctgaagaatgtggccttcatgaagagctacatcctggagaaggtgaaggagcaccaggagagcatggacatgaacaacccccaggacttcatcgactgcttcctgatgaagatggagaaggagaagcacaaccagcccagcgagttcaccatcgagagcctggagaacacagctgtggacctgtttggagctggaacagagaccaccagcaccaccctgcgctatgccctgctgctgctgctgaagcaccctgaggtgacagccaaggtgcaggaggagattgagcgggtgattggaagaaacagaagcccctgcatgcaggacaggagccacatgccctacacagatgctgtggtgcatgaggtgcagcgctacatcgacctgctgcccaccagcctgccccatgctgtgacctgtgacatcaagttcaggaactacctgatccccaagggcaccaccatcctgatcagcctgacctctgtgctgcatgacaacaaggagttccccaaccctgagatgtttgacccccaccacttcctggatgagggcggcaacttcaagaagagcaagtacttcatgctggtgctgaagatgatcagaacagagaggaccaagaggaagagggtgggcaagctgttctgggtgtctgtgcgggtgacctag

SEQ ID NO: 15412 - DNA, 1473 bp, Artificial Sequence
  derived and/or modified sequence
atggacagcctggtggtgctggtgctgtgcctgagctgcctgctgctgctgtctttatggcgtcagagttccgggcgaggaaaactccccccagggcccacaccgcttcctgtcatcggaaacatccttcaaatcggtataaaagacatttctaagagcctgacgaacctgagcaaagtgtacggaccggtgtttacgctgtattttggcctcaagcccatcgtagtacttcacgggtacgaggctgtgaaggaggccctgattgacctgggagaggagttctctggaaggggaatcttcccactggcagagagagctaatcggggattcggcatagttttttccaacggcaaaaaatggaaggaaattaggcgattcagtcttatgacacttcggaatttcggcatgggcaagcgaagcattgaggatagagttcaggaagaggcacgctgcctcgtggaggagcttaggaagaccaaggcttctccctgcgatccaacatttatactcggttgcgctccctgcaatgtaatctgtagcataatctttcataagcggttcgattacaaggaccagcagtttctcaaccttatggaaaagttaaatgaaaatatcaagattctctccagcccctggatacagatttgtaacaacttctccccaattatcgactattttcctggcacccataataaactcctaaaaaatgtggcctttatgaagtcctatatcttggagaaggtaaaggaacatcaggagtcaatggatatgaataacccccaagatttcatcgactgctttttgatgaaaatggagaaagagaagcataaccagccttctgagtttacaatcgagtcgctcgagaataccgctgttgacctgttcggtgccggaaccgagaccaccagcaccactttacggtacgcgctgctgttattactcaagcatcctgaggtcaccgccaaggtgcaggaagaaatcgagcgcgtgattgggagaaatcgctcaccatgtatgcaggatcggtctcatatgccttacacagatgcagtcgtgcacgaggttcagcgctatatcgacctgcttcctacctctcttcctcacgctgtcacttgtgacattaagtttagaaactatctaatcccaaagggaacaacaatcctcatctctctgacaagtgtgttacatgacaataaggagttcccaaaccctgaaatgttcgacccccatcatttcttggatgaaggaggcaacttcaaaaaaagtaaatactttatgccgtttagcgccgggaagcggatttgtgtgggcgaagctcttgccgggatggaactctttttgttcttaactagcattctgcagaactttaaccttaagagccttgttgatccaaagaacctggacaccacacccgtggtgaatggtttcgcttcagtgcctcccttctaccaactgtgtttcattccagtgtag

SEQ ID NO: 15413 - DNA, 1362 bp, Artificial Sequence
  derived and/or modified sequence
atggacagcctggtggtgctggtgctgtgcctgagctgcctgctgctgttgagtctttggagacagtcaagcgggcggggcaaattgccccctggacctactccactccccgtgataggcaatattcttcagatcgggatcaaggatatatccaagtccctcacaaatctgtcgaaagtatatgggccagtattcactctttacttcggactaaagcctattgttgtgttgcatggctacgaggccgtgaaagaggctctaatcgacctgggagaagaattttccgggcgcgggatttttcccttagctgaaagggctaacagaggattcggcattgtcttctctaacggcaaaaaatggaaagagatccgcagattttcccttatgacactgagaaatttcggaatgggcaaacgcagtattgaggaccgcgtccaagaggaagcaaggtgtctggtggaggagctaaggaagactaaggcgtccccctgcgacccaaccttcattctggggtgtgccccttgtaatgtcatttgctcaataatttttcataagcgattcgattataaagatcaacagttcctgaacctgatggaaaagctcaatgagaatatcaagatcctctcaagtccttggatacagatctgtaacaacttcagtccgatcattgactacttcccaggcacacataataagctgctcaaaaacgtcgctttcatgaagtcttatattcttgagaaagtgaaggagcaccaagaatctatggacatgaacaacccccaggatttcattgactgtttccttatgaaaatggagaaggaaaaacacaatcagccctcggagttcactatagaatccctggaaaataccgccgtggatctgttcggggctggtactgaaaccacatctacgaccctccgctacgccctgctgcttttacttaagcaccccgaggtcaccgcgaaggtgcaggaagaaattgaacgcgtgataggacgaaatcgatcgccatgtatgcaggacaggtctcacatgccttatactgatgccgtggtgcatgaagtacagagatatatcgatctgctgcctactagtctcccccacgctgtcacatgcgacattaagttcaggaactacctgatcccgaagggcaccaccattctcattagcctaacaagtgttctgcacgataataaggagtttccaaacccagaaatgtttgatccacaccattttctagatgagggtggaaactttaaaaaaagtaagtacttcatgttggttcttaagatgatccggaccgagcgaactaagcgtaagcgtgtaggcaagctgttttgggttagtgtgagagtcacctag

SEQ ID NO: 15414 - DNA, 1473 bp, Artificial Sequence
  derived and/or modified sequence
atggatagcctggtggtactggtcctgtgtctgtcttgccttctccttttgagtctgtggagacagagctcaggccgaggcaagctgcccccaggtccaacacctctacctgtgattggcaatatcctgcaaatcggaattaaggacatttctaaatctctaacaaacctaagtaaggtgtatggaccagtgtttacactttacttcggactgaagccgatagtggttctccacggttatgaagctgtgaaagaggcgctcatcgatctgggagaagaatttagtgggcgaggcatcttcccacttgccgaacgtgccaaccgcggatttgggatcgtgttttccaatgggaagaaatggaaagaaattagacgattttccttaatgaccctccggaactttggaatgggcaagcgcagcatcgaggacagagtacaggaagaggccagatgcctcgtcgaggagctgaggaaaactaaggcaagcccttgcgaccccacattcatcctgggctgcgccccatgcaatgtgatctgctcaatcatctttcataagaggttcgactacaaggatcagcagtttctgaacctgatggagaagctcaacgaaaatatcaaaatcctctccagcccttggatacagatctgtaataattttagccctatcattgactatttccccggaacgcataacaaactattgaagaacgtggcatttatgaagagctatattttggagaaggttaaggaacatcaggagtctatggacatgaacaatccccaggattttattgactgcttcttaatgaagatggaaaaagagaaacacaaccagccaagcgagtttacaatagagtctctagagaatacggcagtcgacttattcggggcaggaaccgaaaccactagcacgaccctgagatacgccttactgttattactgaagcatcctgaagtgacagcaaaagtccaggaagaaatagagcgggtcatcggaagaaatcgctccccatgtatgcaggatcgaagccacatgccctacacagatgccgtggtccacgaggtgcagaggtatattgacctcttgcctaccagcctcccccatgctgtcacctgtgacataaagttccgaaactacctgatacccaagggcacaaccatcctgatctcactgacgtcagtcctgcatgataataaggagttcccaaatcctgagatgtttgacccccaccatttcctggatgaaggaggcaatttcaagaaatcgaaatacttcatgcccttcagcgcgggtaagaggatatgtgtgggcgaagctctcgccggtatggaactctttttgttcctcacatccatactgcagaacttcaacctcaaaagtctcgttgatccgaaaaatctggacactacccccgtggtcaatggcttcgcctccgtgccccctttttaccagttgtgtttcatcccagtgtag

SEQ ID NO: 15415 - DNA, 1362 bp, Artificial Sequence
  derived and/or modified sequence
atggactcactcgtggttctcgtgttgtgcctatcctgcctgctcctgctcagcctctggcgacagtcaagcggcagaggtaagttacctcccggtccgactccattgcctgtgatcggaaatatcctgcagattggaattaaggatattagtaagtctcttacgaatttatcgaaggtgtacggcccagtctttaccctgtattttggcctgaaaccaattgtggtactacacggctacgaggcagtcaaggaggctctcattgacctgggcgaagaattctcaggaagggggatattccccttagctgaacgggcaaaccgcggattcgggatcgtgttcagcaatggcaagaagtggaaagagatccggaggttctcccttatgactttgagaaacttcggcatggggaagcgctccattgaagaccgagtgcaggaagaagctcgctgtctggtcgaggagcttaggaaaaccaaggcaagtccttgtgatcctacttttatcctgggctgtgcgccttgcaatgtaatttgttccattatttttcacaagaggtttgattataaggatcagcagtttctgaatcttatggaaaagctgaacgagaacatcaagatcctttcatcgccctggattcagatctgcaacaacttttcacctataatagattatttccctgggacccacaataaattgctgaagaatgtcgcattcatgaagtcttacatcctggagaaagtaaaagagcatcaggagagcatggatatgaataatccacaggatttcatcgattgttttctgatgaaaatggagaaggagaaacacaatcagccttctgaattcactattgaaagcctggaaaatacagctgtggacctgttcggggcaggaactgaaactaccagcaccacgctgcggtatgccctgctgctgctgctgaaacatcctgaagttaccgccaaagtccaggaagaaatcgagagagtgattggtaggaacaggagtccctgtatgcaggaccgaagccacatgccctataccgatgccgtggtccacgaagtgcagaggtacatcgaccttctgccaacatccctgccacatgcagtaacctgcgacatcaagtttaggaattacttaataccaaagggtaccacaatactgattagtctgacatccgtactgcatgacaacaaggagttccctaatcccgaaatgtttgacccgcaccattttttggatgagggcggtaacttcaaaaagtccaagtacttcatgctggtgctgaagatgatcaggacagagcggaccaaaaggaaaagggtcggcaaactgttttgggtatccgtgagagtaacatag

SEQ ID NO: 15416 - DNA, 1847 bp, Artificial Sequence
  derived and/or modified sequence
gagaaggcttcaatggattctcttgtggtccttgtgctctgtctctcatgtttgcttctcctttcactctggagacagagctctgggagaggaaaactccctcctggccccactcctctcccagtgattggaaatatcctacagataggtattaaggacatcagcaaatccttaaccaatctctcaaaggtctatggccctgtgttcactctgtattttggcctgaaacccatagtggtgctgcatggatatgaagcagtgaaggaagccctgattgatcttggagaggagttttctggaagaggcattttcccactggctgaaagagctaacagaggatttggaattgttttcagcaatggaaagaaatggaaggagatccggcgtttctccctcatgacgctgcggaattttgggatggggaagaggagcattgaggaccgtgttcaagaggaagcccgctgccttgtggaggagttgagaaaaaccaaggcctcaccctgtgatcccactttcatcctgggctgtgctccctgcaatgtgatctgctccattattttccataaacgttttgattataaagatcagcaatttcttaacttaatggaaaagttgaatgaaaacatcaagattttgagcagcccctggatccagatctgcaataatttttctcctatcattgattacttcccgggaactcacaacaaattacttaaaaacgttgcttttatgaaaagttatattttggaaaaagtaaaagaacaccaagaatcaatggacatgaacaaccctcaggactttattgattgcttcctgatgaaaatggagaaggaaaagcacaaccaaccatctgaatttactattgaaagcttggaaaacactgcagttgacttgtttggagctgggacagagacgacaagcacaaccctgagatatgctctccttctcctgctgaagcacccagaggtcacagctaaagtccaggaagagattgaacgtgtgattggcagaaaccggagcccctgcatgcaagacaggagccacatgccctacacagatgctgtggtgcacgaggtccagagatacattgaccttctccccaccagcctgccccatgcagtgacctgtgacattaaattcagaaactatctcattcccaagggcacaaccatattaatttccctgacttctgtgctacatgacaacaaagaatttcccaacccagagatgtttgaccctcatcactttctggatgaaggtggcaattttaagaaaagtaaatacttcatgcctttctcagcaggaaaacggatttgtgtgggagaagccctggccggcatggagctgtttttattcctgacctccattttacagaactttaacctgaaatctctggttgacccaaagaaccttgacaccactccagttgtcaatggatttgcctctgtgccgcccttctaccagctgtgcttcattcctgtctgaagaagagcagatggcctggctgctgctgtgcagtccctgcagctctctttcctctggggcattatccatctttcactatctgtaatgccttttctcacctgtcatctcacattttcccttccctgaagatctagtgaacattcgacctccattacggagagtttcctatgtttcactgtgcaaatatatctgctattctccatactctgtaacagttgcattgactgtcacataatgctcatacttatctaatgttgagttattaatatgttattattaaatagagaaatatgatttgtgtattataattcaaaggcatttcttttctgcatgttctaaataaaaagcattattatttgctg

SEQ ID NO: 15417 - DNA, 1524 bp, Artificial Sequence
  derived and/or modified sequence
gtcttaacaagaagagaaggcttcaatggattctcttgtggtccttgtgctctgtctctcatgtttgcttctcctttcactctggagacagagctctgggagaggaaaactccctcctggccccactcctctcccagtgattggaaatatcctacagataggtattaaggacatcagcaaatccttaaccaatctctcaaaggtctatggccctgtgttcactctgtattttggcctgaaacccatagtggtgctgcatggatatgaagcagtgaaggaagccctgattgatcttggagaggagttttctggaagaggcattttcccactggctgaaagagctaacagaggatttggaattgttttcagcaatggaaagaaatggaaggagatccggcgtttctccctcatgacgctgcggaattttgggatggggaagaggagcattgaggaccgtgttcaagaggaagcccgctgccttgtggaggagttgagaaaaaccaaggcctcaccctgtgatcccactttcatcctgggctgtgctccctgcaatgtgatctgctccattattttccataaacgttttgattataaagatcagcaatttcttaacttaatggaaaagttgaatgaaaacatcaagattttgagcagcccctggatccagatctgcaataatttttctcctatcattgattacttcccgggaactcacaacaaattacttaaaaacgttgcttttatgaaaagttatattttggaaaaagtaaaagaacaccaagaatcaatggacatgaacaaccctcaggactttattgattgcttcctgatgaaaatggagaaggaaaagcacaaccaaccatctgaatttactattgaaagcttggaaaacactgcagttgacttgtttggagctgggacagagacgacaagcacaaccctgagatatgctctccttctcctgctgaagcacccagaggtcacagctaaagtccaggaagagattgaacgtgtgattggcagaaaccggagcccctgcatgcaagacaggagccacatgccctacacagatgctgtggtgcacgaggtccagagatacattgaccttctccccaccagcctgccccatgcagtgacctgtgacattaaattcagaaactatctcattcccaagggcacaaccatattaatttccctgacttctgtgctacatgacaacaaagaatttcccaacccagagatgtttgaccctcatcactttctggatgaaggtggcaattttaagaaaagtaaatacttcatgctggttctcaaaatgataaggacagaaaggacaaagaggaagagggtagggaagctattttgggtgagtgttagagttacttgaggattggatttgaaagtgagaaactgtgtccaggggcagctctaacctctagggaaatattcagaggatcagtcaaagggtggaatggacattaaatgctagaattcttatatccacattggtgttccttttttttt

SEQ ID NO: 15418 - DNA, 1473 bp, Artificial Sequence
  derived and/or modified sequence
atggacagcctggtggtgctggtgctgtgcctgagctgcctgctgctgctgagcctgtggagacagagcagcggcagaggcaagctgccccccggccccacccccctgcccgtgatcggcaacatcctgcagatcggcatcaaggacatcagcaagagcctgaccaacctgagcaaggtgtacggccccgtgttcaccctgtacttcggcctgaagcccatcgtggtgctgcacggctacgaggccgtgaaggaggccctgatcgacctgggcgaggagttcagcggcagaggcatcttccccctggccgagagagccaacagaggcttcggcatcgtgttcagcaacggcaagaagtggaaggagatcagaagattcagcctgatgaccctgagaaacttcggcatgggcaagagaagcatcgaggacagagtgcaggaggaggccagatgcctggtggaggagctgagaaagaccaaggccagcccctgcgaccccaccttcatcctgggctgcgccccctgcaacgtgatctgcagcatcatcttccacaagagattcgactacaaggaccagcagttcctgaacctgatggagaagctgaacgagaacatcaagatcctgagcagcccctggatccagatctgcaacaacttcagccccatcatcgactacttccccggcacccacaacaagctgctgaagaacgtggccttcatgaagagctacatcctggagaaggtgaaggagcaccaggagagcatggacatgaacaacccccaggacttcatcgactgcttcctgatgaagatggagaaggagaagcacaaccagcccagcgagttcaccatcgagagcctggagaacaccgccgtggacctgttcggcgccggcaccgagaccaccagcaccaccctgagatacgccctgctgctgctgctgaagcaccccgaggtgaccgccaaggtgcaggaggagatcgagagagtgatcggcagaaacagaagcccctgcatgcaggacagaagccacatgccctacaccgacgccgtggtgcacgaggtgcagagatacatcgacctgctgcccaccagcctgccccacgccgtgacctgcgacatcaagttcagaaactacctgatccccaagggcaccaccatcctgatcagcctgaccagcgtgctgcacgacaacaaggagttccccaaccccgagatgttcgacccccaccacttcctggacgagggcggcaacttcaagaagagcaagtacttcatgcccttcagcgccggcaagagaatctgcgtgggcgaggccctggccggcatggagctgttcctgttcctgaccagcatcctgcagaacttcaacctgaagagcctggtggaccccaagaacctggacaccacccccgtggtgaacggcttcgccagcgtgccccccttctaccagctgtgcttcatccccgtgtag

SEQ ID NO: 15419 - DNA, 1362 bp, Artificial Sequence
  derived and/or modified sequence
atggacagcctggtggtgctggtgctgtgcctgagctgcctgctgctgctgagcctgtggagacagagcagcggcagaggcaagctgccccccggccccacccccctgcccgtgatcggcaacatcctgcagatcggcatcaaggacatcagcaagagcctgaccaacctgagcaaggtgtacggccccgtgttcaccctgtacttcggcctgaagcccatcgtggtgctgcacggctacgaggccgtgaaggaggccctgatcgacctgggcgaggagttcagcggcagaggcatcttccccctggccgagagagccaacagaggcttcggcatcgtgttcagcaacggcaagaagtggaaggagatcagaagattcagcctgatgaccctgagaaacttcggcatgggcaagagaagcatcgaggacagagtgcaggaggaggccagatgcctggtggaggagctgagaaagaccaaggccagcccctgcgaccccaccttcatcctgggctgcgccccctgcaacgtgatctgcagcatcatcttccacaagagattcgactacaaggaccagcagttcctgaacctgatggagaagctgaacgagaacatcaagatcctgagcagcccctggatccagatctgcaacaacttcagccccatcatcgactacttccccggcacccacaacaagctgctgaagaacgtggccttcatgaagagctacatcctggagaaggtgaaggagcaccaggagagcatggacatgaacaacccccaggacttcatcgactgcttcctgatgaagatggagaaggagaagcacaaccagcccagcgagttcaccatcgagagcctggagaacaccgccgtggacctgttcggcgccggcaccgagaccaccagcaccaccctgagatacgccctgctgctgctgctgaagcaccccgaggtgaccgccaaggtgcaggaggagatcgagagagtgatcggcagaaacagaagcccctgcatgcaggacagaagccacatgccctacaccgacgccgtggtgcacgaggtgcagagatacatcgacctgctgcccaccagcctgccccacgccgtgacctgcgacatcaagttcagaaactacctgatccccaagggcaccaccatcctgatcagcctgaccagcgtgctgcacgacaacaaggagttccccaaccccgagatgttcgacccccaccacttcctggacgagggcggcaacttcaagaagagcaagtacttcatgctggtgctgaagatgatcagaaccgagagaaccaagagaaagagagtgggcaagctgttctgggtgagcgtgagagtgacctag

SEQ ID NO: 15420 - protein, 490 aa, Artificial Sequence
  derived and/or modified sequence
MDPAVALVLCLSCLFLLSLWRQSSGRGRLPSGPTPLPIIGNILQLDVKDMSKSLTNFSKVYGPVFTVYFGLKPIVVLHGYEAVKEALIDHGEEFSGRGSFPVAEKVNKGLGILFSNGKRWKEIRRFCLMTLRNFGMGKRSIEDRVQEEARCLVEELRKTNASPCDPTFILGCAPCNVICSVIFHDRFDYKDQRFLNLMEKFNENLRILSSPWIQVCNNFPALIDYLPGSHNKIAENFAYIKSYVLERIKEHQESLDMNSARDFIDCFLIKMEQEKHNQQSEFTVESLIATVTDMFGAGTETTSTTLRYGLLLLLKYPEVTAKVQEEIECVVGRNRSPCMQDRSHMPYTDAVVHEIQRYIDLLPTNLPHAVTCDVKFKNYLIPKGTTIITSLTSVLHNDKEFPNPEMFDPGHFLDKSGNFKKSDYFMPFSAGKRMCMGEGLARMELFLFLTTILQNFNLKSQVDPKDIDITPIANAFGRVPPLYQLCFIPV

SEQ ID NO: 15421 - DNA, 1473 bp, Artificial Sequence
  derived and/or modified sequence
atggaccccgccgtggccctggtgctgtgcctgagctgcctgttcctgctgagcctgtggagacagagcagcggcagaggcagactgcccagcggccccacccccctgcccatcatcggcaacatcctgcagctggacgtgaaggacatgagcaagagcctgaccaacttcagcaaggtgtacggccccgtgttcaccgtgtacttcggcctgaagcccatcgtggtgctgcacggctacgaggccgtgaaggaggccctgatcgaccacggcgaggagttcagcggcagaggcagcttccccgtggccgagaaggtgaacaagggcctgggcatcctgttcagcaacggcaagagatggaaggagatcagaagattctgcctgatgaccctgagaaacttcggcatgggcaagagaagcatcgaggacagagtgcaggaggaggccagatgcctggtggaggagctgagaaagaccaacgccagcccctgcgaccccaccttcatcctgggctgcgccccctgcaacgtgatctgcagcgtgatcttccacgacagattcgactacaaggaccagagattcctgaacctgatggagaagttcaacgagaacctgagaatcctgagcagcccctggatccaggtgtgcaacaacttccccgccctgatcgactacctgcccggcagccacaacaagatcgccgagaacttcgcctacatcaagagctacgtgctggagagaatcaaggagcaccaggagagcctggacatgaacagcgccagagacttcatcgactgcttcctgatcaagatggagcaggagaagcacaaccagcagagcgagttcaccgtggagagcctgatcgccaccgtgaccgacatgttcggcgccggcaccgagaccaccagcaccaccctgagatacggcctgctgctgctgctgaagtaccccgaggtgaccgccaaggtgcaggaggagatcgagtgcgtggtgggcagaaacagaagcccctgcatgcaggacagaagccacatgccctacaccgacgccgtggtgcacgagatccagagatacatcgacctgctgcccaccaacctgccccacgccgtgacctgcgacgtgaagttcaagaactacctgatccccaagggcaccaccatcatcaccagcctgaccagcgtgctgcacaacgacaaggagttccccaaccccgagatgttcgaccccggccacttcctggacaagagcggcaacttcaagaagagcgactacttcatgcccttcagcgccggcaagagaatgtgcatgggcgagggcctggccagaatggagctgttcctgttcctgaccaccatcctgcagaacttcaacctgaagagccaggtggaccccaaggacatcgacatcacccccatcgccaacgccttcggcagagtgccccccctgtaccagctgtgcttcatccccgtgtag

SEQ ID NO: 15422 - DNA, 2418 bp, Artificial Sequence
  derived and/or modified sequence
ggcaccggaaagaacaagaaaaaagaacaccttatttttatcttcttcagtgagccaatgttcattcaaaagagagattaaagtgctttttgctgactagtcacagtcagagtcagaatcacaggtggattagtagggagtgttataaaagccttgaagtgaaagcccgcagttgtcttactaagaagagaagccttcaatggatccagctgtggctctggtgctctgtctctcctgtttgtttctcctttcactctggaggcagagctctggaagagggaggctcccgtctggccccactcctctcccgattattggaaatatcctgcagttagatgttaaggacatgagcaaatccttaaccaatttctcaaaagtctatggccctgtgttcactgtgtattttggcctgaagcccattgtggtgttgcatggatatgaagcagtgaaggaggccctgattgatcatggagaggagttttctggaagaggaagttttccagtggctgaaaaagttaacaaaggacttggaatccttttcagcaatggaaagagatggaaggagatccggcgtttctgcctcatgactctgcggaattttgggatggggaagaggagcatcgaggaccgtgttcaagaggaagcccgctgccttgtggaggagttgagaaaaaccaatgcctcaccctgtgatcccactttcatcctgggctgtgctccctgcaatgtgatctgctctgttattttccatgatcgatttgattataaagatcagaggtttcttaacttgatggaaaaattcaatgaaaacctcaggattctgagctctccatggatccaggtctgcaataatttccctgctctcatcgattatctcccaggaagtcataataaaatagctgaaaattttgcttacattaaaagttatgtattggagagaataaaagaacatcaagaatccctggacatgaacagtgctcgggactttattgattgtttcctgatcaaaatggaacaggaaaagcacaatcaacagtctgaatttactgttgaaagcttgatagccactgtaactgatatgtttggggctggaacagagacaacgagcaccactctgagatatggactcctgctcctgctgaagtacccagaggtcacagctaaagtccaggaagagattgaatgtgtagttggcagaaaccggagcccctgtatgcaggacaggagtcacatgccctacacagatgctgtggtgcacgagatccagagatacattgacctcctccccaccaacctgccccatgcagtgacctgtgatgttaaattcaaaaactacctcatccccaagggcacgaccataataacatccctgacttctgtgctgcacaatgacaaagaattccccaacccagagatgtttgaccctggccactttctggataagagtggcaactttaagaaaagtgactacttcatgcctttctcagcaggaaaacggatgtgtatgggagagggcctggcccgcatggagctgtttttattcctgaccaccattttgcagaactttaacctgaaatctcaggttgacccaaaggatattgacatcacccccattgccaatgcatttggtcgtgtgccacccttgtaccagctctgcttcattcctgtctgaagaagggcagatagtttggctgctcctgtgctgtcacctgcaattctcccttatcagggccattggcctctcccttctctctgtgagggatattttctctgacttgtcaatccacatcttcccattccctcaagatccaatgaacatccaacctccattaaagagagtttcttgggtcacttcctaaatatatctgctattctccatactctgtatcacttgtattgaccaccacatatgctaatacctatctactgctgagttgtcagtatgttatcactagaaaacaaagaaaaatgattaataaatgacaattcagagccatttattctctgcatgctctagataaaaatgattattatttactgggtcagttcttagatttctttcttttgagtaaaatgaaagtaagaaatgaaagaaaatagaatgtgaagaggctgtgctggccctcatagtgttaagcacaaaaagggagaaaggtaagagggtaggaaagctgttttagctaaatgccacctagagttattggaggtctgaatttggaaaaaaaaactatgtccaggagcagctgtaacctgtagggaaatactggaacaatcatccataagagggatgaacattaagtgtttgaattcatgctctgcttttgtgttactgtaaacacaagatcaagatttggataatctttttcctttgtgtttccaacttagatcatgtctaaatatatgctttcatatggctaa

SEQ ID NO: 15423 - DNA, 1473 bp, Artificial Sequence
  derived and/or modified sequence
atggacccagccgtagcgttagtactttgcctgtcctgcctgttcttactgtctttgtggaggcagagctctggccgtggccgcctcccctctggccccactcccttacccattattggtaatattctgcagctggacgtgaaggacatgtcaaaatccctgactaacttttccaaagtttatggcccggtcttcaccgtatacttcgggcttaaacccatcgtcgtactgcatgggtatgaagcagtgaaggaagcactgattgaccatggtgaggagttttcgggccgaggtagctttccagtggctgaaaaggttaataagggccttggtattttatttagcaacggcaagaggtggaaggagatacgaagattctgccttatgaccctccgcaatttcggtatgggcaagagatctatagaagatcgcgttcaagaagaggccagatgtctggtggaggagcttcgcaagaccaatgcgtccccttgcgatccaacttttatcctaggatgtgcgccatgcaacgtcatctgcagtgtgatcttccatgataggttcgactacaaggaccagcgttttcttaacttaatggaaaaattcaacgagaacttgcgaatcctgtctagcccatggatccaagtatgcaataactttcccgcactgatcgactacctccccggctctcataacaaaattgcagagaattttgcatacattaagagctacgtattggagagaattaaggagcatcaggagtcacttgacatgaactccgctagagattttattgattgttttcttatcaaaatggaacaggagaaacacaatcaacagtctgaattcaccgtggaatccctaattgcgactgtgaccgatatgttcggcgctggtactgaaaccacgagcaccaccctaagatatggactgctcctgttattgaagtatcccgaagtgacggccaaggtacaggaagagatagaatgcgtggtcgggcggaatcggagcccatgtatgcaggataggagccatatgccctacactgatgcagtcgttcacgaaatacagaggtatatcgacctgctcccaaccaaccttccccacgctgtgacctgcgacgtgaagttcaagaattatctcattcccaagggcacaactattattacatccttaacttccgtgctccacaatgacaaggaatttccgaatccagagatgttcgacccaggtcattttcttgacaagtctggtaactttaagaaaagcgactacttcatgccattttccgctggaaagaggatgtgcatgggagagggcctcgcccggatggagctcttcctatttctgacaactatacttcagaatttcaatctgaagagtcaggtggaccccaaggatatcgacatcactcctatagctaatgcttttggccgggtgcctcccctttaccaactatgtttcatcccggtttag

SEQ ID NO: 15424 - DNA, 1473 bp, Artificial Sequence
  derived and/or modified sequence
atggaccctgctgtggccctggtgctgtgcctgagctgcctcttcctgctgagcctgtggaggcagagcagcggccggggccgcctgcccagcggccccacccccctgcccatcatcggcaacatcctgcagctggatgtgaaggacatgagcaagagcctgaccaacttcagcaaggtgtatggccctgtgttcaccgtgtacttcggcctgaagcccatcgtggtgctgcacggctatgaggccgtgaaggaggccctgattgaccacggggaggagttcagcggccggggcagcttccctgtggccgagaaggtgaacaagggcctgggcatcctcttcagcaatggcaagcgctggaaggagatccgccgcttctgcctgatgaccctgaggaactttggcatgggcaagaggagcattgaggacagagtgcaggaggaggcccgctgcctggtggaggagctgaggaagaccaatgccagcccctgtgaccccaccttcatcctgggctgtgccccctgcaacgtcatctgcagcgtcatcttccatgacagatttgactacaaggaccagcgcttcctgaacctgatggagaagttcaatgaaaacctgcgcatcctgagcagcccctggatccaggtgtgcaacaacttccctgccctgattgactacctgcccggcagccacaacaagattgctgaaaattttgcctacatcaagagctatgtgctggagcgcatcaaggagcaccaggagagcctggacatgaacagcgcccgggacttcatcgactgcttcctgatcaagatggagcaggagaagcacaaccagcagagcgagttcaccgtggagagcctcatcgccaccgtgacagacatgtttggagctggaacagagaccaccagcaccaccctgcgctatggcctgctgctgctgctgaagtacccagaggtgacagccaaggtgcaggaggagattgaatgtgtggtgggcaggaacagaagcccctgcatgcaggacaggagccacatgccctacacagatgctgtggtgcatgagatccagcgctacatcgacctgctgcccaccaacctgccccatgctgtgacctgtgatgtgaagttcaagaactacctgatccccaagggcaccaccatcatcaccagcctgacctctgtgctgcacaatgacaaggagttccccaaccctgagatgtttgatcctggccacttcctggacaagagcggcaacttcaagaagagtgactacttcatgcccttctctgctgggaagaggatgtgcatgggagagggcctggccaggatggagctgttcctgttcctgaccaccatcctgcagaacttcaacctgaagagccaggtggaccccaaggacatcgacatcacccccatcgccaatgccttcggccgggtgccccccctgtaccagctgtgcttcatccctgtgtag

SEQ ID NO: 15425 - DNA, 1473 bp, Artificial Sequence
  derived and/or modified sequence
atggaccccgccgtggccctggtgctgtgcctgagctgcctgttcttgctttctctttggagacaaagtagcggaagaggaaggctgccctctggaccgactcccttgcccatcataggtaacattctgcagctggacgtgaaggatatgagcaagtcgctgactaacttttcgaaggtgtacgggccggtgttcaccgtttatttcggactaaaacctatcgtggtcttgcacgggtatgaggctgtgaaggaggccctgatagatcatggagaagaattctccggaagaggctcattcccagtggctgagaaggtgaataaaggactcggaatcctattctccaatggaaagcgatggaaagagattaggcgattctgtttgatgaccttacgaaatttcggtatggggaagcgcagcattgaggatagagtgcaggaggaagccaggtgccttgtagaagaactgcggaagactaacgcaagcccttgcgaccccacttttattctcggttgcgctccgtgtaacgtgatctgtagcgtgatcttccacgaccggtttgattataaagatcagcgcttcttgaatttaatggagaaattcaatgagaacctccgtatcctgagcagcccctggattcaagtttgtaataacttccccgctctgatagattatctgccggggtctcacaacaagatcgcagagaacttcgcatacatcaagagttatgtgctggaacggattaaagaacaccaggagagcctcgacatgaacagtgcacgagacttcatcgattgtttcttaattaaaatggaacaggagaagcacaatcagcaatcagaattcacggtcgagtcccttatcgcaacggtcacagatatgttcggcgccggtactgaaaccacgtccacaacattgagatatgggttactgttactgttgaagtatccggaagtgaccgcaaaggtccaagaggagattgagtgcgtcgtgggcagaaataggagcccctgtatgcaggatagatcccatatgccctacacagacgccgttgtgcacgaaattcagcgctatatcgacctgctccccactaacctcccccacgccgtcacctgtgacgtcaaatttaagaactatctcattcctaagggcacaaccattatcacctcattgacaagtgtgctccataacgataaagagttccccaaccccgagatgttcgaccctggccattttctggataaaagcggcaacttcaaaaaatccgactatttcatgccattcagcgctggcaaacgcatgtgcatgggtgaaggattagcgcgtatggagcttttcctgttcctaaccacgatcttgcagaatttcaatcttaagagtcaggtggaccctaaggacatagatatcacccctattgcaaacgcttttggccgcgttccacctttataccagttatgcttcatcccggtctag

SEQ ID NO: 15426 - DNA, 1473 bp, Artificial Sequence
  derived and/or modified sequence
atggatcctgcagtggcactggtcctctgtctttcctgtctgtttctgctgagcctgtggcgtcagtctagcggtagagggagactgcccagcgggcctactcctctgccaattattggcaacatattacaactcgatgtgaaggacatgtctaagagcctcactaattttagtaaagtgtacggaccggtcttcaccgtgtattttggactaaagccaatcgttgtgctgcacgggtacgaggccgtcaaggaagctctgattgatcacggtgaggaattcagcgggaggggaagcttcccagtcgccgaaaaagttaataaagggctgggaatcctgttctccaatggcaaacgctggaaagagatcagacgattttgtttgatgaccctgcggaacttcggaatgggtaagcgcagtatagaagaccgcgttcaagaagaagctagatgcctggtcgaggagctgcggaaaacgaacgcctcgccctgtgatccaacgtttatcctcggatgcgctccatgcaatgtgatatgttcggtcatttttcacgatcgcttcgattataaggaccaacgtttcctcaatttgatggaaaaattcaacgagaatctccgaattctctcttcgccttggattcaggtgtgcaataattttccagctctgatagactatttgccaggttctcataataagatcgctgagaacttcgcttacatcaaaagttacgtgttggagcgtatcaaggagcaccaggaaagcctggatatgaattcagcaagggattttattgactgctttctgatcaagatggagcaggaaaaacataaccagcaaagcgaattcacagtggagtctctgattgccacagtgacagatatgtttggagctggcacggagactacatctactaccttaagatatggactgctgcttttactgaagtacccagaggtcaccgccaaggtccaggaagaaatagagtgcgtcgttgggcgtaacagaagcccttgcatgcaggacaggtctcatatgccctatacggatgcggtggtgcatgagatccagcggtatattgacctacttccaacaaacctgcctcatgccgtaacctgtgacgtcaagttcaaaaactacctgatcccaaaggggacaaccataattaccagcctaaccagcgtgctccataacgataaagagttccctaatcccgaaatgtttgatcctggccattttctggataaatccggtaattttaaaaagtccgactacttcatgccgttttctgccggtaagcgcatgtgcatgggcgaaggcctggccaggatggagttgtttcttttccttaccaccatcctgcagaactttaacctcaaaagccaagtggatccaaaagatatagacatcactccaatcgccaacgcctttggccgtgtcccccctctttaccagctgtgtttcataccagtgtag

SEQ ID NO: 15427 - protein, 493 aa, Artificial Sequence
  derived and/or modified sequence
MSALGVTVALLVWAAFLLLVSMWRQVHSSWNLPPGPFPLPIIGNLFQLELKNIPKSFTRLAQRFGPVFTLYVGSQRMVVMHGYKAVKEALLDYKDEFSGRGDLPAFHAHRDRGIIFNNGPTWKDIRRFSLTTLRNYGMGKQGNESRIQREAHFLLEALRKTQGQPFDPTFLIGCAPCNVIADILFRKHFDYNDEKFLRLMYLFNENFHLLSTPWLQLYNNFPSFLHYLPGSHRKVIKNVAEVKEYVSERVKEHHQSLDPNCPRDLTDCLLVEMEKEKHSAERLYTMDGITVTVADLFFAGTETTSTTLRYGLLILMKYPEIEEKLHEEIDRVIGPSRIPAIKDRQEMPYMDAVVHEIQRFITLVPSNLPHEATRDTIFRGYLIPKGTVVVPTLDSVLYDNQEFPDPEKFKPEHFLNENGKFKYSDYFKPFSTGKRVCAGEGLARMELFLLLCAILQHFNLKPLVDPKDIDLSPIHIGFGCIPPRYKLCVIPRS

SEQ ID NO: 15428 - protein, 86 aa, Artificial Sequence
  derived and/or modified sequence
MSALGVTVALLVWAAFLLLVSMWRQVHSSWNLPPGPFPLPIIGNLFQLELKNIPKSFTRLAQRFGPVFTLYVGSQRMVVMHGYKAV

SEQ ID NO: 15429 - DNA, 1482 bp, Artificial Sequence
  derived and/or modified sequence
atgtccgccttgggtgtgaccgttgcactgctggtgtgggcggcattcctgctgttggtgtcgatgtggagacaggtgcattcctcttggaacctgccccccggaccttttcccctgccaatcatcggaaatttattccagcttgaactcaagaatattcctaagtcgttcacaagacttgcacagcggttcggacctgttttcacgctatatgtcggtagtcagagaatggtggtcatgcatggctacaaagctgtgaaggaagcactgttagattataaggatgagttcagcgggagaggagatcttcccgcatttcatgctcaccgcgacagaggaatcatatttaacaacggcccaacatggaaagatatccggcggttctcccttacaacgctgcgcaattacggtatgggcaaacaggggaatgagtcaaggattcagcgggaagcacactttctcctcgaagcgctgcggaaaacccagggccaacctttcgaccccaccttccttatcggatgcgcaccatgcaacgttattgctgacatcctcttccgtaaacacttcgattacaacgatgagaagttcttgaggctgatgtatctgtttaacgaaaacttccacttgttaagtaccccttggctgcagctatataacaattttccctcctttctccactacttaccaggatctcaccgtaaggtgatcaagaatgtagcagaagttaaagagtatgtatcggagagagtgaaagagcatcatcagtccctggaccccaactgtccaagggacttgacagactgtctccttgtcgaaatggagaaggagaagcattctgccgaacgcctctatacaatggacggcatcacagttacagttgccgacctatttttcgcaggcactgagacaacttcaacaacgttaaggtatggactactgatactgatgaagtacccggagattgaggaaaagctgcatgaggagatcgatagagtgataggaccttccagaattcctgcaatcaaggaccgccaggaaatgccttacatggacgctgtggtgcacgaaatacagcggttcataacactcgtcccaagtaatttgccgcacgaagcaaccagagacacgattttcagggggtatttaatcccaaagggcaccgtggtggtgcccacgttagattccgtcctgtatgacaaccaagagttcccagaccccgagaaatttaaaccggagcattttcttaacgagaatgggaaattcaaatatagcgactacttcaaaccatttagcacagggaagagggtgtgcgccggagagggactggccaggatggagctgttcttactgctgtgcgccatcctccagcactttaatctgaagccgttggtcgatccaaaggatatagatctctcccccatccatatcggttttggatgcataccacccagatataagctttgtgtgatccccagaagctag

SEQ ID NO: 15430 - DNA, 1482 bp, Artificial Sequence
  derived and/or modified sequence
atgtcagccttaggtgtgaccgtggccttgttagtgtgggcagcattcctgttgctcgtgtccatgtggaggcaggtgcatagctcttggaacttgccacctggaccttttccgctaccaatcattggtaacctctttcagctggagctgaaaaacatcccaaagagttttactaggttggctcagagattcgggcccgtctttactttatacgttggctctcagaggatggtcgtgatgcacggctacaaggctgttaaggaggccctcctggactataaagatgagttctccgggcgcggggatctccctgctttccatgctcaccgcgacagaggaataatctttaacaacggaccgacatggaaagacattcgaaggttcagcttgacgacgctgcggaactacggcatggggaagcagggcaacgagtctagaatccaaagagaagcccacttcctcctcgaggctctccgtaagacacaagggcagccgttcgaccctaccttcctcatcggttgcgccccttgtaacgttatcgcggacatacttttcaggaaacacttcgattacaatgatgaaaaattcctgaggctcatgtatctgttcaacgaaaattttcacctgctaagcacaccctggcttcagttgtataacaacttcccttcattcctgcactacctccctggatcgcatagaaaagtgatcaagaacgtagccgaggttaaggaatacgtgtccgagagggtcaaagagcaccatcagtcccttgatccaaactgtccccgggatttgaccgactgtctgctggtggagatggagaaggaaaagcatagcgccgagcggttgtatactatggatggaattactgtgacggttgctgacctgttcttcgccggtacggaaaccactagcacaactctcagatatgggttgcttatcctgatgaaataccccgaaatcgaggagaaattacacgaggagatcgatcgcgtgattgggccttccagaattccggctatcaaagatagacaggagatgccatatatggatgccgtggtccatgagatacagaggtttatcaccctcgttccctctaacttaccacacgaagcaacccgcgacacaatcttccggggatatctgattcccaaggggacggtagtcgtgcctactcttgattctgtgttgtacgataaccaggagttccccgacccagaaaagttcaagcccgagcactttctgaatgagaatgggaagttcaaatatagtgactactttaagccatttagtaccggaaaaagagtctgtgccggcgaaggtctggcacgcatggagctctttctgctcttgtgtgctatactgcagcatttcaatctgaagccattagtggacccaaaagatattgatctgagccctattcacattggatttggatgcattcccccccgctacaagctttgcgtgataccgcgctcctag

SEQ ID NO: 15431 - DNA, 261 bp, Artificial Sequence
  derived and/or modified sequence
atgagcgcgctcggcgtgaccgtggcccttcttgtgtgggcagcctttctcctgctggtgagcatgtggaggcaggttcattcgagctggaatctccctcccgggccattcccccttcctatcatcggcaatttgtttcagctggagttgaagaatatccccaagtcatttaccaggctggctcagcgattcggccctgtgttcaccctttacgtcggcagtcagaggatggtggttatgcatgggtataaagccgtttag

SEQ ID NO: 15432 - DNA, 1482 bp, Artificial Sequence
  derived and/or modified sequence
atgtctgccctgggcgtgacagtggccctgctggtgtgggccgccttcctgctgctggtgtccatgtggaggcaggtgcacagctcctggaacctgcccccaggccccttccccctgcccatcatcggcaacctcttccagctggagctgaagaacatccccaagagcttcacccggctggcccagcgcttcggccctgtgttcaccctgtatgtgggcagccagaggatggtggtgatgcacggctacaaggctgtgaaggaggccctgctggactacaaggatgagttcagcggccgcggggacctgcctgccttccacgcccaccgggaccggggcatcatcttcaacaacggccccacctggaaggacatccgccgcttcagcctgaccaccctgaggaactacggcatgggcaagcagggcaatgaaagccgcatccagcgggaggcccacttcctgctggaggccctgaggaagacccagggccagccctttgaccccaccttcctgattggctgtgccccctgcaatgtgattgctgacatcctcttcaggaagcactttgactacaatgatgagaagttcctgcggctgatgtacctgttcaatgaaaacttccacctgctgagcaccccctggctgcagctgtacaacaacttccccagcttcctgcactacctgcccggcagccacaggaaggtgatcaagaatgtggccgaggtgaaggagtatgtgtctgagcgggtgaaggagcaccaccagagcctggaccccaactgcccccgggacctgacagactgcctgctggtggagatggagaaggagaagcacagcgctgagcggctgtacaccatggatggcatcaccgtgacagtggccgacctcttctttgctggaacagagaccaccagcaccaccctgcgctatggcctgctgatcctgatgaagtacccagaaattgaggagaagctgcacgaggagattgacagagtgattggccccagccgcatcccagccatcaaggaccggcaggagatgccctacatggatgctgtggtgcatgagatccagcgcttcatcaccctggtgcccagcaacctgccccatgaggccacccgggacaccatcttccggggctacctgatccccaagggcaccgtggtggtgcccaccctggacagcgtgctgtatgacaaccaggagttcccagaccctgagaagttcaagccagagcacttcctgaatgaaaatggcaagttcaagtacagcgactacttcaagcccttcagcacaggcaagagggtgtgtgccggggagggcctggccaggatggagctgttcctgctgctgtgtgccatcctgcagcacttcaacctgaagcccctggtggaccccaaggacatcgacctgagccccatccacatcggcttcggctgcatccccccacgctacaagctgtgtgtgatccccaggagctag

SEQ ID NO: 15433 - DNA, 261 bp, Artificial Sequence
  derived and/or modified sequence
atgtctgccctgggcgtgacagtggccctgctggtgtgggccgccttcctgctgctggtgtccatgtggaggcaggtgcacagctcctggaacctgcccccaggccccttccccctgcccatcatcggcaacctcttccagctggagctgaagaacatccccaagagcttcacccggctggcccagcgcttcggccctgtgttcaccctgtatgtgggcagccagaggatggtggtgatgcacggctacaaggctgtgtag

SEQ ID NO: 15434 - DNA, 1482 bp, Artificial Sequence
  derived and/or modified sequence
atgagcgccctgggcgtgaccgtggccctgctggtgtgggccgccttcctcttgctggtttcgatgtggcgtcaggtgcattcttcatggaaccttccccctggacctttcccgctgccgataatcgggaatttgttccagcttgaattgaaaaacattcccaagtccttcacgaggttggcacagagatttggcccagtgtttactctgtatgtcggctcccagagaatggttgtcatgcatggttacaaagcggtcaaggaagccctgttggattacaaagacgaattctctggacgaggagacctgccagccttccatgcccatagagatcggggcatcatatttaataatggacccacctggaaagacattcgtcggttttcattgacgacactcagaaactatggtatgggaaagcagggcaacgaaagcagaattcagagagaagcacattttttgttggaggcactgaggaaaactcaagggcagccctttgacccaactttcttaatagggtgcgcaccttgcaatgtgatcgccgacatcttgtttcgaaaacacttcgattataacgatgagaagttcttaaggctgatgtatctatttaacgagaacttccatttactgtctaccccctggctccagctgtacaacaattttccctcgttcttacactacctgcccggatcgcacagaaaggtgattaaaaacgtcgctgaagtaaaagagtacgtgagtgagagggttaaagagcaccaccagtcactcgatcccaattgccctagagatctgaccgactgcctactggtggagatggaaaaggaaaaacattccgcagagagactctacactatggatggaatcaccgttacagtggcggatttgttttttgctggcaccgaaacgacctctacgactctgcgctatggtttgctaatcttgatgaagtacccagagatcgaagaaaagctgcacgaagaaatcgatagagttattggccctagtcgaattccagccataaaggacaggcaggagatgccatacatggatgcagtcgtgcacgaaatccagagattcatcaccctggtgccctcaaacctgccacacgaagctactagggatactatatttaggggctatttaatcccaaaaggcaccgtggtggtgccaacactagactcagtactgtatgacaaccaggaattcccagatcccgaaaagtttaagcccgagcattttctgaatgaaaacgggaagttcaaatattcagattacttcaagcccttctctaccggtaagagagtttgcgcaggtgaggggctggcccgcatggagctcttcctgctgttgtgcgcaattcttcagcactttaacttgaagcctctcgtggatcctaaagatatcgatctctctcccattcatatcggttttgggtgcatcccaccccggtataagctgtgtgtgataccccgcagttag

SEQ ID NO: 15435 - DNA, 1482 bp, Artificial Sequence
  derived and/or modified sequence
atgagcgccctgggcgtgaccgtggccctgctggtgtgggccgcctttctgctgcttgtgtcaatgtggcgacaagtacattcttcttggaatctgccccccgggccattccctctgcctatcattggcaatctcttccagctcgagctgaaaaacattcctaaatcctttactagactggctcagcggtttggaccagttttcaccctgtatgtgggaagtcagcggatggtcgtcatgcatggttataaagccgttaaggaggcactgctggactacaaagacgagttttctggacggggggacctccctgcgttccacgcccatcgtgaccgtgggatcatctttaacaacggacccacctggaaggatatcagacgttttagcttgaccacactgcggaactatgggatgggaaaacaaggcaacgagtcccgcatccaaagagaggcccatttcctcctagaggcactccgcaagactcaggggcagccctttgatcccacttttcttatcggatgcgctccttgtaatgtgatcgcagacattctcttccggaagcatttcgattataacgatgaaaaatttctgcgcctaatgtacctgttcaacgagaactttcatctgttaagtaccccatggcttcagttatacaataattttccatcatttctgcactatttgcccggaagccaccggaaagtgataaagaacgtggctgaggttaaagaatatgtgtcggagcgcgtaaaggaacaccatcaaagcctcgaccctaattgtccacgggacttaaccgattgtctgttggtggaaatggaaaaggagaagcactctgccgaaaggctttacacaatggacggaataacggtcactgtcgctgatttgttcttcgccggcacggaaacaacgtcaactaccctcaggtacgggctgctaattcttatgaagtaccctgagattgaggagaaacttcacgaggaaatagaccgagttatcgggcctagtaggattcccgcaataaaggatcgccaggaaatgccctatatggacgcagtcgtacatgaaattcaaaggtttattaccctggtgccttccaacctgccccatgaggcgacgagggatactatctttcgcggctatttgatccccaagggaacagtggttgtgccaactctcgactctgtcctctacgataatcaggaattccctgaccctgagaaatttaagccagaacacttccttaatgagaacgggaagttcaaatactctgattacttcaaaccgttttcaactggcaagcgggtctgtgcaggggaggggttggcgcggatggagctgttcctgctactgtgcgccattctacagcattttaacctcaaacccctcgttgaccccaaagacattgatctgtcccccatccatattggtttcggctgtatcccacctcgctacaaattgtgcgtgatcccaagatcctag

SEQ ID NO: 15436 - DNA, 261 bp, Artificial Sequence
  derived and/or modified sequence
atgagcgccctgggcgtgaccgtggccctgctggtgtgggccgcctttcttctcttggtcagcatgtggagacaggtccatagctcctggaacctaccccccggtcctttcccgcttcccatcatcgggaacctcttccaactggaactgaaaaatattcctaaatcttttacacgcttggcccaacgatttggacctgtgtttaccctgtacgttggctcccaaaggatggtggtgatgcacggatacaaagccgtttag

SEQ ID NO: 15437 - DNA, 1482 bp, Artificial Sequence
  derived and/or modified sequence
atgtctgcgctcggcgtaacagttgctttattggtgtgggctgcctttctgctgctggtaagtatgtggaggcaggtacatagcagctggaacttgcccccaggcccatttccgcttcctattatcggcaacctttttcagctagagctcaagaacatacctaaatccttcacacggttggcacaacggtttggccctgtgtttaccctttacgtagggtcacagcggatggtcgtgatgcacggctataaggcagttaaagaggcactccttgattacaaggatgaattttccggtcgaggggacctgcctgcattccacgctcatcgggataggggaatcattttcaataatggaccaacttggaaagacatacggaggttttcgctaacaacattgcgaaattacggaatgggtaagcaagggaacgaaagccggatccagcgcgaagcccacttcctcctggaagccctgcgtaaaacccaagggcaaccttttgaccccacatttttgatcgggtgcgccccatgcaatgtcatcgccgatattctttttaggaaacattttgactataacgacgagaaattcctgcgtttaatgtatctcttcaatgaaaatttccaccttttgagcactccctggctgcagctttacaacaactttccatccttcttacactaccttcctgggtctcatcgtaaagtgataaagaacgtggccgaggtgaaagagtatgtgtcggagagggtcaaggaacatcatcagtctttggatccgaactgtcccagggatctgacggattgtctgctggtggagatggaaaaggagaagcattctgcagagcgcctatacacgatggacggtattactgtaacggtggcggatcttttctttgcagggactgaaaccacatccactacactcaggtacggactgctgattctcatgaagtaccccgagattgaagaaaagttgcatgaagagatcgacagagtgattggacctagtcgtatcccagctatcaaagacaggcaggaaatgccatacatggacgctgtagtgcacgagatccagcgattcattactctggtgccatcaaacctgccccacgaagccactagggatactattttccgcggatatcttatacctaagggaaccgttgtagtacctacacttgattctgtgctgtacgataaccaggagttcccagaccctgaaaaattcaagcccgaacattttcttaatgagaacgggaaatttaagtattcagactactttaagccctttagcacaggcaaaagggtgtgtgctggggaaggtctggccagaatggaactattcctactcctatgtgccatcctgcagcactttaacctgaagcccttagtggatcccaaggacatcgatttgtctcccatccacatcggattcggctgcattccaccccgatataagctctgcgtgatccctcgatcttag

SEQ ID NO: 15438 - DNA, 1482 bp, Artificial Sequence
  derived and/or modified sequence
atgagcgctctgggtgttactgtggctcttcttgtgtgggcagcctttctgttattagttagcatgtggagacaggtgcactcttcttggaacctccctcctgggcctttcccactgcctataataggaaacctgtttcagttggagctcaagaatatccctaagagcttcactaggctggcccagagattcggacccgtgttcacgctgtacgttgggagtcagaggatggtcgtaatgcatgggtacaaagccgttaaagaggcacttctggattataaggatgaattttcaggccgtggggacctgccggcatttcacgcccacagggaccgagggatcatcttcaataatggcccaacatggaaagatatcaggaggttcagcctgaccaccctccgtaactacggtatggggaagcaaggcaatgaatccaggatccagagggaggcccactttctgctggaagccctgagaaaaacccaggggcagcctttcgacccaacttttttgatcggctgtgcaccctgcaacgtcattgccgacatcctctttaggaaacactttgactacaatgacgagaagtttcttcggctcatgtatctcttcaatgagaattttcaccttttaagcactccatggcttcagttgtacaacaattttcctagcttcttacattatcttcccggaagccaccgcaaggtgattaaaaacgtcgctgaggtcaaagagtatgtatctgagcgtgtgaaggagcatcaccagagcctggaccccaactgccctcgcgacctgactgattgccttctggtggaaatggagaaggagaagcacagtgccgaacggttgtatacaatggacggaataacggtcactgtggcagacttgttctttgccggtactgaaacaacttcaaccaccctgcggtacggattgttgatacttatgaagtatcccgaaattgaggagaagctccacgaagaaattgatagggtgattggcccttccaggattcccgcaattaaggaccgacaggagatgccttatatggatgctgttgtacatgagatacaaaggttcatcacactggtgccgtcaaatctgcctcatgaggcgactagggacactatctttaggggctatctgattccaaagggcacagtggtagtaccgaccctggattctgtcctctatgacaaccaggaattccccgaccctgaaaagtttaagcccgaacacttcctcaatgagaatggaaagttcaaatatagtgactatttcaagcccttttccaccgggaagagggtttgtgccggagaaggcctggccaggatggaactatttttactgctctgtgcaatccttcagcatttcaacctcaaaccactggtcgacccaaaggacatagaccttagccccattcatattggctttggctgtatcccaccaagatataaactttgcgtgatccccaggtcgtag

SEQ ID NO: 15439 - DNA, 261 bp, Artificial Sequence
  derived and/or modified sequence
atgtctgccctgggcgtgacggttgcattgctggtgtgggcggctttccttctccttgtgtccatgtggaggcaggtgcactctagctggaatcttcccccaggcccttttcctcttcctattattgggaatctgtttcaattggagctgaagaatattccgaaatcattcacacgtctggcccaacggttcggccctgtgtttacactgtacgtgggaagtcagcggatggttgtgatgcacggttataaagctgtgtag

SEQ ID NO: 15440 - DNA, 1667 bp, Artificial Sequence
  derived and/or modified sequence
ctcccgggctggcagcagggccccagcggcaccatgtctgccctcggagtcaccgtggccctgctggtgtgggcggccttcctcctgctggtgtccatgtggaggcaggtgcacagcagctggaatctgcccccaggccctttcccgcttcccatcatcgggaacctcttccagttggaattgaagaatattcccaagtccttcacccggttggcccagcgcttcgggccggtgttcacgctgtacgtgggctcgcagcgcatggtggtgatgcacggctacaaggcggtgaaggaagcgctgctggactacaaggacgagttctcgggcagaggcgacctccccgcgttccatgcgcacagggacaggggaatcatttttaataatggacctacctggaaggacatccggcggttttccctgaccaccctccggaactatgggatggggaaacagggcaatgagagccggatccagagggaggcccacttcctgctggaagcactcaggaagacccaaggccagcctttcgaccccaccttcctcatcggctgcgcgccctgcaacgtcatagccgacatcctcttccgcaagcattttgactacaatgatgagaagtttctaaggctgatgtatttgtttaatgagaacttccacctactcagcactccctggctccagctttacaataattttcccagctttctacactacttgcctggaagccacagaaaagtcataaaaaatgtggctgaagtaaaagagtatgtgtctgaaagggtgaaggagcaccatcaatctctggaccccaactgtccccgggacctcaccgactgcctgctcgtggaaatggagaaggaaaagcacagtgcagagcgcttgtacacaatggacggtatcaccgtgactgtggccgacctgttctttgcggggacagagaccaccagcacaactctgagatatgggctcctgattctcatgaaataccctgagattgaagagaagctccatgaagaaattgacagggtgattgggccaagccgaatccctgccatcaaggataggcaagagatgccctacatggatgctgtggtgcatgagattcagcggttcatcaccctcgtgccctccaacctgccccatgaagcaacccgagacaccattttcagaggatacctcatccccaagggcacagtcgtagtgccaactctggactctgttttgtatgacaaccaagaatttcctgatccagaaaagtttaagccagaacacttcctgaatgaaaatggaaagtttaagtacagtgactatttcaagccattttccacaggaaaacgagtgtgtgctggagaaggcctggctcgcatggagttgtttcttttgttgtgtgccattttgcagcattttaatttgaagcctctcgttgacccaaaggatatcgacctcagccctatacatattgggtttggctgtatcccaccacgttacaaactctgtgtcattccccgctcatgagtgtgtggaggacaccctgaaccccccgctttcaaacaagttttcaaattgtttgaggtcaggatttctcaaactgattcctttctttgcatatgagtatttgaaaataaatattttcccagaatataaataaatcatcacatgattatttt

SEQ ID NO: 15441 - DNA, 1912 bp, Artificial Sequence
  derived and/or modified sequence
acttccgggttgtttgctcccggagccataaccgcagctcagcgtgcgggcagagccggctgacaggagacaggacacagcacagagccccgcgccctctgaggcgggaggcttcgttcctgcaccagcgtggcttgccctttggacgcggcgagttaacttgagaaagtggaatcgaattccgatgttgaattttccttctggccccattcatgtggcaggtggtgattcaggattgtctcccgggctggcagcagggccccagcggcaccatgtctgccctcggagtcaccgtggccctgctggtgtgggcggccttcctcctgctggtgtccatgtggaggcaggtgcacagcagctggaatctgcccccaggccctttcccgcttcccatcatcgggaacctcttccagttggaattgaagaatattcccaagtccttcacccggttggcccagcgcttcgggccggtgttcacgctgtacgtgggctcgcagcgcatggtggtgatgcacggctacaaggcggtgaaggaagcgctgctggactacaaggacgagttctcgggcagaggcgacctccccgcgttccatgcgcacagggacaggggaatcatttttaataatggacctacctggaaggacatccggcggttttccctgaccaccctccggaactatgggatggggaaacagggcaatgagagccggatccagagggaggcccacttcctgctggaagcactcaggaagacccaaggccagcctttcgaccccaccttcctcatcggctgcgcgccctgcaacgtcatagccgacatcctcttccgcaagcattttgactacaatgatgagaagtttctaaggctgatgtatttgtttaatgagaacttccacctactcagcactccctggctccagctttacaataattttcccagctttctacactacttgcctggaagccacagaaaagtcataaaaaatgtggctgaagtaaaagagtatgtgtctgaaagggtgaaggagcaccatcaatctctggaccccaactgtccccgggacctcaccgactgcctgctcgtggaaatggagaaggaaaagcacagtgcagagcgcttgtacacaatggacggtatcaccgtgactgtggccgacctgttctttgcggggacagagaccaccagcacaactctgagatatgggctcctgattctcatgaaataccctgagattgaagagaagctccatgaagaaattgacagggtgattgggccaagccgaatccctgccatcaaggataggcaagagatgccctacatggatgctgtggtgcatgagattcagcggttcatcaccctcgtgccctccaacctgccccatgaagcaacccgagacaccattttcagaggatacctcatccccaagggcacagtcgtagtgccaactctggactctgttttgtatgacaaccaagaatttcctgatccagaaaagtttaagccagaacacttcctgaatgaaaatggaaagtttaagtacagtgactatttcaagccattttccacaggaaaacgagtgtgtgctggagaaggcctggctcgcatggagttgtttcttttgttgtgtgccattttgcagcattttaatttgaagcctctcgttgacccaaaggatatcgacctcagccctatacatattgggtttggctgtatcccaccacgttacaaactctgtgtcattccccgctcatgagtgtgtggaggacaccctgaaccccccgctttcaaacaagttttcaaattgtttgaggtcaggatttctcaaactgattcctttctttgcatatgagtatttgaaaataaatattttcccagaatataaataaatcatcacatgattattttaactat

SEQ ID NO: 15442 - DNA, 475 bp, Artificial Sequence
  derived and/or modified sequence
aacagtattatggccagaggactcagaccacagctgcatccctgtgaggcacagactctccagggcacgcgggtcccgcctgggatgtgcacactcagttaacttgagaaagtggaatcgaattccgatgttgaattttccttctggccccattcatgtggcaggtggtgattcaggattgtctcccgggctggcagcagggccccagcggcaccatgtctgccctcggagtcaccgtggccctgctggtgtgggcggccttcctcctgctggtgtccatgtggaggcaggtgcacagcagctggaatctgcccccaggccctttcccgcttcccatcatcgggaacctcttccagttggaattgaagaatattcccaagtccttcacccggttggcccagcgcttcgggccggtgttcacgctgtacgtgggctcgcagcgcatggtggtgatgcacggctacaaggcggtgaa

SEQ ID NO: 15443 - DNA, 1482 bp, Artificial Sequence
  derived and/or modified sequence
atgagcgccctgggcgtgaccgtggccctgctggtgtgggccgccttcctgctgctggtgagcatgtggagacaggtgcacagcagctggaacctgccccccggccccttccccctgcccatcatcggcaacctgttccagctggagctgaagaacatccccaagagcttcaccagactggcccagagattcggccccgtgttcaccctgtacgtgggcagccagagaatggtggtgatgcacggctacaaggccgtgaaggaggccctgctggactacaaggacgagttcagcggcagaggcgacctgcccgccttccacgcccacagagacagaggcatcatcttcaacaacggccccacctggaaggacatcagaagattcagcctgaccaccctgagaaactacggcatgggcaagcagggcaacgagagcagaatccagagagaggcccacttcctgctggaggccctgagaaagacccagggccagcccttcgaccccaccttcctgatcggctgcgccccctgcaacgtgatcgccgacatcctgttcagaaagcacttcgactacaacgacgagaagttcctgagactgatgtacctgttcaacgagaacttccacctgctgagcaccccctggctgcagctgtacaacaacttccccagcttcctgcactacctgcccggcagccacagaaaggtgatcaagaacgtggccgaggtgaaggagtacgtgagcgagagagtgaaggagcaccaccagagcctggaccccaactgccccagagacctgaccgactgcctgctggtggagatggagaaggagaagcacagcgccgagagactgtacaccatggacggcatcaccgtgaccgtggccgacctgttcttcgccggcaccgagaccaccagcaccaccctgagatacggcctgctgatcctgatgaagtaccccgagatcgaggagaagctgcacgaggagatcgacagagtgatcggccccagcagaatccccgccatcaaggacagacaggagatgccctacatggacgccgtggtgcacgagatccagagattcatcaccctggtgcccagcaacctgccccacgaggccaccagagacaccatcttcagaggctacctgatccccaagggcaccgtggtggtgcccaccctggacagcgtgctgtacgacaaccaggagttccccgaccccgagaagttcaagcccgagcacttcctgaacgagaacggcaagttcaagtacagcgactacttcaagcccttcagcaccggcaagagagtgtgcgccggcgagggcctggccagaatggagctgttcctgctgctgtgcgccatcctgcagcacttcaacctgaagcccctggtggaccccaaggacatcgacctgagccccatccacatcggcttcggctgcatcccccccagatacaagctgtgcgtgatccccagaagctag

SEQ ID NO: 15444 - DNA, 261 bp, Artificial Sequence
  derived and/or modified sequence
atgagcgccctgggcgtgaccgtggccctgctggtgtgggccgccttcctgctgctggtgagcatgtggagacaggtgcacagcagctggaacctgccccccggccccttccccctgcccatcatcggcaacctgttccagctggagctgaagaacatccccaagagcttcaccagactggcccagagattcggccccgtgttcaccctgtacgtgggcagccagagaatggtggtgatgcacggctacaaggccgtgtag

SEQ ID NO: 15445 - protein, 491 aa, Artificial Sequence
  derived and/or modified sequence
MDSISTAILLLLLALVCLLLTLSSRDKGKLPPGPRPLSILGNLLLLCSQDMLTSLTKLSKEYGSMYTVHLGPRRVVVLSGYQAVKEALVDQGEEFSGRGDYPAFFNFTKGNGIAFSSGDRWKVLRQFSIQILRNFGMGKRSIEERILEEGSFLLAELRKTEGEPFDPTFVLSRSVSNIICSVLFGSRFDYDDERLLTIIRLINDNFQIMSSPWGELYDIFPSLLDWVPGPHQRIFQNFKCLRDLIAHSVHDHQASLDPRSPRDFIQCFLTKMAEEKEDPLSHFHMDTLLMTTHNLLFGGTKTVSTTLHHAFLALMKYPKVQARVQEEIDLVVGRARLPALKDRAAMPYTDAVIHEVQRFADIIPMNLPHRVTRDTAFRGFLIPKGTDVITLLNTVHYDPSQFLTPQEFNPEHFLDANQSFKKSPAFMPFSAGRRLCLGESLARMELFLYLTAILQSFSLQPLGAPEDIDLTPLSSGLGNLPRPFQLCLRPR

SEQ ID NO: 15446 - DNA, 1476 bp, Artificial Sequence
  derived and/or modified sequence
atggactccatttccacagcaatcctgcttctcttgctcgcccttgtatgtctgcttctgacattaagcagcagggataagggcaaactgccgcctggaccacgacccttatccattttaggaaacctgctgctgctctgtagccaagacatgctcactagcctcaccaaactaagtaaagaatacggatcaatgtacacagttcatctgggaccccgtagggttgtggtcctttcaggttatcaggctgtgaaagaggctctcgtcgaccagggtgaagagttctcgggaaggggagattatcccgctttttttaactttaccaagggaaatggaatcgccttctctagcggcgacaggtggaaggtccttagacagttctcgatacaaattctcaggaacttcgggatgggcaaacgtagcatcgaagagcggatactcgaggaaggatcttttctgttagccgaactgcggaagaccgaaggagagccttttgatcctactttcgtgctttccagatccgttagtaacattatttgttccgtcctatttggttcccgcttcgattacgacgacgagcgtcttctgaccatcatcagattgatcaacgacaattttcagatcatgagtagcccatggggcgaactgtacgacatctttccctccctactggactgggttcctggaccccatcagcggatcttccaaaatttcaaatgtcttcgcgacctcatagcccactcagtgcacgaccatcaagcctctttagatcctcggagtccgcgagacttcatccagtgcttcctcactaagatggccgaagagaaggaagacccactgtcacattttcacatggatacactgttaatgacgacacataaccttcttttcggcggcactaagactgtgtcaacaacactacatcatgccttcctggccttgatgaagtatccgaaagtgcaggcaagggtccaggaggagatcgatctggtggtcggccgagctcgtcttcccgcactgaaggatagagcggctatgccttacaccgatgccgtgattcacgaggtgcaacgatttgccgatatcattcccatgaacctcccacatagggttactagggataccgcattccgagggtttctcatcccaaagggcaccgatgttatcacgctgctgaatactgttcactacgatccatctcaattcttaacccctcaggagtttaatcctgagcattttctggacgctaatcagagcttcaagaaatctcctgcctttatgccattttccgccgggaggcggttgtgtttgggggaatccctggcccgaatggagttattcctgtaccttacggcaattctgcagtcattttcgcttcagcccctcggcgcccctgaggatattgacctgacacccctatcttcaggtctcggcaacctcccccgaccttttcagctttgcctgcggcctaggtag

SEQ ID NO: 15447 - DNA, 1476 bp, Artificial Sequence
  derived and/or modified sequence
atggacagcatcagcacagccatcctgctgctgctgctggccctggtgtgcctgctgctgaccctgagcagccgggacaagggcaagctgcccccaggcccccggcccctgagcatcctgggcaacctgctgctgctgtgcagccaggacatgctgaccagcctgaccaagctgagcaaggagtatggctccatgtacacagtgcacctgggccccaggagagtggtggtgctgagcggctaccaggccgtgaaggaggccctggtggaccagggcgaggagttcagcggccgcggggactacccagccttcttcaacttcaccaagggaaatggaattgccttcagcagcggggaccgctggaaggtgctgcggcagttcagcatccagatcctgaggaactttggcatgggcaagaggagcattgaggagcgcatcctggaggagggcagcttcctgctggccgagctgaggaagacagaaggagagccctttgaccccacctttgtgctgagccgctctgtgagcaacatcatctgcagcgtgctgtttggcagcagatttgattatgatgatgagcggctgctgaccatcatccgcctcatcaatgacaacttccagatcatgagcagcccctggggcgagctgtatgacatcttccccagcctgctggactgggtgcccggcccccaccagaggatcttccagaacttcaagtgcctgcgggacctgattgcccacagcgtgcatgaccaccaggccagcctggaccccaggagcccccgggacttcatccagtgcttcctgaccaagatggccgaggagaaggaggaccccctgagccacttccacatggacaccctgctgatgaccacccacaacctgctgtttggaggcaccaagacagtgtccaccaccctgcaccacgccttcctggccctgatgaagtaccccaaggtgcaggcccgggtgcaggaggagattgacctggtggtgggccgggcccggctgcctgccctgaaggaccgggccgccatgccctacacagatgctgtgatccacgaggtgcagagatttgctgacatcatccccatgaacctgccccaccgggtgacccgggacacagccttccggggcttcctgatccccaagggcacagatgtgatcaccctgctgaacacagtgcactatgaccccagccagttcctgaccccccaggagttcaaccctgagcacttcctggatgccaaccagagcttcaagaagagccctgccttcatgcccttctctgctggaagaaggctgtgcctgggggagagcctggccaggatggagctgttcctgtacctgacagccatcctgcagagcttcagcctgcagcccctgggcgcccctgaggacatcgacctgacccccctgagcagcggcctgggcaacctgccccggcccttccagctgtgcctgcggcccaggtag

SEQ ID NO: 15448 - DNA, 1476 bp, Artificial Sequence
  derived and/or modified sequence
atggacagcatcagcaccgccatcctgctgctgctgctggccctggtgtgtctgctcttgaccttgtcaagccgtgataagggaaagctccccccgggccctagaccgttgagcatcctgggcaatcttttgttgctttgtagtcaggacatgctgactagtctgacgaaattgagcaaggagtatggcagcatgtacaccgtgcatctgggtccacgtagagtcgtggttctcagcggttatcaagctgtcaaggaagccctcgtggaccagggtgaagaattctccggcagaggagactacccagccttctttaacttcacaaagggaaacggtatcgcattttcaagcggcgaccggtggaaagtgctgcgccaattctctatccagattctgagaaattttggcatggggaaacgctccatcgaagagcgtatactggaggagggatcctttctgctggcggaactgcgcaagaccgaaggagagccttttgatcctacgtttgtgctatctcgctctgtgagcaatatcatatgtagtgtcttgtttggctcacgcttcgattatgatgacgaaaggctgctcacaatcatccggctcattaatgataatttccaaattatgagctcaccttggggagagctctacgacatttttccatcactcttagactgggttcccggtccccatcagcgtatcttccaaaacttcaaatgtctgcgcgatcttattgcccatagtgtgcacgaccaccaagcttctctcgaccctagatccccgagggacttcattcaatgctttttaacgaagatggccgaggaaaaagaggatcctctgtctcatttccatatggatacactattgatgacaacacacaatcttctttttggaggcacaaagacggtcagtaccaccttacaccatgcattcttggctctgatgaagtatcctaaggtacaagcgcgcgtgcaagaagagatagacctggtggtgggacgggctcggcttcccgctctgaaggaccgagccgccatgccgtatacagacgccgtcatccacgaggtgcagcgcttcgctgatataattccaatgaacctccctcacagggtcacgcgcgataccgcgttccggggttttttaattccaaaggggacagatgtcataaccctactcaacaccgtacactacgaccctagtcaatttctgacgcctcaggaatttaatcccgaacattttcttgacgcaaatcagtcctttaagaagtcccccgcattcatgccatttagcgcgggccgccggctttgcctgggggagagcctagcccgcatggaacttttcctctatctcacagcaatattacaatccttctctctgcaacccctaggagctcctgaagatatagacctcacccctctttcatccgggttgggcaatctgccccgccctttccagctctgtctgagacctaggtag

SEQ ID NO: 15449 - DNA, 1476 bp, Artificial Sequence
  derived and/or modified sequence
atggattctataagtaccgctatccttttgctgctgctagcactggtatgtctgcttctaacgctgtccagccgagacaagggaaaacttccccctgggccacggccactaagcatcctgggtaatctcctcctcttgtgttctcaagacatgctcactagtttgaccaagctgtcaaaggagtatggcagcatgtataccgtacaccttggacccaggagggttgtagtactaagcgggtatcaggccgtgaaggaggcactcgtggaccagggagaagagttcagcggaagaggcgactacccagccttctttaatttcaccaagggaaatggcatcgccttttcaagcggcgatcggtggaaagtgctgcgccagttcagcatccagatcctaaggaattttgggatggggaagagatcgatcgaggagcggatcctggaagaaggcagctttctgctcgcagagctcagaaaaaccgagggagagccatttgatcctactttcgtgctctcgcgatctgtttcgaacattatttgctctgtattgttcggatcgcgctttgactatgatgatgaaagactcctgacgattatccggcttataaacgataactttcagatcatgtcctctccctggggtgagctctacgacatttttccctccctgctggactgggtgcccggaccacaccagaggatttttcagaacttcaagtgtctgcgggatttgatcgcacacagtgtgcatgatcaccaagcaagcctggaccctagatcaccacgagacttcatccagtgcttccttacaaaaatggccgaggaaaaagaagaccccctcagtcacttccacatggataccctgttgatgactacccataaccttcttttcggtgggaccaaaactgtttctacaacccttcaccacgcttttcttgccttaatgaaataccccaaagtgcaggcgagagtgcaggaggagatcgatcttgtagtaggaagagcacggctacctgctttgaaggaccgggctgctatgccatatacggacgctgtcatccacgaagtacagagatttgccgatataatccccatgaatctgccccacagggtaactcgagacacagctttcagaggcttcctcatacccaaaggcacagatgtgatcactctgctgaataccgtgcactatgacccaagccaattcttgactcctcaggagttcaatccagaacactttttagatgccaatcagtcttttaagaagtcacccgcttttatgcccttctccgccggtagacgactctgtctcggcgagagcctggctcgtatggagcttttcctatacctgacagcgattttgcagtccttctcactgcagcctttgggagcccctgaggacatcgacctgaccccgctgtcaagcggactgggcaatttacctagacctttccagctatgcctacgaccaaggtag

SEQ ID NO: 15450 - DNA, 1720 bp, Artificial Sequence
  derived and/or modified sequence
aagcacacccagagctgcaggctctagcgcatcccagccagtgtctcctgcagctcagcagctgccttcaccatggacagcataagcacagccatcttactcctgctcctggctctcgtctgtctgctcctgaccctaagctcaagagataagggaaagctgcctccgggacccagacccctctcaatcctgggaaacctgctgctgctttgctcccaagacatgctgacttctctcactaagctgagcaaggagtatggctccatgtacacagtgcacctgggacccaggcgggtggtggtcctcagcgggtaccaagctgtgaaggaggccctggtggaccagggagaggagtttagtggccgcggtgactaccctgcctttttcaactttaccaagggcaatggcatcgccttctccagtggggatcgatggaaggtcctgagacagttctctatccagattctacggaatttcgggatggggaagagaagcattgaggagcgaatcctagaggagggcagcttcctgctggcggagctgcggaaaactgaaggcgagccctttgaccccacgtttgtgctgagtcgctcagtgtccaacattatctgttccgtgctcttcggcagccgcttcgactatgatgatgagcgtctgctcaccattatccgccttatcaatgacaacttccaaatcatgagcagcccctggggcgagttgtacgacatcttcccgagcctcctggactgggtgcctgggccgcaccaacgcatcttccagaacttcaagtgcctgagagacctcatcgcccacagcgtccacgaccaccaggcctcgctagaccccagatctccccgggacttcatccagtgcttcctcaccaagatggcagaggagaaggaggacccactgagccacttccacatggataccctgctgatgaccacacataacctgctctttggcggcaccaagacggtgagcaccacgctgcaccacgccttcctggcactcatgaagtacccaaaagttcaagcccgcgtgcaggaggagatcgacctcgtggtgggacgcgcgcggctgccggcgctgaaggaccgcgcggccatgccttacacagacgcggtgatccacgaggtgcagcgctttgcagacatcatccccatgaacttgccgcaccgcgtcactagggacacggcctttcgcggcttcctgatacccaagggcaccgatgtcatcaccctccttaacaccgtccactacgaccccagccagttcctgacgccccaggagttcaaccccgagcattttttggatgccaatcagtccttcaagaagagtccagccttcatgcccttctcagctgggcgccgtctgtgcctgggagagtcgctggcgcgcatggagctctttctgtacctcaccgccatcctgcagagcttttcgctgcagccgctgggtgcgcccgaggacatcgacctgaccccactcagctcaggtcttggcaatttgccgcggcctttccagctgtgcctgcgcccgcgctaacgccccggcccttccagattcgcctgtgagcgatgaggcccgcccatgcgggttgctacgtccccttcttggtccacagtctgccctcatccctctggcagtcacgctgtcttccctgcatgctgtgcctgccgcgtgcccttcccccatccctccaatctgtgccccgtct

SEQ ID NO: 15451 - DNA, 1476 bp, Artificial Sequence
  derived and/or modified sequence
atggacagcatcagcaccgccatcctgctgctgctgctggccctggtgtgcctgctgctgaccctgagcagcagagacaagggcaagctgccccccggccccagacccctgagcatcctgggcaacctgctgctgctgtgcagccaggacatgctgaccagcctgaccaagctgagcaaggagtacggcagcatgtacaccgtgcacctgggccccagaagagtggtggtgctgagcggctaccaggccgtgaaggaggccctggtggaccagggcgaggagttcagcggcagaggcgactaccccgccttcttcaacttcaccaagggcaacggcatcgccttcagcagcggcgacagatggaaggtgctgagacagttcagcatccagatcctgagaaacttcggcatgggcaagagaagcatcgaggagagaatcctggaggagggcagcttcctgctggccgagctgagaaagaccgagggcgagcccttcgaccccaccttcgtgctgagcagaagcgtgagcaacatcatctgcagcgtgctgttcggcagcagattcgactacgacgacgagagactgctgaccatcatcagactgatcaacgacaacttccagatcatgagcagcccctggggcgagctgtacgacatcttccccagcctgctggactgggtgcccggcccccaccagagaatcttccagaacttcaagtgcctgagagacctgatcgcccacagcgtgcacgaccaccaggccagcctggaccccagaagccccagagacttcatccagtgcttcctgaccaagatggccgaggagaaggaggaccccctgagccacttccacatggacaccctgctgatgaccacccacaacctgctgttcggcggcaccaagaccgtgagcaccaccctgcaccacgccttcctggccctgatgaagtaccccaaggtgcaggccagagtgcaggaggagatcgacctggtggtgggcagagccagactgcccgccctgaaggacagagccgccatgccctacaccgacgccgtgatccacgaggtgcagagattcgccgacatcatccccatgaacctgccccacagagtgaccagagacaccgccttcagaggcttcctgatccccaagggcaccgacgtgatcaccctgctgaacaccgtgcactacgaccccagccagttcctgaccccccaggagttcaaccccgagcacttcctggacgccaaccagagcttcaagaagagccccgccttcatgcccttcagcgccggcagaagactgtgcctgggcgagagcctggccagaatggagctgttcctgtacctgaccgccatcctgcagagcttcagcctgcagcccctgggcgcccccgaggacatcgacctgacccccctgagcagcggcctgggcaacctgcccagacccttccagctgtgcctgagacccagatag

SEQ ID NO: 15452 - protein, 502 aa, Artificial Sequence
  derived and/or modified sequence
MDLIPNLAVETWLLLAVSLVLLYLYGTRTHGLFKRLGIPGPTPLPLLGNVLSYRQGLWKFDTECYKKYGKMWGTYEGQLPVLAITDPDVIRTVLVKECYSVFTNRRSLGPVGFMKSAISLAEDEEWKRIRSLLSPTFTSGKLKEMFPIIAQYGDVLVRNLRREAEKGKPVTLKDIFGAYSMDVITGTSFGVNIDSLNNPQDPFVESTKKFLKFGFLDPLFLSIILFPFLTPVFEALNVSLFPKDTINFLSKSVNRMKKSRLNDKQKHRLDFLQLMIDSQNSKETESHKALSDLELAAQSIIFIFAGYETTSSVLSFTLYELATHPDVQQKLQKEIDAVLPNKAPPTYDAVVQMEYLDMVVNETLRLFPVAIRLERTCKKDVEINGVFIPKGSMVVIPTYALHHDPKYWTEPEEFRPERFSKKKDSIDPYIYTPFGTGPRNCIGMRFALMNMKLALIRVLQNFSFKPCKETQIPLKLDTQGLLQPEKPIVLKVDSRDGTLSGE

SEQ ID NO: 15453 - DNA, 1509 bp, Artificial Sequence
  derived and/or modified sequence
atggacctgatccccaacctggccgtggagacctggctgctgctggccgtgagcctggtgctgctgtacctgtacggcaccagaacccacggcctgttcaagagactgggcatccccggccccacccccctgcccctgctgggcaacgtgctgagctacagacagggcctgtggaagttcgacaccgagtgctacaagaagtacggcaagatgtggggcacctacgagggccagctgcccgtgctggccatcaccgaccccgacgtgatcagaaccgtgctggtgaaggagtgctacagcgtgttcaccaacagaagaagcctgggccccgtgggcttcatgaagagcgccatcagcctggccgaggacgaggagtggaagagaatcagaagcctgctgagccccaccttcaccagcggcaagctgaaggagatgttccccatcatcgcccagtacggcgacgtgctggtgagaaacctgagaagagaggccgagaagggcaagcccgtgaccctgaaggacatcttcggcgcctacagcatggacgtgatcaccggcaccagcttcggcgtgaacatcgacagcctgaacaacccccaggaccccttcgtggagagcaccaagaagttcctgaagttcggcttcctggaccccctgttcctgagcatcatcctgttccccttcctgacccccgtgttcgaggccctgaacgtgagcctgttccccaaggacaccatcaacttcctgagcaagagcgtgaacagaatgaagaagagcagactgaacgacaagcagaagcacagactggacttcctgcagctgatgatcgacagccagaacagcaaggagaccgagagccacaaggccctgagcgacctggagctggccgcccagagcatcatcttcatcttcgccggctacgagaccaccagcagcgtgctgagcttcaccctgtacgagctggccacccaccccgacgtgcagcagaagctgcagaaggagatcgacgccgtgctgcccaacaaggccccccccacctacgacgccgtggtgcagatggagtacctggacatggtggtgaacgagaccctgagactgttccccgtggccatcagactggagagaacctgcaagaaggacgtggagatcaacggcgtgttcatccccaagggcagcatggtggtgatccccacctacgccctgcaccacgaccccaagtactggaccgagcccgaggagttcagacccgagagattcagcaagaagaaggacagcatcgacccctacatctacacccccttcggcaccggccccagaaactgcatcggcatgagattcgccctgatgaacatgaagctggccctgatcagagtgctgcagaacttcagcttcaagccctgcaaggagacccagatccccctgaagctggacacccagggcctgctgcagcccgagaagcccatcgtgctgaaggtggacagcagagacggcaccctgagcggcgagtag

SEQ ID NO: 15454 - DNA, 1509 bp, Artificial Sequence
  derived and/or modified sequence
atggacctgattcctaacttagccgtggagacatggcttttactagctgtgtcactggtgctgttgtatctctatggcacacgaacacatggcctgtttaagcggttggggatccctggacctaccccgctccctctccttggcaacgttctaagttatagacagggcctgtggaaatttgataccgagtgctataagaagtatgggaaaatgtgggggacatacgagggccaattgccagtcctggcaatcaccgatcccgacgtcataaggaccgttctggtgaaagagtgctatagtgtgtttacgaatcgcagatcccttggcccagtgggattcatgaagagcgccatctctctcgccgaagacgaagaatggaagcgcatccgctccctgcttagtcccacgtttacctcagggaagctaaaagagatgttcccaattattgcccagtatggagacgtgttggtaaggaatctccgcagagaggcggaaaaggggaagccagtcaccctcaaagatatttttggagcctacagcatggatgtgattaccggaacttcgttcggcgtgaacattgactccttgaacaatccacaagatcccttcgtcgagtccaccaaaaagtttttgaaattcggatttttagacccattgtttttgagtatcattctgtttccattcctgacaccagtcttcgaagctttaaatgtgtccctgtttccgaaggacaccattaatttcctatcaaagtcagtcaaccggatgaaaaaaagcagactgaatgacaagcagaagcacagactggatttccttcagctgatgatagatagccagaactccaaggagaccgagtcgcacaaggccttatccgatctggagctggctgctcagtccatcattttcatttttgccggctacgagactacatcctccgtgctgagcttcaccctgtatgagttggctacacacccagatgtgcagcagaagcttcagaaggagattgatgccgttctcccgaacaaggccccacccacctacgacgccgtggtgcagatggaatatctggatatggttgtcaatgaaacactgaggctgttccccgtagccattaggcttgagaggacatgtaagaaagacgtggaaattaatggagtgttcatccctaaaggatcaatggtggttattcctacatacgctttacaccacgatcccaaatactggacggagcctgaagagttccgccctgagcggttttcgaagaaaaaagactcaatagacccctatatctacacaccatttggcacaggtccccgaaactgtattgggatgcggtttgcccttatgaatatgaagctggccctgatcagggttctacaaaacttcagctttaagccatgcaaggaaacccagatcccattgaagttagatacacaggggctactccagcccgaaaagccgattgtgttgaaggtggactcacgggacggtaccttgtccggcgaatag

SEQ ID NO: 15455 - DNA, 1509 bp, Artificial Sequence
  derived and/or modified sequence
atggacctgatccccaacctggccgtggagacctggctgctgctggccgtgtccctggtgctgctgtacctgtatggcaccaggacccacggcctcttcaagaggctgggcatccctggccccacccccctgcccctgctgggcaatgtgctgagctaccggcagggcctgtggaagtttgacacagagtgctacaagaagtatggcaagatgtggggcacctatgagggccagctgcctgtgctggccatcacagatcctgatgtgatcagaacagtgctggtgaaggagtgctacagcgtcttcaccaacagaagaagcctgggccctgtgggcttcatgaagagcgccatcagcctggccgaggatgaggagtggaagaggatccgcagcctgctgagccccaccttcaccagcggcaagctgaaggagatgttccccatcatcgcccagtatggagatgtgctggtgaggaacctgcggcgggaggccgagaagggcaagcctgtgaccctgaaggacatctttggagcctacagcatggatgtgatcaccggcaccagctttggagtgaacatcgacagcctgaacaacccccaggacccctttgtggagagcaccaagaagttcctgaagtttggcttcctggaccccctcttcctgagcatcatcctcttccccttcctgacccctgtgtttgaggccctgaatgtgtccctcttccccaaggacaccatcaacttcctgagcaagtctgtgaacaggatgaagaagagccggctgaatgacaagcagaagcaccggctggacttcctgcagctgatgattgacagccagaacagcaaggagacagagagccacaaggccctgagtgacctggagctggccgcccagagcatcatcttcatctttgctggctatgagaccaccagctctgtgctgtccttcaccctgtatgagctggccacccacccagatgtgcagcagaagctgcagaaggagattgatgctgtgctgcccaacaaggccccacccacctatgatgctgtggtgcagatggagtacctggacatggtggtgaatgagaccctgcggctcttccctgtggccatccggctggagaggacctgcaagaaggatgtggagatcaacggggtcttcatccccaagggctccatggtggtgatccccacctacgccctgcaccacgaccccaagtactggacagagcctgaggagttccggcctgagcgcttcagcaagaagaaggacagcattgacccctacatctacacccccttcggcaccggccccaggaactgcatcggcatgagatttgccctgatgaacatgaagctggccctgatccgggtgctgcagaacttctccttcaagccctgcaaggagacccagatccccctgaagctggacacccagggcctgctgcagcctgagaagcccatcgtgctgaaggtggacagcagagatggcaccctgagcggggagtag

SEQ ID NO: 15456 - DNA, 1509 bp, Artificial Sequence
  derived and/or modified sequence
atggacctgatccccaacctggccgtggagacctggctgctgctggccgtgtcgctggttctgctctacctgtatgggactcgtacccacggtctgttcaagcgtctgggaatccccgggcccacccctctgccgctccttggtaatgtcctgtcttacagacaaggcctttggaaattcgacacagagtgctacaaaaagtacggtaagatgtggggaacctatgaggggcaactgcctgtgctggctataacagaccctgatgtcataaggactgtcctggtcaaggagtgctattccgtgtttacgaaccgcagatcactcggccctgtcggttttatgaagagcgcaatctcactggcagaggatgaagaatggaaaagaatccgctctctcctgtcaccaacgttcacgtcaggaaaactgaaagagatgtttcccatcatcgcacaatatggtgatgtgctcgtgcgcaacctccgccgagaggcggaaaagggcaaaccggtgactcttaaagatatcttcggggcctacagcatggatgtcattaccggaacttcatttggagtcaatatcgattccttaaataaccctcaggacccctttgtggagagcacaaagaaattcttgaagttcggctttttggacccactcttcctgagcatcattctctttcctttcctgaccccagttttcgaggctctcaacgtaagcctgttcccaaaagacactattaacttcctgagcaaaagcgttaatagaatgaaaaagtcaagattgaatgataagcaaaaacacagactggattttctccaactaatgatcgacagtcaaaacagcaaagagactgagtcacacaaagcactgtcagatctggagttggccgctcagagcatcattttcatctttgccggttacgagacgaccagcagcgtcctgtccttcaccctatacgaactggcaacccaccccgatgtacagcagaagttgcaaaaagaaatcgatgccgtactgcccaataaggctccccccacgtatgatgccgtcgttcaaatggaatacctggatatggttgtgaacgagactctgcgcctgttccctgtggccatccgcctagagagaacgtgtaaaaaagacgtggagatcaatggggtgttcatccccaaagggtccatggtggtgattcctacctatgctctccatcacgacccaaaatactggacagagccagaggagttccggcccgagcgttttagcaagaagaaagacagtattgatccttacatctatactccatttggtaccggtccccggaactgcatcggcatgcggtttgcccttatgaatatgaagctcgccctgattcgggttctgcagaactttagtttcaaaccatgcaaagagacgcagatacctttgaaactggatacgcaggggctgttgcagcccgagaaaccaattgtattgaaagtggatagtcgagatggcactctatcaggcgaatag

SEQ ID NO: 15457 - DNA, 1509 bp, Artificial Sequence
  derived and/or modified sequence
atggacttgatccccaatctggccgtggaaacatggctgctcctagcggtctccctggtgctcctgtatctgtatggcactcgtacacatggtttgttcaaacgactggggattccaggacccacacctctccctctgctggggaacgttctctcctataggcagggcctgtggaaattcgacaccgagtgctataaaaagtatggaaaaatgtggggcacctacgaagggcagctgccagttctagcaattacagatccagatgtcattaggaccgtgttggtgaaagagtgttattccgtttttactaatcggagaagcttggggccagttgggtttatgaaatcagccataagtctggcagaggatgaggagtggaaacggattagaagtctgctcagccccacatttacatcagggaaattaaaagagatgttccctataatcgcacagtatggagacgttctggtgcggaaccttcgtcgagaagcggagaaagggaagcccgtgacgctgaaagatattttcggcgcttattcaatggacgtcataaccggcacttctttcggagtgaatattgatagtctgaataacccacaggatcccttcgtggaaagtaccaagaagtttcttaaatttgggtttctggacccccttttcctgtccataattttgttcccttttttaacccctgtctttgaggccctgaatgtcagtctgttccccaaggataccataaacttcctgtcaaagagcgtcaaccgaatgaagaagagtcgactaaacgacaaacagaaacatcgcctcgactttctgcagctgatgatcgactctcagaatagtaaggaaaccgagagccataaggccctctcagacctggagctggcagcccagagcataatctttatttttgccggttacgaaacaacctcttccgtccttagttttaccttatatgagctggccacgcaccctgacgtgcagcagaaacttcagaaggaaatagacgcagtcctgcccaataaagctccccctacatacgacgctgtggtccagatggaatacctcgatatggtggtcaatgaaacattgcgcctgtttcctgtagctataaggctggagaggacgtgcaaaaaagacgtggagatcaacggagtatttatccccaagggatcaatggtggtgatacccacgtacgctctgcaccacgatcctaaatactggacagagcccgaagaattcaggccagaacggttctccaaaaagaaagacagtatagatccttacatatatactcctttcggcactggacctcggaattgcattggaatgagattcgccctaatgaatatgaagcttgcactgatccgtgttctccagaatttttctttcaagccttgcaaggagacacagatccctttgaagcttgacacacagggactactgcagcctgagaaacccatagttttaaaagtggattctcgagacggcaccctctctggcgagtag

SEQ ID NO: 15458 - DNA, 1720 bp, Artificial Sequence
  derived and/or modified sequence
gctgtgcagggcagggaagctccaggcaaacagcccagcaaacagcagcactcagctaaaaggaagactcacagaacacagttgaagaaggaaagtggcgatggacctcatcccaaatttggcggtggaaacctggcttctcctggctgtcagcctggtgctcctctatctatatgggacccgtacacatggactttttaagagactgggaattccagggcccacacctctgcctttgttgggaaatgttttgtcctatcgtcagggtctctggaaatttgacacagagtgctataaaaagtatggaaaaatgtggggaacgtatgaaggtcaactccctgtgctggccatcacagatcccgacgtgatcagaacagtgctagtgaaagaatgttattctgtcttcacaaatcgaaggtctttaggcccagtgggatttatgaaaagtgccatctctttagctgaggatgaagaatggaagagaatacggtcattgctgtctccaaccttcaccagcggaaaactcaaggagatgttccccatcattgcccagtatggagatgtattggtgagaaacttgaggcgggaagcagagaaaggcaagcctgtcaccttgaaagacatctttggggcctacagcatggatgtgattactggcacatcatttggagtgaacatcgactctctcaacaatccacaagacccctttgtggagagcactaagaagttcctaaaatttggtttcttagatccattatttctctcaataatactctttccattccttaccccagtttttgaagcattaaatgtctctctgtttccaaaagataccataaattttttaagtaaatctgtaaacagaatgaagaaaagtcgcctcaacgacaaacaaaagcaccgactagatttccttcagctgatgattgactcccagaattcgaaagaaactgagtcccacaaagctctgtctgatctggagctcgcagcccagtcaataatcttcatttttgctggctatgaaaccaccagcagtgttctttccttcactttatatgaactggccactcaccctgatgtccagcagaaactgcaaaaggagattgatgcagttttgcccaataaggcaccacctacctatgatgccgtggtacagatggagtaccttgacatggtggtgaatgaaacactcagattattcccagttgctattagacttgagaggacttgcaagaaagatgttgaaatcaatggggtattcattcccaaagggtcaatggtggtgattccaacttatgctcttcaccatgacccaaagtactggacagagcctgaggagttccgccctgaaaggttcagtaagaagaaggacagcatagatccttacatatacacaccctttggaactggacccagaaactgcattggcatgaggtttgctctcatgaacatgaaacttgctctaatcagagtccttcagaacttctccttcaaaccttgtaaagaaacacagatccccttgaaattagacacgcaaggacttcttcaaccagaaaaacccattgttctaaaggtggattcaagagatggaaccctaagtggagaatgagttattctaaggatttctactttggtcttcaagaaagctgtgccccagaacaccagagatttcaacttagtcaataaaaccttgaaataaagatgggcttaatctaatgta

SEQ ID NO: 15459 - protein, 504 aa, Artificial Sequence
  derived and/or modified sequence
MMTTSLIWGIAIAACCCLWLILGIRRRQTGEPPLENGLIPYLGCALQFGANPLEFLRANQRKHGHVFTCKLMGKYVHFITNPLSYHKVLCHGKYFDWKKFHFATSAKAFGHRSIDPMDGNTTENINDTFIKTLQGHALNSLTESMMENLQRIMRPPVSSNSKTAAWVTEGMYSFCYRVMFEAGYLTIFGRDLTRRDTQKAHILNNLDNFKQFDKVFPALVAGLPIHMFRTAHNAREKLAESLRHENLQKRESISELISLRMFLNDTLSTFDDLEKAKTHLVVLWASQANTIPATFWSLFQMIRNPEAMKAATEEVKRTLENAGQKVSLEGNPICLSQAELNDLPVLDSIIKESLRLSSASLNIRTAKEDFTLHLEDGSYNIRKDDIIALYPQLMHLDPEIYPDPLTFKYDRYLDENGKTKTTFYCNGLKLKYYYMPFGSGATICPGRLFAIHEIKQFLILMLSYFELELIEGQAKCPPLDQSRAGLGILPPLNDIEFKYKFKHL

SEQ ID NO: 15460 - DNA, 1515 bp, Artificial Sequence
  derived and/or modified sequence
atgatgactacatcattaatctggggcattgctatcgcggcatgttgctgcctttggcttatactcgggatacgcaggaggcagacaggtgagccacctctggaaaacggactgattccttacctcggatgcgcactccaatttggggccaacccgctggagttcctgagggctaaccaaaggaagcacggccacgtatttacttgtaaattgatggggaaatacgtgcattttataaccaacccactttcttaccacaaggtactttgtcacggcaagtactttgactggaagaaattccacttcgcaacttcagcaaaggcattcgggcaccgatccatagatccaatggacggcaacacaacagagaatataaacgatacctttatcaaaacgctccagggacacgcattgaatagcctcactgagtctatgatggaaaacctgcagaggatcatgcggccgcccgtatccagtaatagtaagacagccgcatgggtcacggaaggcatgtacagcttttgttacagggtgatgtttgaggcaggctatttgacaatcttcggaagggacttgacacgtagggacacgcagaaagcccacattctcaacaacctcgacaactttaaacagtttgacaaagtcttccccgcactcgtggccggactgcctattcacatgttcagaaccgcacataatgcgcgcgaaaaacttgcagaatctttaaggcacgagaaccttcagaaaagggagtccatctctgaactgatttctctgcggatgtttcttaacgatactctaagcactttcgatgaccttgagaaagcgaaaacacacctagtggtcctctgggcctcccaggccaatacaattccggcaaccttctggagcctgtttcaaatgatacggaatcctgaggcaatgaaggctgccactgaagaagtaaagcggacactggaaaacgccggtcagaaggtgtctctcgaaggaaatcccatctgcctgagtcaggcagagctcaacgatctccctgtcctcgattccatcatcaaggaatctctacgactcagctccgcatcactgaacatcaggacagccaaggaagatttcactctgcacttagaggacggttcatataacatacgtaaggatgacatcatcgccctgtacccccaacttatgcacttagatcctgaaatctatccggacccactgacctttaagtacgaccggtatcttgacgagaacgggaaaaccaagactactttttactgcaatggattgaaactcaaatactactacatgccatttggctctggggccacgatttgtcccggccggctcttcgcgattcatgaaattaagcagttcttgattctgatgctcagttatttcgagctggagctgatcgaagggcaggcgaagtgccccccattggaccagagccgtgcaggcctgggcattctacctcccctcaacgacatagaatttaaatacaagttcaaacacttgtag

SEQ ID NO: 15461 - DNA, 1515 bp, Artificial Sequence
  derived and/or modified sequence
atgatgaccaccagcctcatctggggcatcgccatcgccgcctgctgctgcctgtggctgatcctgggcatcagaagacggcagacaggagagccccccctggagaatggcctcatcccctacctgggctgtgccctgcagtttggagccaaccccctggagttcctgcgggccaaccagaggaagcacggccacgtgttcacctgcaagctgatgggcaagtatgtgcacttcatcaccaaccccctgagctaccacaaggtgctgtgccacggcaagtactttgactggaagaagttccactttgccaccagcgccaaggccttcggccacaggagcattgaccccatggatggcaacaccacagagaacatcaatgacaccttcatcaagaccctgcagggccacgccctgaacagcctgacagagagcatgatggagaacctgcagaggatcatgaggcctcctgtgagcagcaacagcaagacagctgcctgggtgacagagggcatgtacagcttctgctacagagtgatgtttgaggccggctacctgaccatcttcggccgggacctgacccggcgggacacccagaaggcccacatcctgaacaacctggacaacttcaagcagtttgacaaggtgtttcctgccctggtggccggcctgcccatccacatgttcagaacagcccacaatgcccgggagaagctggccgagagcctgcggcatgagaacctgcagaagcgggagagcatcagcgagctgatcagcctgaggatgttcctgaatgacaccctgagcacctttgatgacctggagaaggccaagacccacctggtggtgctgtgggccagccaggccaacaccatcccagccaccttctggagcctcttccagatgatcagaaatcctgaggccatgaaggccgccacagaggaggtgaagaggaccctggagaatgccggccagaaggtgtccctggagggcaaccccatctgcctgagccaggccgagctgaatgacctgcctgtgctggacagcatcatcaaggagagcctgcggctgagcagcgccagcctgaacatcagaacagccaaggaggacttcaccctgcacctggaggatggcagctacaacatcaggaaggatgacatcatcgccctgtacccccagctgatgcacctggaccctgagatctacccagaccccctgaccttcaagtatgaccgctacctggatgaaaatggcaagaccaagaccaccttctactgcaatggcctgaagctgaagtactactacatgccctttggaagtggggccaccatctgccccggccgcctgtttgccatccacgagatcaagcagttcctgatcctgatgctgagctactttgagctggagctgattgagggccaggccaagtgcccccccctggaccagagccgggccggcctgggcatcctgccccccctgaatgacatcgagttcaagtacaagttcaagcacctgtag

SEQ ID NO: 15462 - DNA, 1515 bp, Artificial Sequence
  derived and/or modified sequence
atgatgaccaccagcctgatctggggcatcgccatcgccgcctgctgttgcttgtggttaatccttggcattcggcgccgccagactggcgagcctcccctggagaatgggcttattccgtatttgggttgtgccctgcagttcggtgctaaccctctcgagtttctgagggcgaaccagagaaagcatggccatgtttttacatgcaagctgatggggaagtacgttcacttcattaccaatcccctgagttaccacaaagttttgtgtcatgggaagtatttcgattggaagaaatttcattttgccacttctgcaaaagcattcggccatcgcagcattgaccctatggacgggaatacgaccgagaacatcaatgatactttcataaagaccctacagggccacgctctgaactccttaacagagagcatgatggaaaaccttcagcgcataatgcggccccctgtgtcgtctaacagcaaaaccgccgcatgggtgacggagggtatgtacagcttttgctatcgcgtaatgttcgaagccggctatctcactatctttggcagagacctgacacggcgtgatacgcaaaaggcacacatactgaacaatctggacaatttcaaacagttcgacaaagtgtttcctgctctggtagctggcctgcccatccacatgtttcggacagcccataacgcgagagaaaaactggcagaaagcctgcgccacgagaatcttcagaagagggagtcgattagcgaacttatcagccttagaatgttccttaacgatactctcagcacctttgatgacctcgaaaaggccaaaacgcatctggtagttttgtgggcttctcaggcaaatactatccccgccacgttctggtcccttttccagatgatcagaaatcctgaggccatgaaggctgccactgaagaggtgaagagaactcttgaaaatgcaggccagaaagtgagcctggaagggaaccctatttgcctgtcccaggccgaactgaacgatctgcctgttctcgattccatcattaaagaatcgctgaggttgtcctcagccagcctcaacatacgcacagccaaagaggactttacattacacttagaagacggctcatataacatccgcaaggacgatatcatcgccctttacccacaacttatgcacctagatcctgaaatctaccccgatcctcttactttcaaatacgataggtacctcgatgagaacgggaaaacaaagacaaccttctactgtaacggtcttaagctgaagtattactatatgccgttcggaagtggcgccacaatttgtccgggccggttatttgctatccatgagatcaaacagttccttatcttaatgttgtcatacttcgaactcgaattaattgagggacaagctaagtgtcctccgctggaccaatcccgggctggactaggcatcctgcccccactgaatgacatcgagttcaagtacaaatttaagcatttatag

SEQ ID NO: 15463 - DNA, 1515 bp, Artificial Sequence
  derived and/or modified sequence
atgatgaccaccagcctgatatgggggatagccattgccgcatgctgctgcctctggctgatcctcggaatccgacgccgtcagacgggcgaaccacctctggaaaacggtctcatcccttatctgggctgcgcacttcagttcggagcgaatccattggagtttctgcgtgccaatcagaggaaacatgggcacgtgttcacctgcaagttgatgggtaagtacgttcattttatcaccaatccactctcttatcacaaagtcctgtgtcatggcaagtacttcgactggaagaagtttcatttcgctacttcggcgaaggctttcggtcaccggagtatcgaccccatggacggaaatacgactgagaatattaacgacacatttataaaaacgctccagggacacgcactcaattctttaaccgagagcatgatggagaaccttcaacgcattatgcgcccacctgtctccagtaactccaaaaccgctgcttgggtgacagagggcatgtattcattttgctatcgggtgatgttcgaggcgggatacttgacaatcttcggcagggatctgactcggagagacactcagaaggcacatatactcaataacctagataacttcaaacagttcgacaaagttttcccagcgctggtcgcgggactgcccatccacatgtttcgcactgcgcacaatgccagagaaaaattggccgaaagcctgcgacatgagaatctgcagaagagagaatcaatcagtgagttgatctcactcaggatgttcctgaatgatacactgagtactttcgatgacctggagaaagccaagacgcatcttgtcgttctgtgggcctcacaggctaatacaatccccgcaactttttggagtctctttcagatgatcaggaaccctgaggccatgaaggcagccaccgaggaagttaaaagaactcttgaaaatgctggccaaaaagtgtccctggaggggaaccccatttgtctttcccaagccgagcttaatgacttgccagtcttggatagcatcattaaggagtcattacggctgtcgtccgcgagtctcaatattagaacagccaaggaggatttcaccctgcatttggaagacggctcatataatatcaggaaggatgatattattgccctgtatccacagcttatgcacctcgacccagaaatttaccccgaccctctgacattcaaatacgaccggtatcttgacgagaacggtaagactaagaccactttctattgcaatggcctcaaactcaaatattattatatgccgttcggatctggcgctaccatctgccccggacggttatttgccatccatgagatcaagcaattcctgatccttatgctctcctacttcgaattggagctaatagaaggtcaggcgaagtgcccccctctggaccagagcagagctggtctgggaatacttcccccattgaacgatatcgagtttaagtacaaattcaaacacttatag

SEQ ID NO: 15464 - DNA, 1512 bp, Artificial Sequence
  derived and/or modified sequence
atgatgacgacgtcgttaatatggggtatagcgatagcggcgtgttgttgtctatggctaatactaggtatacgtcgacgtcaaacgggtgaaccgccgctagaaaatggtttaataccgtatttaggttgtgcgttacaatttggtgcgaatccgctagaatttctacgagcgaatcaacgaaaacatggtcatgtttttacgtgtaaactaatgggtaaatatgttcattttataacgaatccgctatcgtatcataaagtactatgtcatggtaaatattttgattggaaaaaatttcattttgcgacgtcggcgaaagcgtttggtcatcgttcgatagatccgatggatggtaatacgacggaaaatataaatgatacgtttataaaaacgttacaaggtcatgcgttaaattcgctaacggaatcgatgatggaaaatctacaacgaataatgcgtccgccggtatcgtcgaattcgaaaacggcggcgtgggtaacggaaggtatgtattcgttttgttatcgtgttatgtttgaagcgggttatctaacgatatttggtcgtgatctaacgcgtcgagatacgcaaaaagcgcatatactaaataatttagataattttaaacaatttgataaagtttttccggcgctagtagcgggtttaccgatacatatgtttcgtacggcgcataatgcgcgagaaaaactagcggaatcgctacgtcatgaaaatttacaaaaacgagaatcgatatcggaattaatatcgttacgaatgtttctaaatgatacgctatcgacgtttgatgatttagaaaaagcgaaaacgcatctagtagtattatgggcgtcgcaagcgaatacgataccggcgacgttttggtcgctatttcaaatgatacgtaatccggaagcgatgaaagcggcgacggaagaagtaaaacgtacgctagaaaatgcgggtcaaaaagtttcgttagaaggtaatccgatatgtttatcgcaagcggaattaaatgatttaccggtattagattcgataataaaagaatcgttacgtttatcgtcggcgtcgttaaatatacgaacggcgaaagaagattttacgctacatttagaagatggttcgtataatatacgaaaagatgatataatagcgttatatccgcaactaatgcatttagatccggaaatatatccggatccgttaacgtttaaatatgatcgttatctagatgaaaatggtaaaacgaaaacgacgttttattgtaatggtttaaaactaaaatattattatatgccgtttggttcgggtgcgacgatatgtccgggtcgtttatttgcgatacatgaaataaaacaatttttaatactaatgctatcgtattttgaactagaattaatagaaggtcaagcgaaatgtccgccgttagatcaatcgcgagcgggtctaggtatactaccgccgttaaatgatatagaatttaaatataaatttaaacattta

SEQ ID NO: 15465 - DNA, 1512 bp, Artificial Sequence
  derived and/or modified sequence
atgatgaccacgtctctcatttggggcatcgctatagccgcctgctgttgtctgtggctgatcctgggaattagacggagacaaacaggcgagccacccctggaaaatggcctgattccgtatctggggtgcgcgctgcagtttggcgccaatcctctcgagttccttagagcaaatcaacgcaaacacggccatgtgttcacctgtaaacttatgggcaagtacgtccattttatcactaatcccttgtcctatcacaaggttttatgtcacggaaaatacttcgattggaaaaaatttcattttgcaacttcggccaaagctttcggccaccgcagcatcgacccaatggacggaaacaccaccgagaacatcaatgacacctttattaagacactgcaagggcacgctctgaactcactgacagagtccatgatggaaaatcttcaacgcatcatgagaccacctgtgtcgtctaacagcaaaaccgcggcctgggtgaccgaaggcatgtacagcttttgttaccgggtaatgttcgaggccggatacctgaccattttcggcagggacctgacaagacgcgacacacagaaagctcacatcctgaacaatctggacaatttcaagcagttcgacaaggtgttccctgccctggtggcaggcctacctattcatatgtttcgcactgctcataatgcgagggagaagctcgccgagtcactgagacatgaaaacctacagaaacgagagtctatctcagagctgatttcactccgtatgtttctgaacgacaccctgtcgacttttgacgatctggagaaagccaagacacacctggtggttctatgggcatcgcaggcgaacacaattcctgccacattttggtcactgtttcaaatgatcaggaatccggaggccatgaaggcagctacagaagaggttaagaggactctggaaaacgcaggacaaaaggtctctttagagggcaacccgatctgcctgagccaggccgagcttaatgacctgcctgtgctggactccataatcaaggaatcgctgcgtttgagcagtgcctctctcaacatcaggactgccaaagaggatttcacactgcacttggaggatggaagctataacatccgcaaggacgatataatcgctctgtatccccaactgatgcatctggacccagaaatctatccggatccgctcacgttcaaatatgacaggtacttggacgaaaacggaaagaccaaaacgacgttttactgtaatggactcaagttgaagtattattatatgcccttcggctctggcgccactatctgtcccggcaggttgtttgcgattcacgagatcaaacagttcctgatcctaatgctctcatacttcgagctggaacttatcgagggtcaagctaaatgcccacccttggatcagagtcgggccgggttggggatcttgcctcctctgaatgacatcgagtttaaatataagttcaagcattta

SEQ ID NO: 15466 - DNA, 1512 bp, Artificial Sequence
  derived and/or modified sequence
atgatgactacctccttgatctgggggattgccatcgctgcctgttgctgtctgtggctgatactggggattaggcgcagacaaaccggcgaacccccgctcgagaacggactgatcccttacctgggttgtgctctgcaattcggtgcaaatcctctcgaatttcttcgcgccaatcagcggaaacacggccacgtgttcacgtgcaagctgatgggaaagtacgtgcacttcatcaccaacccattgtcctaccacaaggtcctgtgtcacgggaagtacttcgattggaagaagttccattttgcgactagcgcaaaggcgttcggccacagaagcatcgatccaatggacggtaacaccaccgaaaacatcaatgacacgttcatcaagaccctccaaggccatgcgctcaattcacttactgaatccatgatggaaaacctgcagcggattatgcggccacccgtctcctcgaacagcaagactgccgcgtgggtgactgagggcatgtactcgttctgctatcgggtcatgttcgaagccgggtacctgaccattttcggaagagatctgaccagacgcgacactcagaaggcgcatatcctgaacaatctggacaactttaagcagtttgataaggtgtttcccgctctcgtggccggactgccgatccacatgttccgcaccgcccacaacgcaagggagaagctggctgagtccttgaggcacgaaaacctccaaaaacgagaatcgatctccgaactgatctccctccgcatgttcctcaacgacaccctctcgactttcgatgatctcgaaaaagcaaaaacccaccttgtggttctttgggcgtcgcaggctaacaccataccggctactttctggtcattgttccagatgatccggaacccggaggccatgaaggccgcgactgaagaagttaaacgcactttggagaatgcaggccaaaaggtcagcctcgaaggcaatccgatctgcctctcgcaagcggaactgaacgacctccctgtgctcgattcgatcatcaaggaatcgctgagactgtcatcggcatcattgaacattcgcacggccaaggaggacttcactttgcatctggaggatggttcatacaatattcggaaagacgacataatcgcgctgtacccccagttgatgcacctggacccggaaatctacccagacccactgacctttaagtacgatcgctacctggatgagaatggaaagactaaaactactttctactgcaatggcctgaagctgaaatactactatatgccgttcggatccggagctaccatctgcccgggccggctgttcgccatccacgaaatcaaacaattcctcatccttatgctgtcctactttgagctggaattgatcgagggacaggcgaaatgtccgccactcgatcagtcacgggcaggactgggcatccttcctcctctcaacgacatcgaattcaagtacaaattcaaacatctg

SEQ ID NO: 15467 - DNA, 1512 bp, Artificial Sequence
  derived and/or modified sequence
atgatgaccactagcttgatctgggggatcgcaattgcggcatgttgttgtctgtggctgattctgggaattcgcagacggcagaccggggaacccccacttgaaaatggtctgatcccatacctcgggtgtgccctccaattcggtgccaaccctctggaatttctccgcgctaatcagcgaaaacacgggcacgtgttcacgtgcaaactgatgggcaaatatgtgcactttatcaccaaccctctctcgtaccataaagtgctttgccacggcaaatacttcgattggaagaagttccatttcgcgacttccgccaaagcattcgggcatcgttcgattgaccccatggatggcaacactacggagaacatcaatgacacttttatcaaaaccctgcaggggcacgcattgaattcgctgactgaaagcatgatggaaaatcttcagcggatcatgcgcccgccggtcagctcaaacagcaagaccgccgcttgggtgaccgaaggaatgtactccttctgctaccgtgtgatgtttgaagcgggctacctgactatcttcggtcgcgaccttactaggagagacactcaaaaagcgcacatcctcaacaacctggataactttaagcaattcgacaaggtgttccccgcccttgtcgccggactgcccattcatatgtttcgcactgcccataatgccagagaaaaactcgcggaatcactcaggcatgagaatctccagaagcgggaatcgatctccgagctgatctcgctgaggatgtttctcaacgacacgctgtctacctttgatgacctggaaaaggcaaagactcacttggtggtgctgtgggcctcacaggccaataccatcccggccaccttttggagcctgttccagatgatccgcaacccggaagcaatgaaggctgccaccgaagaggtgaagaggactctcgaaaacgcgggccagaaggtgagcctcgagggcaatccgatatgcctgtcccaagccgaactgaatgacttgccagttcttgatagcatcatcaaagagtccctccggttgtcatcagccagcctgaacatccggaccgcaaaagaggacttcactctgcatctcgaagatggaagctacaatatccggaaggacgatatcatagcgttgtacccgcaactgatgcacctggaccccgagatctaccccgacccgcttacgtttaagtatgatagatacctggatgagaatggaaagactaagacgaccttttactgcaacggactgaagctgaagtactattacatgccatttggaagcggagctactatctgcccgggacgcctctttgccatccacgagatcaagcagtttctcatcctcatgctgtcatacttcgagttggagttgatcgaaggacaagctaagtgccctcctctcgatcagagccgcgcaggactgggcatcctgcctcctctgaacgatatcgaattcaagtacaagttcaagcacctc

SEQ ID NO: 15468 - DNA, 1512 bp, Artificial Sequence
  derived and/or modified sequence
atgatgactacgagcctgatttggggtatcgcaattgccgcctgttgctgtctctggcttatcctgggcattcggcggcggcaaactggagaacccccactcgagaatggcttgattccatacctcggatgtgctctccaatttggagctaacccccttgagtttttgcgagcaaaccaacggaagcacggacacgtgtttacttgtaaacttatgggaaagtacgtgcatttcatcactaacccccttagctaccataaagtcctgtgtcatgggaagtactttgattggaagaagtttcattttgccacttccgcaaaagcatttggacatcgatcgattgatcccatggacggtaataccaccgaaaacatcaatgacaccttcataaagaccttgcagggacatgcccttaacagcctcactgagtcaatgatggaaaatctgcagagaattatgcggcctccggtgtcctccaattcgaaaactgctgcgtgggtgactgaggggatgtacagcttctgttaccgtgtcatgtttgaagcaggttacctgaccatttttggtagagatctcactcggagggacacccagaaggcacacattctcaacaatttggacaactttaagcaatttgataaggtgtttccagcactcgtcgcaggacttccaattcacatgttcagaaccgcacataacgcgagggaaaagttggctgagtccctgcgtcacgagaaccttcaaaagcgtgaatcaatttccgaacttatatcgctgcgcatgttcctgaacgataccctgtcaaccttcgatgatctggagaaggcaaagacgcacctggtggtgctgtgggcaagccaggcaaacactatcccagcaaccttttggtccctttttcaaatgatacggaaccctgaagcgatgaaggcagcaaccgaagaagtcaagcgcaccctggagaatgcaggccaaaaagtgtctctggagggaaaccctatttgcctgtcccaagcggaactgaacgatcttccggtccttgactccatcatcaaagagtcccttaggctctcctccgcctcgcttaacattcggaccgccaaagaagattttactttgcatctggaggacggatcatacaacattcgaaaagatgacatcattgccctgtacccacaactgatgcatcttgaccctgaaatctacccagacccactgacttttaagtacgatcgctaccttgatgaaaatggtaagacgaaaaccaccttttactgtaatgggcttaaactcaaatactactacatgccgtttggttcgggagcaactatttgcccaggtcgcctttttgctatccacgagattaagcaattccttatcctgatgctttcgtacttcgagctggaacttatcgagggtcaagcaaagtgtcctcctcttgatcaatcacgtgccgggctggggattctgcctcctctcaatgacattgagttcaaatacaaattcaagcatctg

SEQ ID NO: 15469 - DNA, 1512 bp, Artificial Sequence
  derived and/or modified sequence
atgatgaccacttctctcatttggggaattgcaatcgctgcttgctgctgcctgtggctgattctgggcattcgcaggagacagacgggagaacccccgcttgagaacggattgatcccatacctgggctgcgcgcttcaatttggagctaatcctctcgagttcctcagggctaaccagcgcaaacatggccacgttttcacctgtaagctgatggggaagtacgtccatttcattactaatccgctgtcatatcacaaagtgctgtgccacggaaagtacttcgactggaagaagttccatttcgccacctcggcgaaggcattcggccatcggtccatcgatcccatggatggaaatactaccgagaacattaatgacactttcatcaagaccctgcagggccacgcactgaactcacttactgagtccatgatggaaaacttgcagcgaatcatgcgcccgcctgtgtccagcaactccaagacggctgcatgggtcactgagggaatgtactccttctgctatcgggttatgtttgaagcggggtacctcactatcttcggaagagacttgactcgccgggatactcaaaaggcccatatcctgaacaacttggataactttaaacaattcgacaaggtgttcccggccttggtcgctggactgccaatccacatgttcagaaccgcccataacgcaagggaaaagctcgcagagagcctcaggcacgagaatctccaaaaacgcgaatcaatcagcgagctgatctcgctgagaatgttcctgaatgataccctgtcgaccttcgacgatcttgagaaggcaaagacccacttggtggtcctgtgggcttcccaagccaacaccatcccggccaccttctggtccctctttcagatgatccgcaatcctgaagccatgaaggccgccacggaagaggtgaagcgcactctggagaacgccggacaaaaagtctccttggaagggaaccctatctgcctgtcgcaagctgaactgaacgatctgccagtgctggatagcattatcaaggagtccctgaggttgtcgtcagcttccctgaatatccggaccgccaaggaagatttcaccctgcacctcgaggacggctcatacaatatccggaaggacgatatcatcgcactgtatccacagcttatgcaccttgacccggaaatctatccggatccccttacctttaagtacgatcggtacctggacgagaacggaaaaactaagaccaccttctactgcaacggactgaagctgaagtactactacatgccattcggatccggcgccaccatctgcccgggacgcctctttgcaatccatgagatcaaacagttcctgatcctgatgctgtcctacttcgaattggaacttatcgaaggtcaagcaaagtgcccaccgttggatcagagccgggccggccttggaatcctgcctccgctcaacgatatcgaattcaagtataagtttaagcacctc

SEQ ID NO: 15470 - DNA, 1512 bp, Artificial Sequence
  derived and/or modified sequence
atgatgactacttctctcatttggggcattgccatcgcagcctgctgctgcctatggctgattctagggatcagacgtcggcagacaggagagccccccctggagaatgggttgataccttacctggggtgtgctctgcagtttggagctaacccgctggaattcctgcgcgcaaatcagcgaaagcatggacacgtgtttacatgtaagctcatgggaaaatacgtccactttattaccaatccactgtcctaccataaggtcctgtgccacggcaaatattttgattggaaaaagttccactttgcaacttctgctaaagctttcggacatcgctctatcgatccaatggacgggaataccaccgagaatatcaatgacactttcattaagacgttgcaagggcacgcattaaattctctgactgaaagtatgatggagaaccttcaacggattatgcgcccccctgtgtcaagcaactccaagactgctgcttgggtgacagagggcatgtactcattctgctatcgagtgatgttcgaggcggggtaccttactatattcgggagagacctgactagacgggatacccagaaggcacacatcttaaataaccttgataattttaagcagttcgataaggtttttccggccttggtggccggtctgcctatacacatgttcagaacggctcacaatgccagggagaaattggcagaaagtcttcgccatgagaacctgcagaagagggagtctatttctgagctcatcagtttacgcatgtttctcaatgatactttatccacttttgacgatcttgaaaaggcaaaaacacaccttgttgttctctgggcgagtcaggccaacaccattccggcaacgttctggagcctctttcagatgatccgcaacccagaggctatgaaggcggccaccgaggaagtcaaaagaacactcgagaacgctggccagaaggtaagtctggaggggaacccgatatgcctcagtcaggccgagttaaacgatttacccgtgttggactcgatcataaaggagtctcttaggctgagttctgccagtcttaatatcaggacagcaaaagaggatttcacgctgcaccttgaggatggatcgtacaacatccgcaaggatgatatcattgcactttatccccagcttatgcacctggaccccgagatatatccagacccactgacattcaaatacgaccgctacctcgatgagaacggaaaaactaagacaaccttctactgcaatggccttaaactgaagtattattacatgcccttcggctctggcgccactatatgccctgggaggctcttcgctattcacgaaataaaacagttcttaatattgatgcttagttactttgaattggagttgattgagggccaggcaaaatgtcctccattggaccaatctagggcaggtctgggcatcctgcccccccttaacgacatcgaatttaagtacaagttcaagcatcta

SEQ ID NO: 15471 - DNA, 1512 bp, Artificial Sequence
  derived and/or modified sequence
atgatgaccacttcgctcatctggggcatcgcaatcgcggcctgctgctgcttgtggttgatcctgggcattaggaggcgccagaccggagagccacccttggaaaacggtctgatcccttatcttggatgtgcactgcagttcggagcgaaccctctggaatttctgcgggcgaatcaacgcaaacacggccatgtgttcacgtgcaaactgatgggcaaatacgtccacttcataaccaacccactgtcctaccacaaggtgctgtgccatggaaagtacttcgactggaagaaatttcacttcgccaccagcgccaaggcctttggccatcggtcgatcgatccaatggacgggaacactaccgaaaacataaatgacaccttcatcaagactctgcaaggacacgccctcaattcgctgactgaatcaatgatggaaaacctgcaacgtatcatgcggccgccagtgtcctccaactccaagaccgccgcttgggtgaccgagggaatgtacagcttctgctacagggtcatgttcgaggcaggatacctgaccatcttcggacgggacctgacgcgcagagatacccagaaggcccatattctcaacaacctcgacaacttcaaacaattcgacaaggtctttccagccctggtggcgggacttccgatccacatgttccgcaccgcccataacgcccgtgaaaaacttgccgagtcgctccggcatgagaatctgcaaaagcgggaatcaatttcagagctcatctccctccggatgttcctgaacgacacccttagcaccttcgacgacctcgagaaagccaagacccacctcgtggtcctgtgggcctcgcaagcgaataccatcccagcaactttttggtcgctgttccagatgatccgaaacccagaggccatgaaggcggcaaccgaggaggtcaaacgcacccttgaaaacgccgggcagaaggtgtcgctcgaggggaatccgatttgtctgtcgcaggctgagctgaatgacctgccggtcctggactcgatcatcaaggagtcattgcggctgagctcggccagcttgaacattcggaccgccaaggaagatttcactctccacctggaggacggatcctacaacatccggaaggacgacatcatcgcgctctacccgcagctgatgcatctggatccggaaatctacccagacccgctcactttcaaatacgatcgctatctggatgaaaacgggaaaactaaaacgaccttttactgcaatggacttaaactcaagtactactacatgccattcggtagcggagctaccatctgtcccggccggcttttcgccattcatgagattaagcagttcctgatcctgatgttgtcctactttgaactcgaacttatcgaggggcaggcgaagtgcccgcctctggatcagtcacgggcaggactcggaatcctcccgccgctcaatgatatcgagttcaagtacaaattcaagcatctg

SEQ ID NO: 15472 - DNA, 1512 bp, Artificial Sequence
  derived and/or modified sequence
atgatgactacttcactgatttggggcattgcaattgcagcctgttgttgcctttggctgattctgggaattcggcgcagacaaactggcgaacctccgcttgagaatgggctgatcccttacttgggatgtgcccttcagtttggagcaaaccctcttgagttcctcagagccaatcagcgtaaacacggtcatgtgtttacgtgcaagctcatgggcaagtacgttcactttatcaccaaccctctgtcctaccacaaggtcctgtgtcacggaaagtactttgactggaagaaattccattttgcaaccagcgcaaaggcattcggacaccgttcaattgacccaatggacggtaacaccaccgagaatatcaacgacaccttcataaagacgctgcaaggacacgctcttaacagcctcaccgaatcgatgatggaaaatctgcagagaatcatgcggccaccggtgagctccaactcgaaaaccgccgcatgggtgaccgaaggaatgtactccttctgctaccgcgtgatgtttgaagccggatatctgacgatctttgggagggatttgacccgtcgcgacacgcagaaggctcatattctcaacaacctggacaatttcaagcaattcgataaagtttttcctgcactggtcgcaggtttgccaattcatatgttcagaaccgcacataatgccagagaaaagctggcggagtcgctgaggcatgagaatctgcagaagcgggagtctatttcggaactgatttcccttcgcatgtttcttaacgacaccctcagcactttcgatgatctggaaaaggctaagactcatctcgtcgtgctttgggcatcccaagccaacaccatacccgccactttttggtcgctttttcaaatgattcgaaaccctgaggccatgaaggcggccactgaggaggtcaaacgcactcttgaaaacgcaggccaaaaagtctctttggaaggaaaccccatctgcctctcgcaagcagaacttaatgatctccccgtgttggattccatcatcaaggaatcacttcggctctcttccgcatcgcttaacattagaaccgcaaaggaagatttcactctgcacttggaggacggctcgtacaacatccgtaaggatgacattatagcgctctaccctcagcttatgcatcttgatccagaaatctaccctgatccccttactttcaagtacgataggtaccttgatgaaaacggcaaaaccaagactaccttttactgcaatggactgaagctgaagtactactacatgccattcggctcgggagcaaccatctgcccaggacgcctgtttgcaatccatgagatcaagcaatttctgatcctgatgttgtcctactttgaacttgaactcattgaaggtcaggcaaagtgtcccccgcttgaccaatcacgtgctgggcttggaatccttcctcctcttaacgacattgaattcaagtacaaattcaaacatctg

SEQ ID NO: 15473 - DNA, 1512 bp, Artificial Sequence
  derived and/or modified sequence
atgatgaccacttccctgatctggggaatcgccatcgcagcctgctgctgcctgtggctgatcctgggaatcaggagacgccagacgggggagccaccactggaaaacggactgatcccctacctcggctgcgccctgcagtttggtgctaacccactggagtttctgagggcaaatcagcgaaagcacggacacgtgttcacctgcaaacttatgggaaagtatgtccactttatcaccaacccactctcgtatcacaaggtcttgtgccacggtaagtacttcgactggaagaagttccacttcgcgacctcagccaaggccttcggacatcgaagcatcgatccgatggacggaaacactactgagaatatcaacgacacgttcatcaaaaccctgcaggggcatgcactgaacagcctgactgaatctatgatggaaaacctgcagagaatcatgaggccgccagtctccagcaattcaaagactgctgcgtgggtcaccgaaggtatgtacagcttctgctaccgggtgatgttcgaagcgggttacctcactattttcggaagggatctgacccgccgcgatacccaaaaagctcatatccttaacaatttggacaactttaaacaattcgacaaagtgttcccagctctcgtcgcgggactgcccatccatatgttcagaaccgcccacaatgctcgcgaaaagttggcggaatccctgagacacgagaaccttcagaagagagagagcatctcggagctgataagcctgcgcatgttcctcaatgacacgctctcaaccttcgatgatctggaaaaggccaaaacccatcttgtcgtcttgtgggcatcgcaagctaatactattccggcaaccttttggtccctgttccaaatgatccgcaatccggaggcgatgaaggcagccactgaagaagtgaagcggaccctggagaacgcaggtcagaaggtgtcattggagggaaacccgatctgcttgtcccaggccgaattgaacgatctcccggtgctcgactcaataatcaaagaatcccttcggctgagctcggcctcgctgaatatcaggacggcgaaggaggattttacgctccaccttgaggacggctcatacaacattcgcaaggacgatatcatcgccctgtatccgcaactgatgcatctggaccctgaaatctacccggatccactcactttcaagtacgaccgctaccttgatgagaatggaaagaccaagactaccttctactgcaacggactcaagctgaagtactactacatgccgttcggctcgggtgctaccatatgcccgggaagattgttcgcgatccacgaaatcaagcagtttcttatcctgatgctttcatactttgagctggaacttatcgaaggacaggcaaagtgtccacctctggatcagagccgggcgggcttgggtattctccctcccctcaacgacattgagttcaagtacaagtttaaacacctg

SEQ ID NO: 15474 - DNA, 1512 bp, Artificial Sequence
  derived and/or modified sequence
atgatgactacttcccttatctggggaatcgccatcgctgcctgctgttgtctgtggctgatcctcggaattcgcaggcgccagaccggtgagcctccacttgagaacgggctcattccatacctcggctgcgccttacaattcggagctaatcccttggaattcctgcgagcaaatcagcgtaaacacggacacgtcttcacctgtaagcttatggggaaatacgtgcactttataacgaatcccctgtcttaccacaaggtcctgtgccacggaaaatactttgactggaagaaattccactttgctaccagcgcaaaggcctttggccacaggtccatagaccccatggacgggaataccacggaaaacatcaacgataccttcattaagaccctgcaggggcatgcgctgaactccctgaccgagtcaatgatggagaatctgcaaaggataatgcgacctcccgtgtcttccaacagcaaaacggcggcctgggtgactgagggaatgtacagcttttgctaccgggtcatgttcgaagccggttatctgactatcttcggcagagacctcacaaggcgcgacactcagaaggcccacattttgaataacctagacaacttcaaacagtttgataaggtcttcccagcactcgtggcgggccttcctatccacatgttcaggacagcccacaacgcaagggagaaattagctgaaagtcttaggcacgaaaacctgcagaaacgcgagagcatatctgagcttataagtctgcgcatgtttttaaacgacacccttagcaccttcgatgatttggaaaaggctaagacccatttggttgttctgtgggcctctcaagccaacactatccccgctaccttctggtccctcttccagatgattaggaacccagaagccatgaaggccgcaaccgaagaggttaagagaacgttggaaaatgctggacagaaagtgtctctcgaaggcaacccaatctgtctaagccaagctgagctcaatgacctgccagtgctggattccataatcaaagagtcccttagactgtctagcgcgtctctgaatatccggaccgctaaggaagatttcaccttgcatctggaggatggctcatacaacatccgaaaggatgatattatcgccctatacccccagctgatgcacctggaccctgaaatttaccccgatcctctgaccttcaaatatgatcgttatttggatgaaaacggcaaaacaaaaaccactttttactgcaatggccttaaactgaagtactattacatgccgtttggatcaggggccactatatgcccgggcaggttgttcgccattcatgagatcaagcagtttcttatcctcatgctgagctatttcgaactggaactgatagaggggcaggcgaagtgcccccccctcgaccagtcacgtgcagggctaggaatcctgccacctttaaatgatattgagttcaaatacaagttcaagcactta

SEQ ID NO: 15475 - DNA, 1512 bp, Artificial Sequence
  derived and/or modified sequence
atgatgacgacctccctgatatggggaattgcaatcgccgcctgttgttgcctttggctgatcttaggcatcaggcgacgtcagactggcgaaccaccactcgaaaatggacttattccatatctcggatgcgccctgcagttcggcgcaaatcccttggagttcctgcgggcaaaccagcgaaagcacggacacgtgttcacgtgtaagcttatgggcaagtatgtgcactttattacgaacccactgtcatatcacaaggtgttgtgtcatggaaagtacttcgattggaaaaagtttcatttcgcaacaagtgctaaggctttcggacacaggtcaattgatcccatggacgggaatacgacagagaacataaacgacaccttcatcaaaacgttgcaaggacatgccctgaattcactgactgagtcaatgatggagaatttgcaaaggattatgcgtccaccagtgtcttcgaattcaaagacggctgcttgggtgactgaaggaatgtatagcttttgctatcgtgtgatgttcgaagccggatatttgactatcttcgggagagatctcacacggcgggacacgcaaaaagctcacattctgaacaacctcgacaattttaagcagttcgataaggtgttcccagctctggtggctggcttgcccattcatatgtttcgtacagctcacaatgccagggaaaagttagctgaatccctgcgtcacgaaaacctccagaaacgggagagcatttcagaactgataagcttgcgaatgttcctgaacgatacactctctacttttgacgatcttgaaaaggcaaagacccacctggtggtgctgtgggcaagtcaggcaaataccatccccgctacattttggagcctgtttcagatgatcaggaaccccgaggcaatgaaagccgctacggaagaagtcaaaagaacacttgaaaatgctggccagaaggtctccttggaaggaaatccgatctgcctgtcccaggctgagctaaacgacttgcccgtgctggacagcataatcaaggagtcgctgcgattgtcgagcgctagcctaaatatccggaccgctaaagaggacttcaccttacacctggaggacggaagctataatatcagaaaggacgacatcatagctctatatccccagctgatgcacctcgatcctgagatctacccagatcccctgacttttaagtatgataggtacttggatgagaatggcaagactaagacaaccttctactgcaacggccttaaactaaagtattactatatgccctttgggagtggagccaccatttgtccaggcaggctcttcgccatccatgaaattaagcaatttctaatcctgatgttatcctactttgaacttgaacttattgaggggcaagccaagtgccccccactcgatcagtcaagagccggcttaggtattctacctccactgaacgatatcgagttcaaatataaatttaagcacctc

SEQ ID NO: 15476 - DNA, 1512 bp, Artificial Sequence
  derived and/or modified sequence
atgatgaccacaagccttatttgggggatagcgatcgccgcatgctgttgcctgtggctcatccttggcatcagacgcaggcagacaggcgagccgcctcttgaaaatggcctgatcccgtatctgggatgtgcacttcagttcggggcgaaccccctcgagttcctgcgcgcgaatcagagaaaacacggccatgtatttacatgcaagcttatgggaaagtatgtgcacttcattacgaatcctctgtcttatcataaggtactttgtcacgggaaatattttgattggaagaaattccactttgcgacaagtgccaaagccttcggccaccgcagtatcgaccctatggatggaaatacgacagagaacatcaacgacacttttattaaaactctgcagggtcacgctttgaactctttgactgagagtatgatggagaacctgcagagaatcatgaggccgcccgtctctagcaatagtaagactgctgcatgggtcacggaaggcatgtattctttttgctaccgggtcatgtttgaagctggctacctgacgatctttggtagggatcttacccggagggacacacagaaggctcacatactgaataacctggacaactttaagcagtttgataaggtctttcctgccctggtggcggggttgcctatacatatgttccgaacggcccataacgctagagagaagttggctgagagtctgagacatgaaaatctgcagaaaagggagtcaatatctgaacttataagcctgaggatgttcttgaacgacactctgtcaaccttcgacgatctggaaaaagccaaaacacatcttgtagtactgtgggcttcccaggctaatacgatccccgccacattttggtctctcttccagatgatccggaacccggaagcgatgaaagccgccactgaggaagtgaagagaacccttgagaacgccggccagaaggtgtcccttgaagggaatcccatttgtctttcacaagccgagctcaacgacctgcccgtcctggactccattattaaagaatccttgcgcctttccagtgctagtctgaacatcagaacggccaaagaagacttcaccctgcacctcgaagacgggtcatacaacatccggaaagacgacattatcgctctctacccccagctcatgcatctggaccctgaaatataccctgacccactgacctttaaatacgatcgctacctggacgaaaatggaaaaacaaaaacaacgttttactgtaatgggctcaagctgaaatactactatatgcccttcggctccggagcgacaatatgtccaggccggctcttcgcaatacatgagattaagcagttcctcatcctcatgctgtcctatttcgagctcgagttgattgagggtcaggccaagtgccctccccttgaccaaagcagggccggattgggcatactgccacctctgaacgatattgaattcaagtacaagttcaaacacctc

SEQ ID NO: 15477 - DNA, 1512 bp, Artificial Sequence
  derived and/or modified sequence
atgatgaccaccagcttaatatgggggattgcaatcgctgcctgttgctgcctgtggcttatactgggaatccgtcgccggcagaccggggagcctccattagagaacggactgatcccttacctgggttgtgcattgcagttcggcgccaatccgctggaattcctgagggcaaatcagcgcaaacacgggcatgtgtttacctgcaaactcatgggtaaatatgtccactttatcaccaaccctctgagctaccataaagttctgtgtcatggcaagtattttgactggaagaaatttcacttcgcaaccagcgcaaaggccttcggacaccgcagcatagacccaatggatggtaataccacggagaatatcaatgatacgttcatcaagactttgcaaggacatgccctcaactcattgaccgaaagcatgatggagaacttgcagcggattatgcgaccgcctgttagcagcaattctaagaccgcggcgtgggttactgagggcatgtatagtttttgctatcgcgtcatgttcgaagcgggttacctgaccatcttcggtcgcgacttgacgcgtcgggacacgcagaaggcgcacatattgaataacctggacaacttcaagcaattcgataaggtttttccagcccttgtggcgggtctgcccattcacatgtttaggacggcacacaatgcccgcgaaaagctagctgaatccctgcggcatgaaaacctgcagaagcgtgagagcatcagcgagctcatctctctccggatgtttctgaacgacaccctctccactttcgacgatctggagaaagccaagacacacctggtggtgctgtgggcatcgcaagcaaatactatcccggccactttctggtctctgttccagatgatccggaatcctgaggcgatgaaagcggccaccgaggaagtaaagcgtaccttagaaaatgcaggccaaaaggttagcttggagggcaacccaatttgtctgagccaggctgagctgaatgatctgcctgttttagattcaattatcaaggagagcctgcgtctgtcctccgcctcccttaacattagaaccgcgaaggaggattttactctgcatctggaggatggtagctacaatatccgcaaagacgacatcatcgcactttatccccaactgatgcacttggaccctgagatctatccggacccgctgacgtttaaatacgaccgttacttggatgaaaatggtaaaaccaaaactacattctattgcaatggtcttaaactgaaatactattacatgccttttggtagcggtgcaacgatctgtccgggtcgtctgttcgcaatacatgaaatcaaacaatttctgatcttaatgctatcctacttcgagcttgagctgattgagggtcaggcgaagtgcccgccactggaccagtcccgggctggtctgggcattctgcctcctttgaatgatattgagtttaaatacaagtttaagcatttg

SEQ ID NO: 15478 - DNA, 1512 bp, Artificial Sequence
  derived and/or modified sequence
atgatgacaacaagtttgatctggggtattgctattgcagcctgttgttgtttgtggctgatattagggattagacggaggcagaccggagaacctccacttgagaatgggttgatcccatacttaggttgtgctcttcagttcggcgccaatccactcgagttcctgagagccaaccagcggaaacacggacacgtgttcacctgcaaactaatggggaagtacgttcattttataaccaacccgctctcataccacaaggttttgtgtcacggcaagtattttgattggaagaaattccacttcgctacatccgccaaagcctttggtcatcgctcaattgatccaatggatggtaacaccaccgagaatataaatgatacattcattaaaactctacaaggtcacgcactgaactctttgaccgagtctatgatggaaaatctccagaggatcatgcgccctcccgtgtcatctaattcaaaaacagccgcttgggtcaccgaggggatgtattcgttttgttaccgggttatgtttgaagctggctacctcaccatcttcgggcgggacctgacaaggagagacactcaaaaggcacatattctaaataacttggacaatttcaagcagttcgacaaggtgttcccggctctagtcgccgggctccccatacatatgtttcgcacagcacacaacgctcgtgagaagttagccgaaagtctgcggcacgagaacctccagaagcgcgagagtatttctgagttgatttcgctgaggatgtttctcaacgatacactgagcacgtttgacgacttggagaaggccaaaacgcacttggtggttctctgggcaagccaagccaatacaatcccagccaccttctggtccctgtttcagatgatcaggaatcctgaagcaatgaaagccgctactgaagaagtgaaacggaccctggagaatgccggacagaaagtgagcctggagggcaatcccatttgtttaagccaagcggagttaaacgacttgcccgtgctggatagcatcattaaggaaagtcttcgtctgtcaagcgctagtcttaacatccgtacagcgaaagaggatttcactttgcacctcgaggatgggagttacaatattcggaaagatgatataattgcactttatccgcagctcatgcacctggaccctgaaatttaccctgacccgttaactttcaaatacgaccggtatctggacgagaatggcaaaactaaaaccacgttttactgtaatgggctgaaattaaagtactactatatgcctttcggctccggcgccacaatttgtccgggtaggctgtttgctatccatgaaatcaaacagttcttgatcttgatgctatcttactttgaacttgagctcatagaaggtcaggctaagtgtccaccattggaccagtcgagagccggacttggcatactgccgcccctgaatgatatcgagttcaagtataaatttaaacattta

SEQ ID NO: 15479 - DNA, 1512 bp, Artificial Sequence
  derived and/or modified sequence
atgatgaccacctcgctcatctggggcatagccattgccgcgtgctgttgtctgtggttgatcctcggcatcagacgacgacagaccggggaaccaccccttgagaacggacttattccctacctcggctgtgccctgcagttcggagcaaacccccttgagtttcttcgtgccaaccagcgcaagcatgggcatgtgttcacctgtaagctcatgggcaagtacgtgcactttatcaccaatcctttgtcataccataaagtgctgtgccacggaaaatactttgattggaaaaagtttcatttcgcaacgagcgcaaaggcattcggacatcggtccattgatccgatggacggcaataccactgaaaacataaacgacacgtttatcaaaacgcttcaggggcacgcactcaactcccttaccgaaagcatgatggagaaccttcaaagaatcatgcggccgccagtgagcagcaattctaagactgcggcctgggtgaccgagggtatgtactcattttgttacagagtgatgttcgaagcgggttaccttacgatttttggcagggaccttacccgccgggatacccaaaaggctcatatccttaacaaccttgacaactttaagcagtttgacaaagtgtttcccgcccttgtcgccggactcccaattcacatgtttagaactgctcataatgcacgcgagaagttggccgaaagcctccggcatgagaatctgcagaagagggaatccataagcgaactgatctcgctgcgcatgtttcttaacgatactctgtcaacctttgatgaccttgaaaaagctaagactcacttggtggtcctctgggcatcgcaagctaacaccatacctgcaaccttttggtcgctttttcaaatgattaggaatccagaggcaatgaaagcagctacggaagaagtgaagcggacccttgaaaacgccggacaaaaagtgtcacttgaaggaaaccctatttgtctttcacaagcagagctgaatgatctgcctgtgttggactcgattatcaaggaatccctgagacttagctccgcatcactcaacattcgtactgcaaaggaagattttactcttcatctggaagatgggtcatacaacatcaggaaggatgacattattgccctctacccccagcttatgcatctggatcctgagatctaccccgacccactgacgttcaaatacgatcgctacctggacgagaacggcaaaaccaagactaccttttactgtaatggtctgaagctgaaatactactacatgcctttcggcagcggcgcgacgatctgtccagggcgcctgtttgcaattcacgagattaaacaattcttgattctcatgctcagctacttcgagctggagctgatagaaggacaagcgaaatgtcctccactcgatcagtccagagcaggacttggtattcttccaccacttaacgatattgaattcaaatacaagtttaaacatctt

SEQ ID NO: 15480 - DNA, 1512 bp, Artificial Sequence
  derived and/or modified sequence
atgatgaccacgtcactgatctggggcatcgctatagcagcatgttgctgcctgtggctgatcctggggatacgccggaggcagactggcgagcccccactggagaacggactgatcccctacctgggatgtgccctccagtttggggccaaccccttggagttcttgagagccaaccagaggaagcacggtcacgtgttcacttgtaagttgatgggcaagtatgtgcacttcatcaccaatccactttcctaccataaagtcctctgccatggcaagtactttgattggaagaaattccactttgctacctctgctaaagctttcggccatagatctatcgaccccatggatgggaatacaacagagaatattaacgatactttcattaaaacactgcagggccatgccttgaactcattgactgagtctatgatggagaaccttcaaaggattatgcggccaccagtctctagcaactccaaaacagctgcctgggtaacagagggcatgtactccttctgctacagggtgatgttcgaagcaggttacctgaccattttcggccgggatctgaccagacgcgatactcagaaggcccatatactcaataacctggacaacttcaagcagtttgataaagtattccccgctctggttgcgggactgccgattcatatgttccgaaccgcccacaatgcacgggagaagcttgctgaatctctccgacatgagaatcttcagaagcgcgagagcatttccgagttgatcagcctcagaatgttcttgaacgacacactctcaaccttcgatgatctcgagaaggcaaagacccatttggtcgtgttgtgggcctcccaagctaacacaattcctgccaccttttggagtcttttccagatgatccgaaatcccgaagccatgaaagccgccactgaagaagtcaagcgaactcttgagaatgcaggacaaaaggtgtccctcgaggggaatcccatctgtttgagtcaggccgaactcaacgacctgcccgtcttggatagcatcatcaaagagagcctgcgcctgagttcagctagtctgaacattcgcaccgccaaagaggacttcacactgcatctggaagacggatcctataacatacgcaaagacgacatcatcgctctctatccccagcttatgcacctggacccagagatctaccctgacccactgacctttaaatatgaccgctacctggatgaaaatggcaagaccaaaacaacgttctattgtaatggtctgaagctgaagtattactatatgcccttcgggtccggagccactatttgcccaggacggctctttgccattcacgagatcaagcagttcttgatactgatgctcagttatttcgaactggaactgattgaagggcaagccaaatgtcctccactggatcagtctcgagccggactgggtatacttccgcctctgaatgacatcgagttcaaatacaaattcaaacatctg

SEQ ID NO: 15481 - DNA, 1512 bp, Artificial Sequence
  derived and/or modified sequence
atgatgactacttcactaatatggggaattgcaattgcagcatgttgttgtttgtggttaattttagggattcgaagaagacaaacaggtgaacctccacttgaaaatggacttattccatatctaggatgcgctttacaatttggagctaatccattagaatttcttagagcaaaccagagaaaacatggacatgtttttacatgtaaacttatgggtaaatatgtacattttattaccaatcctcttagttatcataaagttttatgtcatggaaaatattttgattggaaaaaatttcattttgctacttctgcaaaagcattcggacatagaagtatagatccaatggatggaaatactacagaaaatattaatgatacatttattaaaacacttcaaggtcatgctttaaattcacttacagaatcaatgatggaaaatcttcaaagaattatgagacctccagtatcttcaaatagtaaaacagcagcttgggttactgaaggtatgtattccttttgttatagagttatgtttgaagcaggatatcttacaatttttggaagagatttaacaagaagagatacacagaaggcacatattctcaataatttagataattttaaacaatttgataaagtatttccagcattagttgctggattaccaatacatatgtttagaacagctcataatgctagagaaaaacttgcagaatctttaagacatgaaaatctccaaaaaagagaatctatttcagaacttatttctttaagaatgtttcttaatgatacattgtcaacatttgatgatttagaaaaagcaaaaacacatttagtagtattatgggcatcacaagctaatactattcctgccacattttggagtttatttcaaatgattagaaatccagaagctatgaaggcagctacagaagaagttaaaagaactttagaaaatgctggtcaaaaagttagtcttgaaggaaatcctatttgtctttcacaagcagaattaaatgatcttccagttcttgatagtataattaaagaatctcttaggttaagtagtgcatctttaaatattagaacagctaaagaagactttacattacatttagaagacggaagttataatattagaaaagatgatattattgcactttatccacaattaatgcatcttgatccagaaatctatccagatccacttacttttaaatatgatagatatttagatgaaaatggaaaaacaaaaacaacattctactgtaatggacttaaacttaaatattattatatgccttttggatctggtgcaactatttgtccaggaagattattcgcaattcatgaaattaaacaatttcttattttaatgctttcatactttgaacttgaattgattgaaggacaagcaaagtgtccacctttagatcaatcaagagcaggattaggaattcttccaccacttaatgatatagaatttaagtataagtttaagcatctt

SEQ ID NO: 15482 - DNA, 1512 bp, Artificial Sequence
  derived and/or modified sequence
atgatgactacctcgctgatttggggtattgccattgccgcctgctgttgtctgtggcttattctcggaattcggagacggcagactggtgagccaccccttgaaaatgggctgattccttatttggggtgtgcactgcaatttggcgccaacccactggaattcctccgggcaaaccaacggaaacacggacacgtgtttacttgcaagctgatggggaagtacgtccatttcattactaacccactgtcctaccataaggtgctttgtcacggcaagtactttgactggaaaaagtttcattttgcaaccagcgcaaaggcattcggtcatcggagcattgacccaatggacggcaatacgaccgaaaacatcaacgatacctttatcaagaccctgcaaggacatgcacttaattcgcttacggaatccatgatggaaaaccttcaaagaataatgcgcccccctgtgtcgtcgaattcaaagactgcagcttgggtgacggaagggatgtactctttctgttaccgtgtgatgtttgaagcaggctatctgactatcttcggacgggatctgaccagacgtgatacccagaaggcccatattctgaacaatcttgataactttaaacagttcgataaagtgtttcctgcactcgtcgcaggacttcctatccatatgtttagaactgcccataatgcccgggaaaaacttgctgagtcccttagacatgaaaacctgcagaagagggagtcaatttccgaactcatttccctgagaatgtttctgaatgacactctgagcaccttcgacgatctcgagaaagcaaagactcatttggtggtcctttgggcatcccaagcgaataccatcccagccactttctggtccctctttcaaatgatcaggaatccagaagcgatgaaggcagcaaccgaggaagtgaagcgcaccttggaaaatgcaggccaaaaggtgtcgctcgaaggaaatcccatctgtctttcgcaggcggagctcaacgacttgccagtgctcgattccatcatcaaggaatcccttcggctctcttcagcgtctctgaacataagaactgcaaaagaggacttcactcttcacctggaagatggttcgtacaacatcaggaaagatgacatcattgctctctaccctcaactgatgcatcttgatcctgaaatctaccctgatccactcactttcaagtacgacagatacctcgatgaaaacggtaagacgaaaactaccttctactgtaacggacttaagttgaagtactactacatgcctttcggatccggcgcaactatttgtcctgggagactttttgccatacatgaaatcaaacaatttctgattcttatgcttagctactttgaactggagctcattgagggacaagcaaaatgtccgccgctggatcaatcgcgcgctgggctggggattctgcctccactgaatgatatcgagtttaagtacaagtttaagcacctg

SEQ ID NO: 15483 - DNA, 1512 bp, Artificial Sequence
  derived and/or modified sequence
atgatgaccacatctctgatttggggcatcgcaatcgccgcgtgctgttgtttgtggttgatactgggaattaggcgccgccagacgggtgaaccgccgctggaaaacggtctcatcccctacctcggctgtgccctccagttcggagctaacccactcgagttccttagagcgaaccaaagaaagcatggtcacgtgtttacctgtaaattgatgggcaagtatgttcattttatcaccaatcccctttcttatcacaaggtgctgtgtcacggcaagtatttcgactggaaaaagttccacttcgccacctcagctaaggctttcggacacagaagtatagaccctatggacggaaatactaccgagaacatcaatgacaccttcattaagaccttgcagggccatgctcttaactctttgacagagagtatgatggagaacctgcagcgcataatgaggccacccgtatcttctaattccaaaacagccgcctgggtgacagagggcatgtatagcttctgttacagagtgatgttcgaagcgggctatctgaccattttcggtagggacctgacgaggagggacacccagaaagctcatatcctgaataatttggacaattttaaacagttcgacaaggtgttcccggcgctcgtcgccggcctcccgattcatatgttcaggaccgctcacaatgctagagagaagctggccgaaagtcttagacatgaaaacctgcagaaacgcgagtcaatttccgaactgatctcccttcgcatgttcctgaacgataccctcagcaccttcgatgacttggaaaaggcgaaaactcacctggtagtcctgtgggcctctcaggctaacactataccggcgaccttttggtctctgttccagatgatcagaaacccagaggcgatgaaggccgctacagaagaagtgaagcgcacccttgaaaacgctggacagaaggtttcactggaaggcaacccaatctgccttagtcaggcagaactgaatgacctcccagttttggattctattatcaaagaatcattgagactctcctccgccagcttgaacatccgcaccgccaaggaggacttcacccttcacctcgaagacggtagttataacatcaggaaggacgatataattgccttgtacccacaactcatgcacttggatccagagatttaccctgatccccttacttttaagtacgacaggtacctcgacgagaatggcaagactaagactactttttactgcaacggactcaagctcaaatactactacatgccgttcggttctggagcgactatctgtcctggcagactgtttgccattcacgagatcaagcagtttctgattctcatgctgtcatattttgagctcgaactgatagagggacaggcgaagtgtccaccgcttgaccagtccagggccggtcttggtattttgccacctctgaatgatatcgagttcaaatataagttcaaacacttg

SEQ ID NO: 15484 - DNA, 1512 bp, Artificial Sequence
  derived and/or modified sequence
atgatgacaacgagcttaatttggggtatcgcgatagctgcatgctgttgcctgtggttaatcttgggtatccgtagaagacaaacaggcgagccgccgttagaaaatggtcttatcccgtacctaggatgcgccctccaatttggtgctaatccgcttgaattcttacgcgcgaatcaacgaaaacatggacatgtgttcacgtgtaaattgatgggaaaatacgttcattttatcacaaaccctttatcataccacaaagttctttgccatggaaaatactttgattggaagaaattccattttgcaacatcagcaaaagcgtttggccatcgtagcatcgaccctatggacggtaacacaacagaaaatataaatgatacttttatcaaaacactccaaggacatgccctgaattcccttacagaaagcatgatggaaaacttacagagaattatgcgacctccggtgagctctaacagtaaaaccgctgcgtgggtgaccgaaggaatgtatagcttttgctaccgagttatgttcgaggccggatacttaacaattttcgggcgagatcttacacgccgcgatacccagaaagcccatatcttgaataatcttgacaacttcaaacagtttgacaaagtatttcctgccttggtcgccgggctgccgatccatatgtttcgtacagcgcataacgctagagagaaattagcagaatcactgagacatgaaaatcttcaaaaaagagaatctatttccgaacttatcagcttacgtatgtttcttaatgacactttatctacgtttgatgacctggaaaaagccaagacacacttagtcgtgctttgggcatctcaagctaatacaatcccggctactttttggtccctttttcagatgatccggaatccggaagccatgaaggcggcgactgaagaagtgaagagaacacttgagaatgccggccaaaaagttagcttggagggaaatccaatttgcctttcgcaggcggagctgaatgatttacccgtgctagacagtattatcaaagagtcactccgtctgagtagcgcttctttgaacattcgcactgctaaagaagatttcaccttacacctcgaggatgggtcttataacatccggaaagacgatattatagcactttatcctcaacttatgcaccttgacccggaaatttaccccgatccgttaacgtttaaatatgaccgatacctggatgagaacggcaaaacgaagacgacgttttactgtaatggattaaagctgaagtattattacatgccgtttggcagtggtgcaacgatctgtcccgggcgactttttgctattcatgagatcaaacaatttcttatccttatgcttagttactttgaattagagcttattgagggacaagcgaaatgtccgccactggatcagtctagagccgggctgggaattcttccgcctctgaacgatatcgaatttaaatacaaattcaagcattta

SEQ ID NO: 15485 - DNA, 1512 bp, Artificial Sequence
  derived and/or modified sequence
atgatgaccactagtctaatctggggcatcgctatcgcagcttgctgctgtctgtggctgatactggggatccgacgtaggcaaacaggagagccaccattggagaatgggctcatcccttatcttgggtgtgccctgcaatttggcgccaaccctctggaatttctgagggcgaaccagcggaagcacgggcatgtgtttacttgcaagttaatgggaaagtacgttcactttattacaaatccgctttcctaccataaagttctgtgccacggaaaatacttcgattggaagaagttccattttgctacctctgcaaaggcgtttgggcaccggtcaattgacccaatggacggcaacacgactgagaatatcaatgatacattcattaaaacgctgcaaggccatgcccttaacagtcttacagagtccatgatggagaatctccagagaataatgaggcctccggtctctagtaactcaaagacagcagcctgggtgaccgagggtatgtactcattctgctatcgtgtcatgttcgaagcagggtacctcacaatttttggcagagaccttactagacgagacactcagaaagcacacattctgaataatctggataacttcaagcagtttgataaagtgtttccagccctggtggctggcttgccaattcacatgttccgcaccgctcataatgcccgtgaaaagttagcagaatccttgagacacgagaatctgcagaagcgggagtctatatcagagctcataagcctccgtatgtttctgaacgatacgctctctacctttgatgatctcgagaaggccaagactcaccttgtagtgctgtgggcctcacaagctaatactatacccgctactttctggtcactctttcagatgattaggaacccagaggctatgaaggcagccaccgaggaagttaagcgcacattagaaaacgctggacagaaggtgtccttagagggaaacccgatttgtctgtcccaggctgagcttaacgatctgcctgtgctggatagcatcatcaaagaaagtctaagactgagttcagcgagcctcaacattagaaccgcgaaggaagatttcaccctgcacctggaagacggctcttataatatacggaaagacgacatcatcgcactgtatccccaactcatgcaccttgacccagagatctatcctgatcctctaacatttaagtacgacaggtatttggatgaaaacggcaagaccaagacgaccttttattgtaacggcctaaagctgaaatattattacatgccgtttgggtccggcgccacaatttgccctgggcgcttgttcgctatccatgagattaagcagtttctaattttaatgctaagctattttgaactcgaactgatcgaaggccaggccaagtgccctcctctggatcaatcccgtgctggtttaggaatcctacctccactaaacgacattgagtttaaatataagtttaagcacctg

SEQ ID NO: 15486 - DNA, 1512 bp, Artificial Sequence
  derived and/or modified sequence
atgatgactaccagccttatttgggggattgccatagccgcatgttgttgcctttggttgatcttggggatacgccggcggcaaactggggagccacccttggaaaatgggcttatcccttaccttggatgtgcgttgcagtttggtgcaaaccctttggaattccttagagccaaccagagaaagcatgggcacgtgttcacgtgtaaactcatgggcaagtacgtgcatttcataaccaatcctctgtcctaccataaggtcttgtgtcacggcaagtacttcgattggaaaaagtttcactttgcaacttcagcaaaggcatttggacatcggagtatagaccctatggatggcaataccaccgaaaacattaacgacaccttcatcaagactctgcaaggccatgcacttaatagcctcactgagtcaatgatggagaacctgcagcgaatcatgcggccacccgtcagctcgaactccaagaccgcagcctgggttacggagggaatgtactccttttgttatcgggtgatgttcgaggccggttacctcactatctttgggcgcgacctgaccaggcgggatactcagaaggcacatattctcaacaacctggataacttcaaacaatttgataaggtttttcctgcactggtggcagggcttccaattcacatgtttcgcactgctcataacgcccgtgaaaaacttgctgaaagcctgaggcatgaaaacttgcagaaaagagagtccatttcagaacttatttcgctgcgaatgtttttgaatgataccctttcaacttttgatgacttggagaaagctaagacccacctggtggtgctttgggcaagccaagcaaacaccataccggcaaccttttggtccctttttcagatgattcggaatcctgaagctatgaaggcagcaaccgaagaagtgaagcgtaccctggagaacgcgggacaaaaagtctcacttgaaggcaaccccatttgcctttcgcaggcagaactcaacgacctcccggtgctggattccataatcaaagaatcgctgcgcctgtcgtcggcgtcattgaacattagaaccgccaaggaggactttactctgcatctcgaagatgggtcgtacaacatcaggaaggatgatatcattgccctgtacccacagcttatgcatctggatccggagatctaccctgatcctctcacctttaagtacgatcgatacctggatgagaatggtaagaccaaaaccactttctattgtaatggtcttaaactgaagtactactacatgccctttggcagcggtgcaaccatctgtccaggaagattgtttgccattcatgagataaagcagttccttatactcatgctctcgtatttcgagctcgagcttattgaaggccaagcaaagtgccccccattggatcagtcgagagcaggacttggaatccttcccccactcaatgatattgaattcaagtacaagtttaaacacctg

SEQ ID NO: 15487 - DNA, 1512 bp, Artificial Sequence
  derived and/or modified sequence
atgatgaccaccagcttgatctggggcatcgccattgccgcatgctgttgtctctggctcatacttggaatccggaggaggcagactggagagcctcccctcgaaaacggactgatcccctatttgggatgcgctctccaattcggcgccaaccctctcgagttcctgagagcaaaccaaaggaagcacggccatgtgttcacatgtaaactcatgggcaagtacgtgcactttatcaccaacccgctgtcatatcataaagtgctgtgccatgggaaatatttcgattggaagaagttccatttcgcaacatcagctaaagccttcggacacaggagcatagaccccatggacgggaacacaaccgagaacatcaacgatacatttatcaaaaccctgcaaggacatgcactgaacagtcttacagagtctatgatggaaaaccttcagaggatcatgcgtcccccagttagttctaactcgaagactgcggcatgggtaaccgagggcatgtacagcttttgctatagggtgatgtttgaagccggatacctgacaatcttcggcagggaccttacaagaagagacactcagaaggctcatattctcaacaacctggataacttcaaacagtttgacaaggtctttccggctttggttgccggactgcccatccacatgtttcgcaccgcgcacaacgcccgggagaagctggctgagtctctgcgccatgaaaacctacaaaaaagggaatcaatttccgaactcatttcactgcgaatgttccttaatgatacccttagtacttttgacgatctcgagaaggctaaaacccatctcgtggtattgtgggcttcccaggccaacacaatcccagctaccttctggagtctttttcagatgattcgaaacccggaggctatgaaggctgccacagaagaggtaaagcgcacactcgaaaacgctgggcagaaagtgtctctcgagggaaaccccatctgcctgtcacaggctgaactgaatgatctgcctgtcctggatagcatcatcaaggaaagcctgcgactgtctagcgcaagcctgaacatccgaacagctaaagaggacttcacactacacttggaggacggttcttacaacatcagaaaagatgacatcattgctctgtacccacagttgatgcatctcgacccagaaatctacccagatccactcacttttaaatacgatcgctacctggacgaaaacgggaagacaaagacaaccttctattgcaacggactcaaactgaagtattactacatgccgttcggcagtggagcaactatatgtcccggacgcctgtttgctattcacgaaatcaaacagtttcttatcctgatgttgagttacttcgaactggagctgatcgagggccaggctaaatgtcccccacttgatcaatccagggcaggcctcggaatacttcctcctctgaacgacatcgaatttaagtataagtttaaacatctg

SEQ ID NO: 15488 - DNA, 1512 bp, Artificial Sequence
  derived and/or modified sequence
atgatgactacgtcccttatatggggaatcgccattgccgcttgttgctgtctgtggttgattctcggcatccgacggcgacagacgggtgagccgccgctcgaaaatggattaatcccataccttgggtgcgctctccagttcggcgctaatccattggagttcctccgagcaaaccaacggaagcatggacacgtgtttacatgtaaactcatgggaaaatacgtacattttataacaaacccactctcctatcataaggtactatgtcacggtaaatactttgactggaaaaaattccacttcgctacttcagccaaagcattcggacatcggtcaattgatcccatggatggaaatacaactgagaatatcaatgatacctttattaaaacccttcaaggacatgccctgaatagtcttacggaaagcatgatggagaatctgcaacgaattatgagaccaccagtctcaagtaacagcaaaacagcagcttgggttactgagggaatgtattccttttgttacagagtgatgtttgaagcaggataccttaccattttcggtagagatttgacgaggagagatacacaaaaggctcatatcttgaataatttggataactttaaacagttcgacaaggttttcccagccttggttgcaggcctaccaattcacatgtttaggacagctcataacgctagggagaaacttgcggaatcacttcggcatgaaaacttgcaaaagcgagaatctatctcggagttgatctcactcagaatgtttcttaatgatacactttcaacgtttgatgacctcgagaaggctaagacccatctggtcgtcctctgggctagtcaagctaataccatcccggcaacattttggtctctctttcagatgatccgtaatcccgaggcgatgaaagctgctacggaagaagtgaaacggaccctcgaaaacgccggacaaaaggtgtcccttgaaggaaatcccatttgcctttcacaagcagaacttaacgatctgccggtattggactcgattattaaggagtcattgagactttcttctgcatctcttaacattcgtacagccaaggaggatttcacactccacctcgaagacggaagttataacattcgtaaggatgacattatcgcactgtacccacaattgatgcatttagatccagagatttatccggatccgcttactttcaagtacgatagatatcttgacgagaatggaaaaacgaagactacattctattgcaatgggttgaagctcaaatattattatatgccatttggatccggagctactatatgcccaggacgactatttgccatacatgagattaagcagtttttgattttaatgctgtcgtatttcgaattagaactcatagagggacaagccaaatgtccgccactggatcaaagtagagcaggacttggaattttaccacctttgaatgatattgaatttaaatataaatttaagcatttg

SEQ ID NO: 15489 - DNA, 1512 bp, Artificial Sequence
  derived and/or modified sequence
atgatgaccacctctttgatctggggtattgcgattgcagcttgctgttgcctgtggctcatcctcggcattcgacggcgccagaccggggagcctcctctggaaaatgggctgataccttatctggggtgtgctctgcaattcggggccaacccgcttgagttcctgcgggccaatcagagaaagcatggacatgtgttcacttgtaagcttatgggaaaatatgtccactttattacgaacccgctcagctaccacaaggtactttgccacggcaagtactttgactggaagaaatttcacttcgcaacttcagcaaaggctttcgggcatagaagcatagaccccatggatggaaataccaccgagaatatcaacgatacatttattaagactcttcaagggcatgcactgaatagcctgaccgaaagtatgatggaaaatttgcaaagaataatgagacccccagtctctagtaattcaaagaccgctgcatgggtgaccgagggcatgtactctttctgctatagggtcatgttcgaggccgggtacctgacgatttttggccgagacctgacacgaagagatacccaaaaggcacacattctgaacaatctggataactttaaacagtttgacaaggtttttccagccctcgttgccggactaccaatacacatgtttcggaccgctcataacgcccgggaaaagctggccgagagcctgcggcatgaaaatttgcagaagcgagagtcgattagtgaactaatctcattgcggatgttcctcaatgatactctctctaccttcgacgaccttgagaaggctaaaacacaccttgtggtgctgtgggcctctcaagccaatacgatacccgcaactttttggtctcttttccagatgatacgaaaccctgaggcaatgaaagctgctaccgaagaggtgaagcgaacgctagagaacgccggtcagaaagtgtcgctcgaagggaaccccatctgcctctctcaggccgagttgaacgatttgcctgtcctagacagtatcataaaggagtcgctaaggctctcctctgcttctctcaatatccggacagctaaggaggactttacactgcatctggaagacggttcatataacatccgaaaggacgatatcatcgccctatatccacaactgatgcatcttgatcccgagatctaccctgaccccctcacgtttaaatatgacaggtacctggacgaaaacggcaaaaccaagacgacattttactgtaatgggttaaaactgaagtactactatatgccttttggatctggcgcaaccatctgtccagggagattattcgcgatccacgaaataaaacagtttctgatcctgatgctgtcatacttcgagctggagctgatcgaagggcaggccaaatgcccccctctggaccagagccgtgcagggctgggcatactgccccctttgaacgacatcgagttcaagtacaaattcaaacacctg

SEQ ID NO: 15490 - DNA, 1512 bp, Artificial Sequence
  derived and/or modified sequence
atgatgacgacctccctcatctggggtattgcgatcgccgcctgttgctgcctctggcttatactgggcattcggagacgacaaactggggagccacctctggagaatggcctgatcccatacctcggctgcgctctgcagtttggagccaaccctctcgagttcctgagggccaaccagagaaagcatggccacgtgttcacctgtaagctcatggggaaatacgtgcactttatcaccaaccctttgagctaccacaaagtcctctgccatggcaagtacttcgactggaagaagttccacttcgcaacgtcggcaaaggcttttggtcaccggtccattgatccgatggatgggaacaccaccgaaaacatcaatgacacctttatcaaaactctccaaggacacgccttgaacagcctcactgaatcaatgatggaaaatcttcaaaggatcatgcgcccccctgtgtcctcgaactcaaagaccgcagcttgggtgaccgaagggatgtactcgttctgctatagggtgatgttcgaggctggatacctgactatctttggacgcgaccttacccggcgcgacactcagaaggcacatatcttgaacaacctggacaatttcaagcagttcgataaagtatttccagctctggtcgccggactccctatccatatgtttcggactgcccacaacgccagagagaagttggccgaatcccttcgccatgagaatctgcagaagcgcgagtccatttcggaactgatctcgctgcggatgttcctgaacgataccttgtcgaccttcgacgacttggaaaaggcaaagacccacttggtggttctctgggcgagccaggcgaacacgatcccggccactttctggtccctgttccagatgatcaggaatcctgaagcaatgaaggcggccactgaagaagtcaagcgaacgctggagaacgccggacagaaagtcagcctggaaggtaaccctatctgcctgtcacaagcagaattgaacgatttgccagtcctggactcgattatcaaggaatcgctgcgcctgtctagtgcgtcactcaatatccggaccgccaaagaggatttcaccctgcaccttgaggacggaagttacaatatcagaaaggatgacataatagcgctgtatccccaactcatgcaccttgaccctgaaatctaccctgacccgctcacgttcaagtacgatagatacctggacgaaaatggaaaaaccaagactactttctactgtaacgggctgaaactgaagtactattacatgccgtttggaagcggggcgaccatctgccctgggagactgttcgctattcatgagattaaacagtttctcatcctgatgctgtcctacttcgagcttgagctgatcgagggacaggctaagtgcccgcccctggatcaatccagagccggcctcggcatcctcccaccattgaatgatatcgaattcaagtacaaattcaaacatctg

SEQ ID NO: 15491 - DNA, 1512 bp, Artificial Sequence
  derived and/or modified sequence
atgatgactaccagcctcatctggggtattgccattgcggcgtgctgttgtttatggctcattctggggatccggaggagacaaactggtgagcccccgctcgaaaacggcctgatcccctaccttggatgtgccctgcagtttggagcaaacccccttgaatttctgcgggcgaatcaacggaagcatggccacgtgtttacctgtaaattgatgggcaaatatgtgcatttcataacgaatcccctgagctaccacaaagtactctgtcacggtaagtattttgattggaaaaagttccactttgccacctctgccaaggctttcggccacagatctatagatccaatggacggcaacacgaccgagaatatcaacgacacctttatcaaaacactccaggggcatgcgctgaactccctgacggaatccatgatggagaatttacaaagaatcatgcgccccccagtgtctagcaactctaagaccgctgcttgggtcaccgaggggatgtattccttttgttacagagtgatgtttgaggccggctatcttacaatcttcggacgtgatctgacaaggcgggatacccagaaggctcacatacttaacaacctggacaactttaaacagtttgacaaagttttcccggccttggtggcaggactccccattcatatgttccggactgcccataatgcccgcgaaaaactagcggagagtttgcgtcacgaaaacttgcagaagcgcgaatccatctctgaactcatctctctgcggatgtttctgaacgataccctgtccacattcgacgatttggagaaagctaagacccatttggtggtcctctgggcgagccaggcaaacacaattccagctactttttggagtctgttccaaatgatccggaaccccgaggccatgaaagctgcaacagaggaagtgaaaagaaccctggaaaacgcaggccaaaaggtgtccctggaaggtaacccaatatgcctgagccaagccgagctaaacgacctccctgttcttgactctatcatcaaggaatcactgcggctgtcctcagcatccctgaacattcgaaccgctaaagaggactttactctacatctggaggacggctcatacaacatccgcaaagatgacataattgctctgtatccccaactgatgcatttggatcccgagatctaccctgatcctctgacctttaagtatgacaggtacctagatgagaatggaaagaccaagactaccttctattgtaacggcttgaaactgaaatactattacatgccttttggaagtggtgccactatttgtcctggccggctatttgctatccatgaaattaagcagttcctaatactgatgctatcttacttcgagttggaactcattgaggggcaagcaaaatgccctcccttagaccaatccagagccgggttgggaattctgcctcctctcaacgacattgaattcaaatacaagttcaagcatctc

SEQ ID NO: 15492 - DNA, 1512 bp, Artificial Sequence
  derived and/or modified sequence
atgatgacaacttctcttatatgggggatcgccattgccgcctgctgttgtctttggctcattttgggcatccgcagaagacagaccggggaacctcccctcgagaatggcctgatcccatatctgggctgtgctctgcaattcggcgccaaccctctggaattcctgcgagccaatcagcgaaagcacggacatgtgtttacctgcaagcttatgggcaagtatgttcactttataactaaccccctgagttaccacaaggtgctgtgccatggcaaatactttgattggaaaaagttccactttgccacttctgcaaaggcatttggacacagaagcatcgatcctatggacggcaatactaccgagaacatcaatgatacatttatcaagactttgcagggtcacgcacttaactcattgacggaaagcatgatggaaaatctccaacggattatgcgaccgccggtctcctcaaactcaaagaccgcagcatgggtgacagaaggaatgtactccttctgctatcgggtgatgttcgaagcagggtacctcacgatttttggcagggatctcacgaggagagacactcagaaagcccatattttgaacaatcttgataacttcaaacagtttgataaagtttttcctgcattggtagcaggccttcccatacatatgttcagaacagcccacaacgctcgagaaaaattggctgaatctctgagacatgagaatctgcaaaagcgcgagtccatctccgagcttatatctctgagaatgtttctcaacgacacactgtccacctttgatgatctggagaaagccaaaacccatctggtcgtcctttgggcctcccaggctaacactattccagccacattttggtcattgttccagatgatccggaatccagaagctatgaaggccgcaacagaagaggtgaagcgcacgctcgagaacgccggccagaaggtgtccctggaaggcaaccccatttgcctgtcacaagctgagctcaacgacctgcctgtgttggatagtattataaaggagtccctgcgcctgagctctgccagtctgaatatccggactgccaaggaagatttcaccctgcacctggaggacggcagttataatattcgaaaagacgatatcatcgcgttgtacccccagctcatgcacttggatccagaaatttacccggacccccttacattcaagtacgatagatatctcgacgaaaacggtaaaacaaagaccaccttctattgcaatggcctgaagctgaagtactactacatgccttttggaagcggtgctactatttgtccaggtagactgtttgccatccacgaaattaagcagttcttgatcttgatgctgagctatttcgagctcgagctcattgaagggcaggcaaagtgtcctcccctggaccagtctagggctggacttggtatcctgccgcctttgaacgatatcgaattcaaatacaagttcaagcatctt

SEQ ID NO: 15493 - DNA, 1512 bp, Artificial Sequence
  derived and/or modified sequence
atgatgacaacatctttgatttggggcattgccatcgcagcctgttgctgcctgtggctcattctggggatcaggagaaggcagacaggagagccacccctagagaatggtctgattccctatctgggctgcgcgctgcagtttggagcaaatcctctagagttcctgcgcgccaaccagaggaagcacggacatgtatttacctgtaaactgatgggaaagtatgtgcactttatcacgaacccgctcagttatcataaggtattatgccatggaaagtatttcgattggaagaaattccactttgctacgtcagctaaggcattcggacacagaagtatcgaccctatggatggtaatactaccgagaacatcaacgatacatttattaagaccctgcagggacatgccctgaacagtctgacagagagtatgatggagaacttgcagcgaattatgcgaccacctgtgtctagcaactctaagaccgctgcttgggtgactgagggcatgtattcattctgctaccgagtcatgttcgaagcaggataccttactatattcggtagagacctgacacgacgcgatacccagaaagcgcatatattgaacaatctcgataacttcaagcaatttgacaaggtcttcccagccttggttgcaggactgccgattcacatgttcagaacggcacacaatgccagagagaagttggcagaaagtctgagacatgagaacctacaaaaaagagagagcatatctgagctaatctctctgcgtatgtttctgaatgatacacttagcacatttgatgacttggagaaagccaaaacccatcttgtcgtgctgtgggcgtcgcaggcaaacaccatccccgccaccttctggtcgctgtttcaaatgattaggaatccggaggccatgaaggccgcgaccgaagaagttaagcggactctggaaaatgcgggtcagaaagtcagcctcgaaggtaatcccatctgcttaagccaggcagagcttaatgacttgcctgtcttggactccattattaaagagagtctacgactcagctcagccagccttaatattagaacagccaaggaggacttcaccctccatctggaggatggaagttataacatcagaaaggacgatatcatcgcattgtacccgcagctgatgcacctggatcctgagatctaccccgatcccctgaccttcaaatatgaccgctaccttgacgaaaatggcaaaacaaagaccactttctactgcaacggactgaagctgaaatactactacatgccattcggaagtggagccacgatatgccccggtaggttattcgcaattcacgaaatcaagcagtttttgattctgatgttgagttattttgagttggagttgatcgaaggccaggctaagtgtccacccctagaccagtcgagggcgggtctcgggatactgcctccactcaatgacatagaattcaagtataaatttaaacatctg

SEQ ID NO: 15494 - DNA, 1512 bp, Artificial Sequence
  derived and/or modified sequence
atgatgaccacctccctgatttggggcattgcgattgccgcgtgctgttgcctttggcttatccttggtatccgtcgaaggcaaaccggggaaccgccccttgaaaatggacttatcccatacctgggttgtgctcttcagtttggtgcaaacccccttgaatttcttcgagcaaatcaaagaaagcacggtcacgttttcacttgtaaactgatgggcaagtacgtgcatttcattacgaaccccctttcctaccataaagtgctttgccatggaaagtactttgactggaagaagtttcattttgctacttccgccaaggcattcggacaccgatctattgaccctatggatggcaatacgaccgaaaacataaacgacacttttatcaaaactctgcaaggccatgcactgaattcgctgaccgagagcatgatggaaaatctccaacgtatcatgcgaccacccgtgtcctctaacagcaagaccgctgcatgggtgaccgaaggaatgtattccttttgttacagagtgatgtttgaagccggttacttgacgatctttgggagagatctgacccgacgcgatactcaaaaggcgcatattctgaacaatcttgacaatttcaagcaatttgataaggtgtttccagctttggtggccggcttgccaatccatatgttcaggaccgcgcacaacgcacgggaaaaacttgccgagtcgttgcgccacgaaaacttgcagaagcgggaaagcatatccgagcttatctcgttgagaatgtttcttaacgatactctgtcgacttttgatgatctggagaaggcaaagacccatctggtggtgctgtgggcctcgcaagcaaatactataccggcaaccttctggagcctttttcagatgatccgaaatcctgaagccatgaaagccgcaactgaagaagtcaaaagaactttggaaaacgcgggccaaaaggtgtccctcgaaggaaatcccatatgtctttcgcaggctgagctgaatgaccttcctgtgcttgactcaattatcaaggaaagccttcggctttcctcagcaagcctgaacatccgcaccgcaaaggaggattttacccttcacctcgaagatggatcatacaacatcaggaaggacgatatcattgcgctgtaccctcagctgatgcatctcgatccagagatatatcctgatcccctcacttttaagtacgaccgttatcttgacgagaatggcaagaccaagaccacgttttactgtaatggactgaagttgaagtactactatatgccattcggatcgggtgcaaccatttgtccaggtagactctttgccatacacgagatcaaacaattccttattctgatgcttagctactttgagctcgaattgatcgaaggtcaggctaaatgccctccgctcgatcaatcaagagccggcctcggtatcctgccaccactgaacgatatcgaattcaagtacaaattcaagcacctc

SEQ ID NO: 15495 - DNA, 1512 bp, Artificial Sequence
  derived and/or modified sequence
atgatgactaccagtctaatctggggaatcgccattgctgcgtgctgctgtctgtggctcatactgggaatacgcagacgccaaaccggggaacctcctctagaaaatggcctgatcccctatctcggttgcgccctgcagtttggagccaatcccctcgagtttctgagggccaaccaaagaaagcatggacatgtctttacttgtaaactgatggggaagtatgtgcactttatcaccaaccccctgtcctaccacaaagttctgtgtcatggtaagtacttcgactggaagaaatttcattttgcgacctcagctaaagccttcgggcatagaagcatcgatcctatggatgggaacactacagaaaatattaacgacacattcatcaaaactctccagggccacgctctcaactctttgacagagtccatgatggagaacctccagcggataatgcgtcctccggtcagttcaaacagtaagacggctgcatgggtgacggagggtatgtactccttctgctatcgagtcatgttcgaagctggatacttgacaattttcggtcgagacctgactcgaagggacactcagaaagctcacattctcaacaacctcgataacttcaaacagtttgacaaagttttccctgccctggtagctggattacctattcacatgttccgaaccgcgcataatgcccgagaaaagctggcagaatcactacgacatgagaatctacagaaacgagaatctatatctgagctgattagcctgcgaatgttccttaatgataccctgtccacattcgatgacttggagaaagccaagacccatctggtcgtcctatgggcttcccaggcaaatacgattcccgcgaccttttggtctctgtttcagatgatacgaaatccagaggcaatgaaagcagcgaccgaagaagtcaagaggaccctggagaacgcaggtcagaaagtcagccttgaaggcaacccaatttgcctcagccaggctgagctcaacgatctgccagtgttggacagtatcattaaggagtctttgaggttgagctccgcctcgctcaatatcaggacggctaaggaagattttacgctccatctcgaagacggaagctacaatatcaggaaggacgacataatcgctctgtacccccaactgatgcacctggatcccgagatatatccagatccattgacttttaagtacgataggtatttggatgaaaatggtaaaaccaagaccaccttctactgcaatgggctgaagctgaagtactactacatgccattcggcagtggcgccaccatctgtcccggaagactgtttgccatccatgaaatcaagcagttccttatcctgatgctgtcctacttcgaactggagttaattgagggtcaggccaagtgtcctcccctcgatcagtcccgagctgggttgggcatcctcccccccttaaacgatatagagtttaagtacaagttcaaacacctc

SEQ ID NO: 15496 - DNA, 1512 bp, Artificial Sequence
  derived and/or modified sequence
atgatgacaaccagcctgatctgggggatcgcgatagccgcatgttgctgcttgtggctgattctgggtattcggcgccgacagactggtgagccaccactggaaaatgggctcatcccgtatttaggctgtgccctgcagttcggcgctaaccctctggagttcttaagagcaaatcagagaaaacacggccatgtgtttacttgcaagctgatgggtaagtatgtccattttatcaccaacccgttatcttaccacaaggttctctgccatggtaagtatttcgattggaagaagtttcatttcgctacatctgccaaagcgttcggccatcggagcattgatccaatggacggtaatactacagagaacataaatgatactttcatcaaaacactccaagggcacgcccttaactctttaacggaaagcatgatggaaaacttgcagcgaatcatgcgtcctcctgtcagcagtaattctaaaaccgcggcttgggtgacagagggaatgtactctttctgctatcgggtgatgttcgaggccggttatcttaccattttcggtcgtgacctgacaaggagagacacccagaaggcccatatcctcaataatctggataactttaagcagtttgataaagtatttcctgcactggtggccggcttgcctatccacatgtttagaaccgctcacaacgcacgcgagaaacttgccgaatcactcaggcacgagaacttacagaagcgcgaatcgatcagtgagctcatctccttgaggatgtttctgaacgacaccctgagcacattcgacgatctggagaaagccaagactcatctggtggtactgtgggcttcgcaggctaatacaattcccgccacgttttggtccctgtttcagatgattcgaaaccctgaagctatgaaagccgcgacagaggaagtgaagaggacactagaaaacgctggtcagaaggtgtcgctcgaggggaacccaatctgcctctcacaggcagagttaaatgacctcccagttctggatagtatcatcaaggagagtttgagactgtcttctgcttctctaaatatccggacggctaaagaggacttcacgcttcacttagaggatggttcgtacaatattcgtaaagatgatatcatcgcactttatccccaacttatgcacctggacccagagatctatcctgatcctcttacattcaagtatgaccgctaccttgacgagaatgggaagaccaaaacgactttttactgtaacggtctgaaactgaaatactattacatgccctttggctcaggtgcgacaatatgccccggcaggttgttcgccatccatgagatcaaacaattccttattctgatgctgtcctatttcgagctggagttgattgaaggtcaggctaaatgcccgcctctggaccagagcagagcaggattaggtatactccctccattgaacgacatagaattcaagtataaatttaaacatctg

SEQ ID NO: 15497 - DNA, 1512 bp, Artificial Sequence
  derived and/or modified sequence
atgatgaccacttctctcatctgggggatcgcaatcgccgcttgttgctgcttgtggctcattctgggaatccgccgacgccagaccggcgagccgccgcttgagaatggtctgatcccatacctgggctgcgctcttcagttcggagcaaacccgctggagttcctgcgcgcgaaccaaagaaagcatggtcacgtgttcacttgcaaactcatgggaaagtacgtgcacttcatcactaacccgctctcgtaccacaaggtgctctgtcatggaaagtacttcgattggaagaagttccacttcgctacgtctgccaaagcgttcggacatcgcagcatcgacccgatggacggaaatactaccgagaacattaacgacactttcatcaagaccctgcaaggacatgctctgaactcgctgaccgaatctatgatggaaaacttgcagcggatcatgcggccgcccgtttcgtcgaattcaaaaaccgccgcgtgggtgaccgagggaatgtattcgttctgctaccgggtcatgttcgaagctggatacctgactatcttcggacgtgacctgacccgcagagatacccagaaggcccacatcctgaacaatcttgacaacttcaagcagttcgataaggtgttcccagccctcgtggctggcctgccaattcacatgtttcggaccgcacataatgctcgcgagaagctggccgagagcctgagacatgaaaaccttcagaagagggaaagcatctccgaactgatcagcctgcggatgttcctgaacgacacgctgagtacctttgatgacctggaaaaggcaaaaacccatttggtcgtgctgtgggcatcccaggccaacaccatcccggctaccttctggtccctcttccaaatgattaggaatccagaagcgatgaaggcagccactgaagaggtgaaaagaaccctggaaaacgcaggacaaaaggtgagcttggaagggaatcccatctgcttgagccaggcagaactgaatgatctccctgtgctcgactccatcattaaagagtccctgagacttagctcagcgagcctgaatatcaggacggctaaggaggatttcacgttgcaccttgaagacggcagctacaacatccgaaaggacgacatcattgcactgtacccacagctcatgcacctggatcctgaaatctacccagacccactgaccttcaaatacgaccgctacctggacgagaacggcaaaaccaagaccaccttctactgcaatggactcaagctcaagtattactacatgccattcggatccggtgcgaccatctgccccggtagacttttcgctattcatgagatcaagcagttcctgatcctcatgctgtcgtacttcgaactcgagctcatcgagggacaggccaaatgcccacctctcgaccagtcacgggccggcctgggtatcctgcccccgctcaatgatatcgagtttaagtacaagtttaagcatctg

SEQ ID NO: 15498 - DNA, 1512 bp, Artificial Sequence
  derived and/or modified sequence
atgatgacaacatcactgatctggggcatcgcaatcgctgcctgctgttgcctctggttgatacttggtatccgccggcgccaaactggggagccacccctagagaatggattgatcccttacctgggctgcgctttgcaatttggggctaaccccttggagttcttgagagcaaaccagagaaagcacgggcacgtgttcacatgcaagctgatgggcaaatatgttcatttcataaccaatcctctttcctaccacaaggtgctgtgtcatgggaagtattttgattggaagaagttccatttcgccactagtgccaaggcctttggccataggtccatcgatcccatggacgggaataccacagagaacattaatgacacctttatcaaaacactgcaagggcacgccctgaatagcctgaccgaaagcatgatggagaacctccagagaattatgcggccccccgtgtcttccaattctaaaacagctgcatgggtgaccgaaggaatgtactctttctgttacagggtaatgtttgaggccggctacctaactatcttcggacgggacctgacccgcagagacacccagaaagcccacatccttaataacctggataactttaaacagttcgacaaggtgttccctgcactcgtggcgggcctgcctattcacatgtttcgcaccgctcataacgcccgcgagaaattggccgagtctctcagacatgaaaacctgcaaaagcgcgagtcaatatctgaacttatcagcctgcggatgttcctgaacgataccctgagcacctttgatgacttagagaaggccaagacacacctggttgtgttgtgggctagccaggctaacacgattccggccaccttttggtcactgttccaaatgatccgcaatcctgaggctatgaaggcggccacagaggaggtgaagcgaacgctggagaatgctggccagaaagtttcgctggaagggaatcctatttgcctgtcccaggctgagctgaatgacctcccagtcctggactcaattatcaaggagtccctacgactgtcatccgcatcactaaatatccggaccgctaaagaggatttcactctgcacctggaagatggctcctacaacattcggaaagacgatataattgccttatatcctcagctgatgcatttggaccctgaaatctatccagatccactgacctttaagtacgaccgttaccttgacgaaaatggaaagactaagaccacattttactgtaacgggttgaagctgaagtactactacatgcctttcgggagcggcgcgacaatctgtcctggacgtctgttcgccatacacgaaataaagcaattcctgattctgatgttgagctacttcgagttggagctgatcgaaggccaggccaagtgtcctcccctggatcagtccagagcagggctcggcattcttccacctttgaatgacattgaattcaaatataaattcaagcatctg

SEQ ID NO: 15499 - DNA, 1512 bp, Artificial Sequence
  derived and/or modified sequence
atgatgaccacttcgcttatttggggaattgcgattgccgcatgttgctgcctgtggctgatcttaggaattaggcgccggcagacgggtgagccccccctggaaaatggcctcatcccatacctgggatgcgcacttcagtttggtgcgaatccgcttgagttcctccgggcaaatcagcgtaaacatgggcatgtgttcacctgcaagctgatgggtaaatacgtgcactttattactaaccccctctcataccacaaggtgctctgccacggcaagtatttcgattggaaaaaattccacttcgctacctcagcaaaagcctttgggcatcgctccatcgaccctatggatggcaatactactgagaacatcaatgacaccttcataaagaccctccagggccacgccctgaactccttgaccgaatcgatgatggagaacctgcagcgcatcatgcgtccccctgtctccagcaattctaagactgccgcctgggtgaccgaaggaatgtacagtttttgctatcgagtgatgtttgaggcaggctacttgaccattttcggccgcgacctgacccggagggacacacaaaaggcccacatcctgaacaaccttgacaatttcaagcagttcgacaaagtgttcccagctcttgtggccggtctcccaatccacatgtttcgaacagcccacaacgcgagggaaaaactcgccgaatccttacggcatgagaatcttcagaaaagagagagcatttcagaactaatttcattgaggatgttcctgaacgatacgctctccacctttgacgacttggaaaaagcaaaaacccatctcgtggtgctttgggcatcacaagccaataccattcctgccaccttctggtctctgttccagatgatcagaaatcccgaggctatgaaggctgccacggaggaggtaaagcgcactttggaaaacgccggacagaaagtgtcactcgaagggaaccccatttgtctgagccaagcggagcttaacgacttgcctgttctggattccattatcaaagaaagtttgcggctttccagcgcgagcttaaacatcagaaccgcgaaggaggatttcactctgcatctggaagatggcagttacaacatccggaaagacgacataattgcattgtacccccagttgatgcacctggatcccgagatctaccctgatcccctcacattcaagtacgaccgctacctcgacgaaaatggcaaaaccaaaaccaccttttattgcaatggcctgaagctgaagtactactacatgccgttcgggagcggcgcaacgatatgcccaggcagactttttgccattcacgaaatcaagcaattccttattctgatgctgagctacttcgaattggaactcatcgagggccaagcgaaatgcccgccgctagaccagagccgcgctgggctcggaatcctccctccgttgaacgacattgaatttaagtataagttcaagcacctt

SEQ ID NO: 15500 - DNA, 1512 bp, Artificial Sequence
  derived and/or modified sequence
atgatgaccacgtcactcatttggggaatcgctatcgcggcatgctgttgtctgtggctcatcctgggaattcgcaggcggcaaaccggcgagccgcccctcgagaatgggctgatcccttacctcggatgcgccctccaattcggagcaaaccctctcgagttcctcagagctaaccagagaaagcacggccatgtgttcacctgcaaacttatgggaaaatacgttcatttcatcacgaatccactctcataccacaaggtcctgtgccacggaaaatactttgactggaagaagttccatttcgctacctcggctaaggcattcggacacagatccatcgacccgatggacgggaatactaccgaaaacatcaatgacaccttcatcaagaccctgcagggacacgccctgaacagcctgacggagtcaatgatggaaaacctccagcggatcatgcgcccgccggtgtcgtccaattcaaagaccgccgcctgggtgaccgaggggatgtactccttctgttaccgggtgatgttcgaagccggttatctgactatcttcggaagggacctgactaggagagacactcaaaaagctcatatccttaacaacctcgataactttaagcagttcgataaggttttcccggcactcgtggcgggactgccgatccatatgttccggaccgcccacaacgcaagggaaaagctggcggaatccttgagacacgagaatctccagaagcgggagtcaatctcggagctgatctccctgcgcatgttcctgaatgacacgctgagcaccttcgatgacctggagaaagccaagacccacctcgtggtgctgtgggcgtcgcaagctaataccattccggctaccttctggagcctgttccagatgatcaggaacccggaagcgatgaaggccgccactgaagaagtcaaacgcactctggagaatgctggacaaaaggtgtcactcgaaggcaacccgatctgcctctcccaggcagaacttaatgatctcccggtgcttgactcgattatcaaagaaagcctgagactttcgtcagccagtttgaacatcagaaccgccaaggaggactttactcttcatttggaggacggatcttacaacattcgaaaggacgacattatcgccctgtaccctcagcttatgcatctcgacccggaaatctacccggacccgttgaccttcaaatatgatcggtacttggatgaaaatggtaagactaagacgacgttctactgcaatgggctgaagctgaagtactactacatgcctttcggctccggcgccactatctgcccaggccggctgtttgccattcatgaaatcaaacagttcctgatcttgatgctgtcgtacttcgagctcgagctgattgaggggcaggctaaatgtccgccgctcgaccagtcaagagctggactggggatcctcccaccactcaatgatatcgagttcaagtataagtttaaacatctc

SEQ ID NO: 15501 - DNA, 1512 bp, Artificial Sequence
  derived and/or modified sequence
atgatgaccacctctcttatttggggcatcgcaattgcagcctgttgttgcctctggctgatcctgggtataaggcgaagacagaccggagaaccacctctcgaaaatggccttatcccctacctgggctgcgccctgcagtttggcgctaatcctcttgaatttctgcgagctaaccaaaggaagcacggacacgtgtttacttgcaagctgatgggcaagtatgtgcacttcatcaccaacccactaagctaccacaaagtcctgtgccacggaaagtactttgactggaaaaagtttcacttcgccacgtcagcgaaggctttcggtcaccggagcatcgacccaatggacggcaataccacagaaaacatcaatgataccttcatcaagacccttcagggccatgccttaaactcgttgacggagtccatgatggagaacctgcagcggatcatgaggcccccagtcagctctaactcgaaaacagcagcctgggtcaccgagggcatgtatagcttttgttatcgagtcatgtttgaagctggatatttaacgatcttcgggagagatctgacacgcagggatactcagaaagcccacatcctcaacaacctggataacttcaagcagttcgacaaggtgtttccagccctcgtcgccgggctacccatccatatgtttagaacagcccataacgctcgagagaagctcgcggaaagcctgagacacgagaatctgcagaagcgcgagagcatatccgaactcattagcctaagaatgttccttaacgatactctgagtacctttgatgatctcgagaaagctaagactcacctcgtggtgctgtgggcctctcaggcaaataccatccccgctacattttggtcactcttccagatgataaggaacccagaggcaatgaaggctgcgaccgaagaggtgaagagaacactggagaatgccggccagaaagtgtccctggaggggaacccaatttgtctgtcacaggcagaactgaatgacttacccgtgcttgactctatcatcaaagaatccctgcggctgtcctcggcctcactcaatatcaggacagcaaaagaggatttcacactccacttggaggacggcagctataacatccgaaaagatgatatcatcgcactgtacccacagctgatgcatcttgatcccgaaatctacccggatccactcacctttaaatatgaccgatacctggatgaaaatggaaaaacgaagactaccttctattgcaatgggttgaaactgaagtattactatatgccctttggcagtggagcaaccatttgcccagggcgcctctttgctatacacgagattaagcagtttcttatcttaatgctgagctatttcgaactcgagctgatcgaaggccaggccaaatgcccacccttagaccagtcccgcgctggattggggatcctgccccccctgaatgacattgagtttaagtacaagtttaaacatctg

SEQ ID NO: 15502 - DNA, 1512 bp, Artificial Sequence
  derived and/or modified sequence
atgatgactacgtctttaatttggggtatcgccatcgctgcctgctgttgcttgtggcttattctgggaataaggcgtcggcagactggggagcctccattggaaaatggattgattccatacttaggatgcgcgctgcaatttggtgccaaccctctggaatttctgcgcgccaatcagagaaagcatggacacgtttttacgtgtaagctgatggggaaatatgtgcactttatcacgaatccactatcttaccacaaggtgctatgtcatggcaagtattttgactggaaaaagtttcacttcgcaacctctgccaaggcttttggccaccgaagcatcgaccccatggacggcaatacaacagagaatatcaacgacacttttattaagaccctccaaggacacgctctgaactccttgacggagtccatgatggaaaacttgcaacgcatcatgcggcctccagtttcttctaactccaagaccgcagcctgggtcaccgagggcatgtactccttttgttatcgagttatgtttgaggccggatacctgacaattttcggcagggatttaacacggagggacacacagaaagcacacatcctgaacaatctggataacttcaagcagttcgacaaggtgtttccagcgctggtggccggactgcccatccatatgtttcgcaccgcgcataatgcacgggagaaactagccgaaagcctgaggcacgagaacctgcagaaaagggaatcaatctcggaacttatctccctgaggatgttcctgaatgacacccttagcacgttcgacgatctggagaaggccaagacccacctggtggtactgtgggcaagccaggccaatacaatccctgctacattttggagcctgtttcaaatgatcagaaaccctgaagcgatgaaagctgctaccgaggaggtgaaacggaccctcgaaaacgcgggccagaaagtgtctctggaaggtaacccaatctgcctctcgcaagccgagttaaacgacctcccagtactggactcgataattaaggaatcgcttcgcttaagttccgcgtctctgaacatcaggacagcaaaagaggatttcacgcttcacttggaagacgggtcgtataatatacggaaggacgatatcatcgcgctgtacccacagttaatgcatttagaccccgagatatacccagatcctctaaccttcaagtacgaccgctatttggacgagaacggtaaaactaagacgactttttactgtaacggcctgaagctgaagtactattacatgccattcggatctggtgcaacaatctgtcccgggagattatttgcaatccacgagataaagcaatttcttattctgatgctcagttactttgaactggaactgatcgagggccaggctaagtgtcccccactagatcaatcaagggccggacttggtattttgcctccattgaacgacattgaattcaagtataaatttaagcacctg

SEQ ID NO: 15503 - DNA, 1512 bp, Artificial Sequence
  derived and/or modified sequence
atgatgactacctcgcttatctgggggatcgctatcgccgcctgctgctgcttgtggctgatccttggaatccggcgccggcagaccggggagcctccgcttgagaacggactcatcccgtacttgggatgcgcgctccagttcggagcgaacccgcttgagtttctgcgggccaaccagcgaaagcatggacacgtattcacctgtaagctgatgggtaagtacgtgcacttcatcactaacccgctgtcctaccacaaggtgctctgtcacggaaagtacttcgactggaaaaagtttcattttgctacttcggctaaggcgtttggtcaccgttccatcgacccaatggacggaaacactactgagaatatcaatgataccttcatcaaaaccctccagggacatgccctgaactctctgaccgagtccatgatggaaaacttgcaaagaatcatgcgcccgcccgtgtcgtcgaattccaagaccgcagcgtgggttaccgagggaatgtactcgttctgctaccgggtgatgtttgaagcgggctaccttacgatcttcggcagagatctgaccaggcgggacactcaaaaggcccacatcctcaacaatttggacaacttcaagcagttcgacaaggtgttcccagcactggtggccggcctgccaatccacatgttcagaacggcacacaacgcgcgggagaaactcgcggaatcgttgcgccacgaaaatctccagaagcgggaatcgatctccgagctgatcagcctgcgaatgttcctgaatgacaccttgagcacctttgatgacctcgaaaaggccaaaactcatctggtcgtgctttgggcatcgcaggccaacaccattccagccaccttttggagcttgtttcagatgatcagaaatccggaggctatgaaggccgctactgaagaggtgaaacgcactttggagaatgcaggacaaaaagtgtccctggaaggcaacccaatttgcctctcgcaggccgaactgaacgatctgccagtgctcgatagcatcatcaaagaatcacttaggctgagctcggcgtcgctcaacatccgcaccgcaaaggaagattttaccttgcacctggaggacgggtcatacaatattcgcaaggacgacatcatcgccctgtatccacagctcatgcatctggaccctgagatttacccagatccattgaccttcaagtacgaccggtacctggatgaaaacggaaagaccaagacgaccttctactgcaatggcctcaagctgaagtactactacatgccgttcggatcaggcgcgactatctgtccaggaaggctcttcgccatccatgagatcaagcagttcctcatcctcatgctttcgtacttcgaactcgaactgatcgagggccaggccaagtgcccgccgctggaccaatcaagagcaggcctcgggatcctgcctccgctgaatgatatcgagttcaagtacaagttcaaacatctg

SEQ ID NO: 15504 - DNA, 1512 bp, Artificial Sequence
  derived and/or modified sequence
atgatgacaaccagtctcatttggggtatcgccattgcagcgtgttgttgtctatggctgatactgggaatacggagacgtcagaccggcgagccgccgctggagaacggcctgataccctatttaggatgcgccctgcaatttggtgctaatccgctagaatttctgcgcgccaaccagcgcaagcatggacacgtgtttacctgcaagctaatgggaaagtatgttcacttcatcaccaatccactgagctaccacaaagttctgtgccatggcaagtacttcgattggaagaaattccatttcgctacttccgctaaggccttcgggcatcgcagcatagatccgatggatggcaataccaccgagaacatcaacgatacgttcatcaagaccctgcagggtcatgcccttaacagtctgactgagtcgatgatggaaaacttgcagcgcataatgagaccgcccgtgtccagtaacagtaagaccgccgcttgggttacggaaggcatgtacagtttctgttaccgcgtcatgttcgaggcgggatatctgacgatattcggaagggatcttaccaggcgagatacgcagaaggctcacatactaaacaatctggacaatttcaagcaattcgataaggtgtttccggccctcgttgctggcctgccaatccacatgttccgcaccgcccataatgccagagagaagctggcagagtcccttcgacatgagaatttgcaaaagcgagaatccatttcggagctgatttcgctacgaatgttcttgaacgatacgttgagtactttcgacgatttggaaaaagccaagacgcacttggtcgtcctgtgggctagccaggcgaacacaatccccgcaactttctggagtctcttccagatgatcaggaacccggaagccatgaaggccgccaccgaggaggtgaaacgaactttggagaatgccggtcagaaggtctcccttgagggaaatccaatatgtctgtcgcaagccgagctcaacgacttgcccgttctggattctattatcaaagagtctttacgtttgagcagcgcgtccctgaacattcggacggccaaagaggactttaccttacacttggaggatggctcctataacattcgaaaagacgatataattgcgctgtacccacagctgatgcatctcgacccggaaatatatcccgatccacttactttcaaatacgacagatatctggatgaaaatggaaagaccaaaacgacattctattgtaacggcctcaagctgaagtactactatatgccgttcggcagcggcgctaccatctgccccggtcgattgtttgcaattcatgagataaaacaattcctcatcctgatgctgtcgtactttgagttagagctgatagaggggcaagccaagtgcccccccctcgatcagtcaagagctggcctcggaattctaccgccgctgaacgatattgagttcaaatacaagttcaagcatctg

SEQ ID NO: 15505 - DNA, 1512 bp, Artificial Sequence
  derived and/or modified sequence
atgatgacgacatcactgatatggggcattgccattgccgcttgctgttgcctttggttgatactgggcatcaggaggagacagaccggcgaacctcctctagagaacggtctcatcccctatctcggctgcgctctccagtttggcgctaatcctctggagttcctccgcgccaaccaacggaagcacggccatgtttttacctgcaagctgatggggaagtacgtacatttcattaccaatccccttagctaccacaaggtgctttgtcatgggaagtacttcgattggaagaagttccacttcgcaacctccgcgaaggcatttgggcacagatccattgacccaatggatgggaacaccaccgagaatatcaatgacacatttattaaaactctgcagggccatgctctgaacagcctgaccgagagcatgatggagaacctccagagaatcatgcgcccccccgtgtcttctaattctaagacagccgcctgggttaccgaaggcatgtactcgttttgctaccgggtgatgtttgaagcaggatatctgactatctttgggcgagacttgaccagaagggatacacagaaggcacacattctgaataatttagacaatttcaagcagtttgataaggtatttcctgccctcgtggctggtctgccaatccatatgtttcgcaccgctcataacgccagagaaaagttggctgagtctctccgccacgagaatctgcagaagcgtgagtcaatatcagaactgatatctttgcggatgttcctgaacgatacattgtctactttcgacgatttggagaaagcgaaaacgcacctggttgtactgtgggcttcccaggccaatacaatcccagcaacattttggtctcttttccagatgatccggaaccctgaggccatgaaggctgctaccgaagaggtgaagaggaccctggagaatgcgggtcagaaagtgtccctggaagggaaccccatttgtttaagccaggcagagttgaacgacctgcccgttctggattctatcataaaagaatctctgcgtctgagctcagcgagcctgaatatccgcacagccaaagaagattttaccctgcatctcgaggatgggagctacaatataagaaaggatgatatcattgcgctgtatcctcaacttatgcatctggatcctgagatataccctgacccactaacttttaaatatgatcggtatctcgacgagaacggcaaaacaaagactactttctattgtaacggcctaaaattaaagtactactatatgcctttcggatcgggcgccactatctgtcctggaagactgttcgccatccatgaaatcaagcagtttctgatactaatgttatcctacttcgagttagagctgattgagggccaggccaagtgccccccgctggatcagtcgagagccggtctgggaatattgccccctctgaacgacatagaattcaaatacaaattcaagcacctc

SEQ ID NO: 15506 - DNA, 1512 bp, Artificial Sequence
  derived and/or modified sequence
atgatgactacctcgctgatctggggtatcgcaatagctgcatgttgttgcctatggctcattctcggcataaggagaaggcagaccggcgaaccaccactcgaaaatggtttaattccttatctgggttgtgctctccagtttggcgccaatcctttggagtttctgagggcgaatcagaggaagcatggccacgtgttcacttgcaagcttatggggaagtacgtgcacttcatcaccaacccgctctcctatcataaagtgctgtgccacggcaaatatttcgattggaaaaagtttcattttgcaactagcgcaaaggcctttggccaccgtagcatcgatccgatggacggtaacacaacagagaatattaacgatactttcatcaaaacgctgcaaggccacgcacttaacagtcttaccgaatcaatgatggaaaacctccagaggattatgcggccacctgtgagctcgaatagcaaaactgcagcatgggtcactgaggggatgtattctttttgctaccgagtcatgtttgaggcaggctacctcacaatctttgggcgcgacctcaccaggcgagacacacagaaagctcacatccttaataatctggacaatttcaagcagttcgacaaggtgtttccagccttagttgcagggctgcctattcatatgttccgtactgctcacaacgcccgcgagaagctcgctgaaagcttacgacacgaaaatctgcagaagagggagagtatctcagagcttatttctcttagaatgttcctgaacgacaccctgagcactttcgacgaccttgaaaaggccaagacgcatctggtagttctttgggcttcccaggccaatacgatccccgccacgttttggagcctttttcagatgatacgaaaccctgaggcaatgaaggcagctaccgaagaggttaagaggaccttggagaatgctggccagaaggtgtccctggaaggcaatcccatatgcctctcgcaggccgaactcaacgatctgcccgttctagacagtattattaaggaatctcttaggttgtcttcagcgtcactgaacatccgaacagcaaaggaggacttcacactgcaccttgaggacggatcctataacattcgaaaggatgatattatagcattgtatccacagctcatgcatctcgatcctgaaatctaccctgaccctttaacctttaaatacgataggtaccttgatgagaacggaaaaacgaaaaccaccttctactgcaatggactgaagctgaaatactactatatgccgtttggatctggcgctaccatttgccctgggagattatttgcaatccatgagatcaagcagttcctgatcctcatgctatcttacttcgaactggaacttattgaaggccaagctaaatgcccaccactggaccagtcacgagcagggctgggaatactaccaccactgaatgatattgagtttaaatataagtttaagcacctt

SEQ ID NO: 15507 - DNA, 1512 bp, Artificial Sequence
  derived and/or modified sequence
atgatgaccacttcccttatctggggtattgctatcgccgcatgttgttgcctgtggctcattctggggataaggcgtcgccaaacaggagaaccaccgctggagaacggtctgatcccttatcttggttgcgcacttcagtttggggctaatcctcttgagtttctgagagcaaaccaacggaagcacggccatgtcttcacctgtaaactcatggggaaatatgtccacttcatcactaacccacttagctaccataaggtactgtgtcacggaaagtactttgactggaagaagtttcattttgcaacctccgcgaaggccttcgggcataggtccatcgatccgatggacggaaacaccacagagaacattaacgatacctttatcaagactctccagggacacgccctgaattctctgaccgaatctatgatggagaatctacagcgcataatgcgcccgcctgtgtcctctaatagcaagactgcagcatgggtgactgagggaatgtactccttttgctacagagtaatgtttgaggcaggatatctgaccatttttggccgcgacctgacccgccgggatacacagaaggctcacatcctcaataacttggacaactttaaacagttcgacaaagtctttcccgccctggtggccggcctccccattcatatgttcaggacagcccataacgccagagaaaagctggccgagagcctgcggcacgagaatctacagaagagggaaagcatttctgaactgatcagcctaaggatgtttctgaatgataccttgtccacgttcgacgacctcgagaaggctaaaacacatctggttgtcctctgggcgagccaggccaacaccattcccgctaccttctggagcttgttccagatgatacgcaatcctgaggccatgaaggccgccactgaggaggtgaaacgcactctcgaaaacgccggacagaaagtgagcctggaaggtaaccccatttgtctttcgcaggcagagttgaatgatttgcctgtcctggatagtatcattaaagagtcactgcggctgtcttccgcctccttaaatatcaggacagccaaagaggactttactctccatctggaggacggcagctacaacatccggaaagacgacattattgctctgtacccccaattgatgcatctggaccctgagatctacccagaccctctaactttcaagtacgaccggtacttagatgaaaacggaaaaacaaagactactttctactgtaacggccttaagctgaagtactactacatgccatttgggtcaggagctacaatctgtccgggacgcctgttcgcgattcatgagataaaacagtttctgattctaatgctgagctactttgaactggagctaattgagggtcaggcaaaatgtccccccttagatcagtcgagggcgggcttgggaatcctccctcctctgaatgatatcgagttcaagtataagtttaagcacctt

SEQ ID NO: 15508 - DNA, 1512 bp, Artificial Sequence
  derived and/or modified sequence
atgatgaccactagcctgatatggggcattgccatcgcagcctgttgctgcctgtggctcattcttggaattagaaggaggcagaccggagaacctcctctggaaaacggcctcattccatatctcggttgtgcactgcaattcggcgcaaacccacttgaattccttcgcgcaaatcagcggaagcatggacacgtctttacctgcaagttgatgggaaagtacgtgcacttcataaccaatccactgtcgtaccataaggtgttgtgccatggcaaatactttgactggaagaagtttcacttcgccacctccgcaaaggcatttggccatcgttccatcgatcctatggatggtaatacgactgagaacattaatgataccttcataaagaccctgcagggccacgctctgaattcgcttactgaatctatgatggaaaacctgcagaggattatgcgcccaccggtgagctcgaactctaagacggcggcatgggtgaccgaaggcatgtactctttttgttacagagtgatgttcgaagccggttaccttactattttcggaagagatctgaccagaagggatacgcagaaggcccatatcctcaataacctggataacttcaagcagtttgataaggttttccccgctctggtggcagggctgcccatccatatgtttcgaactgcccacaatgcacgtgagaagttggcggaatcacttcggcacgagaatctccaaaagcgagagtcgatctcagagctgatttcgttgaggatgttcctgaacgataccctctcaactttcgatgaccttgaaaaggcgaaaacccatcttgtggtgctgtgggcatcgcaagcgaatactattcccgctaccttttggagcctgtttcaaatgattcgaaacccggaggcaatgaaggccgcaactgaagaagtgaaaagaactcttgaaaacgctggacagaaagtttccctggaaggtaatccaatttgtctttcccaagcagagctgaacgatctgcctgtgttggactcgatcataaaggaatcgttgcgcttgtccagcgcaagccttaacattagaaccgcaaaagaagattttaccctccacctggaggacggatcatacaacataagaaaggatgacattatcgcactgtacccacaactcatgcaccttgatccagagatttatcccgatcctctcacctttaagtacgatcgctacctggacgagaatggcaagactaagaccaccttttactgcaacggcttgaaattgaagtactactatatgccatttggatccggagcgactatctgccctggccggctgtttgcaattcatgagataaagcaattcctgatccttatgctctcgtacttcgaactcgaactcatcgagggtcaagcaaagtgtcctcccctcgaccagtccagggcaggattgggaatactgcctcccctgaacgatatagaattcaagtacaagtttaaacatctg

SEQ ID NO: 15509 - DNA, 1512 bp, Artificial Sequence
  derived and/or modified sequence
atgatgactacaagcctgatttggggcatcgccatagctgcatgctgttgcctatggctgatcttgggtatccgccgtcggcagaccggggagccccctctagaaaatggcctaataccctatctgggctgcgccctccagttcggcgccaaccctttggaattcctgagagccaatcagaggaaacacgggcatgtgttcacttgcaagctgatggggaaatacgtgcactttattactaaccctttgtcttaccacaaagtcctttgccatgggaagtactttgattggaaaaagtttcacttcgcaacctcggcaaaagcttttgggcatcgcagtatcgatcctatggatggaaataccaccgagaatataaatgatacctttatcaagaccctgcagggtcacgcacttaattctttaacagaaagcatgatggagaatctgcagcggataatgaggcctcccgtgtcgtcaaattcaaagactgccgcctgggtgacggaaggaatgtattcattctgttaccgagtgatgttcgaagccggctacttgaccatttttggtcgcgacctgactcggcgggacacacagaaagctcacattctgaataatctcgataacttcaagcaatttgacaaggttttccctgccctggtagccggattgcctattcacatgttcaggaccgcgcacaatgcaagagaaaagttggcagaatcattacggcacgagaatctccaaaaaagggagagtattagcgaactgatctccctgaggatgttcctcaacgatactctctcgacttttgatgatctggagaaggcaaagacacatttggtggtgttatgggcctcccaagccaatactatcccagccacattctggtcgctattccagatgatcaggaaccctgaggccatgaaggcagctacagaggaagttaagagaaccttagaaaatgcaggacagaaggtgagcctggaggggaatcccatatgcttgtctcaagccgagttgaatgacttgccagtattggactctatcatcaaggaatctcttaggctttcttctgcttccctgaacatccgtactgctaaggaagacttcaccctacatctcgaagatggctcctataacatacgtaaagacgacataattgcactgtacccccaacttatgcacctcgacccagagatatatcccgatcccctgacttttaagtacgatcgatacctggacgaaaacggcaagactaagacaaccttttattgtaatggattaaagcttaagtattattacatgccttttgggtccggagccaccatttgcccaggccggctcttcgctatacacgaaattaaacagttccttattttgatgctgtcctactttgagctggagctgatcgagggacaggcaaagtgcccccctctcgaccagagccgcgccgggttgggaatactgccccccttgaatgatatcgagttcaaatataagttcaaacatctc

SEQ ID NO: 15510 - DNA, 1512 bp, Artificial Sequence
  derived and/or modified sequence
atgatgactaccagtctgatttggggtatagcgattgccgcttgttgctgtctctggctcatccttggaatacgacgcaggcagaccggagagccgcctcttgaaaacggcctgatcccgtacctgggatgcgccctgcagttcggtgccaaccctctggagtttctcagagccaatcagcggaaacatggacatgttttcacctgcaaactgatggggaagtatgtccactttatcaccaatccactgtcctaccacaaggtgctgtgccatggaaagtacttcgattggaaaaagtttcactttgcaacttcagccaaggctttcggacaccgctcgatcgacccaatggacgggaacactaccgagaacattaatgacactttcatcaagaccctccagggtcatgccctgaatagcctgacggagtcaatgatggagaacctccagcgaatcatgaggccaccggtttcttctaacagcaaaactgcggcgtgggtgaccgaaggaatgtactcattctgctatcgcgtcatgttcgaagcgggttacctcactatctttgggcgcgatctcacccggagagacacccaaaaggcgcatatcctgaataatctggataactttaaacagttcgataaagtgtttccagcgctggtcgctggacttccgatccatatgttccgcaccgcgcacaacgcacgcgaaaagttggccgaatcgctgcgccacgaaaatctgcagaagcgcgagtcgatctcagaacttatcagcctgcggatgttcttgaacgatactctgtccacttttgatgatcttgaaaaggccaagactcacctcgtggtgctctgggcctctcaggccaacaccatccctgcgaccttctggtcacttttccaaatgatccgtaaccccgaagccatgaaagcggctactgaggaagtcaaaaggaccttggaaaacgccggacagaaggtcagcctggaggggaaccctatctgcttgagccaagccgaactcaatgacctgccggtgctggatagcatcatcaaggagtcgttgcgactctcctcggcttccctgaatatccgcaccgctaaggaggacttcacgctgcatctcgaggacgggtcctacaacatccgaaaggacgacatcatcgccctctacccccaacttatgcacttggatccggagatctacccagacccgctgaccttcaaatacgatagatacctcgatgaaaatgggaaaaccaagaccactttctactgcaacggcctgaagttgaaatactactacatgcctttcggctcgggagcgactatttgcccgggtagactgtttgccatccacgagatcaagcaattcctcatcctcatgctctcctacttcgaactggagctgattgagggccaagccaagtgccccccgctggatcagtctagggcgggcctgggaatcctgcctccactgaacgacatcgaattcaagtacaagttcaagcacctg

SEQ ID NO: 15511 - DNA, 1512 bp, Artificial Sequence
  derived and/or modified sequence
atgatgaccacctctctgatttgggggatagctattgctgcctgttgctgtctctggttgatattgggaattaggcgccgacaaacaggggaacctcccctggagaatggattgatcccttatctaggttgcgcactccaatttggggccaatcctctggagtttttacgagcgaaccagcgtaagcatggccatgtcttcacttgtaagcttatgggcaaatacgtgcacttcataacaaacccactaagctatcacaaggtgctttgccatggtaagtacttcgactggaaaaagttccatttcgccacctccgctaaagccttcggacatagatcaatcgatccgatggacggaaatactactgagaacatcaatgacacattcattaaaacgctccagggtcatgctttaaattcgcttaccgaatcgatgatggaaaacctgcagagaatcatgagaccccccgtttccagtaattctaagactgcagcctgggtcacagagggcatgtatagtttttgctacagggtgatgttcgaggcagggtacttgactatcttcggcagggatctgaccagacgtgacacccaaaaagcccacatcttgaacaaccttgacaacttcaaacaatttgataaggtgtttcccgcgctggtggctggactgcccattcacatgtttcgcaccgctcacaacgcacgcgagaaactagcggaaagtctccggcacgaaaacctgcagaaacgcgagtccatatccgaactgatttcgctccgcatgttcttgaacgatacgttaagcaccttcgacgacctggaaaaggcaaagacccatctggtcgtgttatgggcctcccaggccaataccattccggcaactttttggtccctgttccagatgatcagaaacccagaggctatgaaggcagccactgaggaagtcaagcgcactctggagaacgcgggtcaaaaggtcagcttggaaggcaaccctatctgtctgtcccaagctgagctgaatgacctgcctgtattggattctatcataaaggagagtctgagactctcgagcgcctccctcaatataaggaccgctaaagaggattttactctccatttggaggatggaagttacaacatacgcaaagacgatatcattgcgctgtatccgcagctcatgcatctggaccccgagatctatcctgatcctctcacctttaaatatgatcggtacctcgatgaaaacggaaagactaagaccacattttattgtaacggactgaagctgaagtattactatatgccattcggcagtggcgcgactatatgcccaggcaggctgtttgccatccacgaaatcaagcagttcctgatcctgatgctttcgtacttcgaactcgagttgattgagggccaggcaaagtgccctccactggaccaatcaagagccgggctgggtattttgccgcccctgaacgacattgagtttaaatacaaatttaagcacctg

SEQ ID NO: 15512 - DNA, 1512 bp, Artificial Sequence
  derived and/or modified sequence
atgatgaccacctcgctcatctgggggattgccattgcggcctgttgttgtctttggctgattctgggcatccgcagacgacagactggagagcccccattggagaatggattgattccatacctggggtgtgcgttgcaattcggggcaaacccactcgaattcttgagagcaaaccaaagaaagcatggccacgtgtttacctgcaagctcatgggaaagtacgtccactttatcaccaatcccctctcctaccacaaggtgttgtgtcacggcaagtactttgattggaagaaatttcattttgcaaccagcgccaaggcttttggtcatagatctattgacccgatggatggcaacacgaccgaaaacataaacgacacctttatcaagaccctgcagggacatgccttgaactctcttactgaaagcatgatggagaacctgcaacgcattatgcggccacccgtgtcgagcaatagtaagacggcagcctgggtgacggaaggaatgtactcattttgttaccgggtcatgttcgaggcaggttaccttactattttcgggagagatctgactcgtagggatactcagaaggctcatattctgaataatctggataactttaagcaatttgataaagtgtttcctgcactggtggccggactcccaattcatatgtttagaacggcccataacgcccgagaaaagttggcagaaagccttagacatgagaatctgcaaaagagagaatcaatttccgaactgatatccctgcggatgttcctcaatgacactctcagcactttcgatgacctggaaaaagcgaaaacccacctggtggtgctctgggcatcacaagcaaacactatacccgcaactttttggtcactttttcaaatgatcagaaaccctgaggcaatgaaggcggctactgaggaggtgaagaggaccctggaaaatgcaggacaaaaagtatccctggaaggaaatcccatatgtttgtcccaggcagaactcaacgatctgcccgtcctggattcgataatcaaggaatcactcagactgagctcggcctcgctgaacataagaactgctaaagaagattttaccctgcaccttgaagatggatcgtataacatccgcaaagacgacattatcgctctctatccacaactgatgcatctggaccccgaaatctacccagatcctcttaccttcaagtacgatcggtaccttgatgagaatggcaagactaaaactactttctactgcaacggccttaagctgaagtactactacatgccattcggtagcggggccaccatctgccctggacgcctgttcgcgattcacgagattaaacagtttctgatactcatgctgtcctactttgaacttgaactgattgaaggccaggctaaatgccctcctttggaccaatccagagcaggcctcgggatcctgcctcccctgaacgatatcgagttcaagtacaagtttaagcatctt

SEQ ID NO: 15513 - DNA, 1512 bp, Artificial Sequence
  derived and/or modified sequence
atgatgacaacgagtctcatctggggcattgccattgccgcatgctgctgcctctggctcatcctgggcatccggagacgccaaactggtgagccaccgctggaaaatggcctaatcccctacctgggctgcgcgctccagtttggcgcgaatcctctggagttcctgagggctaatcagaggaaacatggccatgtcttcacgtgcaagctgatgggcaagtacgtgcatttcatcacaaaccctctcagctaccacaaagttctttgtcacggaaaatacttcgattggaaaaagttccatttcgcaacctctgcaaaagcgtttggccaccgatcgattgaccccatggatggaaacacgaccgagaacatcaacgacacattcatcaagaccctccagggccatgcgttaaatagcctgactgagtctatgatggaaaacctgcagcgtatcatgcgacctcccgtgtccagcaattccaagaccgccgcatgggtcactgagggaatgtacagcttctgctacagagtgatgttcgaagctgggtacttaacaattttcggtagggatctgactagaagggacacccaaaaggcacacatactcaataatctcgataactttaaacagtttgacaaggtgtttcctgcactcgtggccggactgccaatccatatgttcaggaccgcacataatgcgagggaaaagctcgcagaaagtctccggcatgagaacctccagaaaagggagtccattagtgaactgatttccctgcgcatgttcctgaacgacactctctctacattcgacgacctggagaaagctaagacgcacctggtggtgctatgggcctcacaggccaataccatacctgctacgttttggagcctattccagatgatccgaaacccagaggctatgaaagccgcaaccgaggaggtgaaacgcacactcgaaaacgccggacagaaggttagcctggaaggaaaccctatctgcctatctcaagccgaactgaacgaccttcctgtgctggactctattatcaaagaatccctccggctcagtagcgcctctctgaacatcagaacagctaaagaggattttacgcttcatctcgaagacgggtcctacaacataagaaaagatgatattattgccctctacccgcagttgatgcacttggaccccgagatatacccagaccctctgactttcaagtatgaccgctacctggatgagaacggtaaaactaaaacaacgttctattgtaatggtctgaagctcaaatactactacatgccctttgggtcaggcgccaccatatgccctgggaggctttttgcgatacatgagattaagcagttcctgattctgatgctttcatacttcgagctcgagctgatagagggtcaagccaagtgcccaccgcttgaccaaagccgggccgggctaggaattttgccccccttaaatgacatcgagttcaagtacaagttcaaacacctc

SEQ ID NO: 15514 - DNA, 1512 bp, Artificial Sequence
  derived and/or modified sequence
atgatgacgacttccttaatctggggtattgctatcgcggcctgttgctgcctgtggctgatcctgggaatccggcgtaggcagactggtgaaccgccactggagaacggcctgattccgtacttgggatgcgccttgcagtttggtgctaatccactggaattcttgcgagccaaccaacgcaaacacggccacgtctttacatgcaaactgatggggaagtatgttcacttcattactaacccccttagttatcataaggtgttatgtcacggaaaatacttcgattggaagaagtttcattttgcaacctcggccaaggcgttcgggcatcggtccattgatcccatggatggcaacaccactgagaatattaatgacacattcataaagaccctgcagggacatgcgctaaattctttgaccgagtccatgatggagaatctccagcggattatgagacccccggtctcaagtaacagcaagaccgctgcctgggtgactgagggcatgtactccttctgttatagggtgatgtttgaggcaggttatctgacgatattcggtcgcgacctgacacggagggacacacaaaaggcacacatactcaataatctagataatttcaagcagtttgataaagtttttccagcgctggtagcagggttgccaatccacatgttcagaaccgcccacaatgccagagagaaactggcggaatccttgcgccatgagaatttgcagaagagggagagtatctccgaactgataagtctgcgaatgtttctcaatgatacgctctccacatttgatgacctggaaaaggccaagacccacctggttgtgttgtgggcaagccaggccaataccattcctgccaccttttggtctctgttccaaatgattagaaaccccgaagcgatgaaagctgctactgaggaggtcaaacggaccctcgagaatgccggtcaaaaagtgtctttagagggcaaccccatctgcctctcacaggccgagctgaatgatctccctgtgctcgattctatcattaaggagagcctcaggctatcctccgcgtccctgaatattcgcaccgctaaagaagatttcactctccacctggaggatggttcttacaatattagaaaagacgatataatcgcactgtacccccagctaatgcacctggaccctgagatatatcctgatcccctgaccttcaaatacgatcggtacctggacgaaaatggaaagaccaagactaccttctactgcaacggtctaaagctgaaatactattatatgccctttgggagcggcgctaccatctgtccaggcagacttttcgccatccacgagatcaagcagtttctcatcctgatgttgtcctacttcgaacttgagctcatagagggccaggcgaagtgtccaccattggaccaatcccgggcagggctgggcatcctgcccccccttaatgatattgagtttaagtataaatttaaacacctg

SEQ ID NO: 15515 - DNA, 1512 bp, Artificial Sequence
  derived and/or modified sequence
atgatgaccacttctctcatatggggcatagccattgcagcttgttgttgcctgtggcttatccttgggatccggagaaggcagaccggggaaccccctttggagaacggtcttattccttacctcggatgtgcgctccagtttggtgcaaaccctttggaattcctcagagcaaaccagcggaagcacggtcatgtcttcacatgcaagctgatgggcaagtatgttcattttataacaaacccgctctcatatcacaaagtgttatgtcatgggaaatatttcgattggaagaaattccatttcgccacctctgctaaggcctttggccacagaagcattgatcccatggacggtaacaccacggagaacattaacgatacctttattaagacattgcaaggccatgcccttaatagcttgacggaatctatgatggagaatctgcagaggataatgagacctcctgtcagctctaattccaagacagcagcatgggtgaccgagggtatgtactcattttgttaccgggtgatgtttgaggcagggtacttgacaatatttgggcgggatctgacccgccgcgatactcagaaagcccatatattgaacaatcttgacaactttaagcagtttgacaaggtcttcccagccctggtggccggtctgcctatacatatgttccggacagcacataacgcgcgtgaaaagctggcggaatcactcaggcatgagaatctgcagaagcgggagtctatttccgaactgatcagcctgagaatgttcctcaatgacaccctttccacatttgatgacctggagaaagccaaaactcacctggttgtactgtgggcaagtcaggcgaatactattcctgcaacattttggtcgctattccagatgatacgcaaccctgaagcaatgaaagctgccacagaggaggtcaaaaggacattggagaacgcaggtcagaaggtttctttagagggcaaccctatttgccttagccaggcagagttgaatgacctgcccgtcctggattccattatcaaggagtccctgagattgagcagcgcaagcttgaacattcgcacagctaaagaggactttacgcttcatctggaagacgggtcctacaatattagaaaagatgacattatagcgttgtaccctcaattaatgcacctggatccagaaatatatccagatccactcacttttaaatatgatcggtacctggacgaaaatggcaaaaccaagaccacgttttactgtaacggactgaaactcaagtattactacatgccgtttggtagtggggcaacaatttgtcccggcagacttttcgccattcatgaaatcaagcagttcctgatcttaatgctgagctactttgaactagaacttatcgaggggcaggctaagtgcccaccccttgaccaatcacgcgcaggactcggcatactccctcctctgaatgacatagagttcaagtataagtttaagcacctg

SEQ ID NO: 15516 - DNA, 1512 bp, Artificial Sequence
  derived and/or modified sequence
atgatgaccacttccctaatatggggcattgcgatagcagcctgctgttgcctctggctgatccttggcatccggcgacgacaaactggggagccaccactggagaacggcctaatcccgtacttaggttgcgctctccaattcggtgctaatcccctcgagttcttgagagcaaaccagcgcaagcacgggcatgtatttacttgtaagttaatgggcaagtacgtgcattttatcacaaaccctttgagctatcataaggtgctgtgtcatggcaagtactttgattggaaaaagttccatttcgcaacatctgccaaggccttcggtcatcggagcatcgacccgatggacggcaataccacagaaaacattaacgatactttcatcaaaacgctgcagggacatgcccttaattctctgaccgagagcatgatggaaaatcttcagcggatcatgcggccccctgtcagttccaattctaaaacagctgcctgggtgactgagggtatgtattcattctgttaccgtgtgatgtttgaagccggctacctcacgattttcggcagagacttgacgcgtcgggatactcagaaagcccacattttgaacaacttggacaacttcaagcagttcgataaggtgttcccggcccttgtggccggcctaccaatacatatgttccggacagcacacaacgctcgggagaagttagccgaatccttacggcacgagaatttgcagaagcgcgagtcaatttctgagctgatctctctgaggatgttccttaatgatacattgtctacgtttgacgacctggagaaggccaagacacacctggtggtgctttgggcgagtcaggcaaatacaattccagccaccttttggtctctgtttcagatgattcggaacccagaagctatgaaggccgcaacagaggaagtgaagcgcacgctggaaaatgccggccaaaaggtcagcctggagggtaaccctatctgcttgagccaggcagagctcaatgacctgcccgtcctggattctattatcaaggagtcactaaggctgtcctccgcatccctgaatatacggacggctaaggaggacttcacattacatctggaggatggatcatacaacatccgtaaggatgacataatcgccttatacccccagctaatgcatctggatcccgaaatttacccggatcccctcacgtttaaatatgaccggtatctggacgagaatggtaagacaaagacgaccttctactgtaatggcctgaagctgaaatactactacatgccctttggctcaggcgcgaccatctgtcccgggcgccttttcgctatacacgagataaaacaattcttgattcttatgctttcctactttgagctcgagcttattgagggccaggccaaatgcccccctcttgatcagtcacgcgccggtctgggaattctaccgccgctaaacgacatagagttcaaatataagtttaaacatttg

SEQ ID NO: 15517 - DNA, 1512 bp, Artificial Sequence
  derived and/or modified sequence
atgatgactacttctcttatctgggggatcgccatcgccgcttgttgctgtctctggcttatccttggaatccggaggcgacagacaggggaacctcctttggaaaacggattaataccatatcttggatgtgcgttacagttcggggctaaccccctagagttcttaagggccaatcagcgaaaacacgggcacgtattcacttgtaagttaatggggaaatatgtccatttcatcactaaccctctatcttatcataaagtgctgtgccatgggaaatattttgactggaaaaagttccattttgccacatccgcaaaggcatttggacatcgatcaatcgatcctatggacgggaacacaacagaaaatatcaacgatacatttataaaaactctccagggacacgccctgaactccttaacagaatcaatgatggagaatttgcagaggataatgcgtccacctgtgtcctcaaatagtaaaacagccgcctgggttactgaaggaatgtattctttctgctacagggtgatgtttgaggctggatatctcacaattttcgggagagatctaactcggagagatactcagaaagcccacatcctcaacaatctcgataacttcaaacagtttgacaaagtttttcctgccctcgttgccgggcttcccatccacatgtttcggacagctcataatgcaagggaaaaattagccgaatccctcagacacgaaaatctccagaaacgagaatctatctctgaactaatctctttacgcatgttcttaaacgatactctctctacatttgacgatctagagaaagcaaaaacacacctggtggtgctctgggcgtcgcaggctaacacaatcccagctacattctggtctctgtttcagatgatcagaaaccccgaagccatgaaagcagcaactgaagaggtcaagaggactctcgagaacgccgggcagaaagtttccctcgaaggaaaccccatctgcctatctcaggcagagttaaatgatctgcctgtgctcgattccataattaaagagtcactgaggttgagttctgctagtctcaatatcagaacggccaaggaggattttactctgcatttagaagatgggtcctataatataagaaaagatgatatcatagcgctgtatccccagctcatgcatctggatccagaaatatatcccgacccactaactttcaaatatgataggtatttagatgaaaatgggaaaacaaaaactacattttactgtaatgggctgaagcttaagtattactacatgccattcggatccggagccactatatgtcctggaaggctttttgcgatacacgaaatcaaacagttcctcattcttatgctgtcatatttcgagctcgaactgatagagggacaagccaagtgtcccccattagatcagagtcgggctggactcgggatcctgcctcccctcaatgatatagaatttaaatacaaattcaaacatctg

SEQ ID NO: 15518 - DNA, 1512 bp, Artificial Sequence
  derived and/or modified sequence
atgatgaccacctccctgatatggggtatagctattgctgcctgctgctgtttgtggctaatactcgggattcggagaagacagaccggggagcctcccctcgagaacggcctaattccctaccttggatgcgccctgcagtttggtgccaaccccttagagtttcttcgagccaaccagaggaagcacggccatgtgttcacttgtaaactcatgggcaaatatgtgcacttcatcacaaaccccctgtcctaccacaaagttctgtgccacgggaaatattttgactggaagaaattccacttcgcaacttcagccaaggcattcggacatcgaagtattgatcctatggatggaaacacgacagagaacatcaacgataccttcataaagacactccaagggcacgctttgaacagcctgaccgagagcatgatggaaaatttgcagagaatcatgagaccaccggtctccagtaattctaagacagccgcatgggtgaccgaagggatgtactctttttgttacagagttatgttcgaggccgggtatctcaccatcttcggcagagatttgacaaggcgcgacacgcaaaaggcccacatccttaataacctagataatttcaaacagtttgacaaagtctttccagcactggttgctggtctgccaatacacatgttccggacggcacacaatgcccgggaaaagcttgctgaaagtttgagacatgagaacttacagaagagagagagcatttccgagctcatatctcttaggatgtttctcaatgacacactgagcacctttgatgacttggaaaaggcaaagacccatttggtcgtcctctgggctagccaagccaacactattcctgctacgttctggtcacttttccagatgatacgcaatccggaggccatgaaggccgcaactgaagaggtcaagcgcacactggaaaacgccggacagaaagtctcgctcgagggcaaccctatctgcctgtcgcaagccgagctgaatgatttgcccgtgctggattctataattaaggagagtctgcgcctcagttccgcttcacttaacattcggaccgcgaaggaagactttactcttcaccttgaggatgggtcatataacattaggaaggatgacatcattgccctgtacccgcaactgatgcatttggatcctgaaatctaccctgatcccctgacctttaaatacgataggtacttagacgaaaatggtaaaactaaaacgaccttctattgtaatggactaaaattaaaatattattatatgcccttcgggtcaggagccaccatctgccctggccgtcttttcgcaatccatgaaatcaaacagttcttgattctaatgctgtcctacttcgagctggagctgatcgaaggccaggctaagtgtccccccctagatcagtcaagggccgggctcggaatcctgccccccctgaacgatatcgaatttaaatacaaatttaaacacctg

SEQ ID NO: 15519 - DNA, 1512 bp, Artificial Sequence
  derived and/or modified sequence
atgatgaccactagtttaatctggggaatagctattgccgcatgttgttgtctttggctcattctaggtattagacggagacagacaggtgagccacctcttgagaacggcctcataccttatttgggttgcgctcttcagtttggtgctaacccattggaattcctccgggccaaccaaagaaagcacgggcatgtttttacatgtaagcttatggggaagtacgttcatttcatcacgaatcctctgtcctatcataaggttctctgtcacggcaagtacttcgactggaaaaaattccacttcgctacctctgctaaggcgttcggtcatagaagtatagatccaatggatggtaacactacagagaacattaatgatacattcattaagactttgcagggccatgctttgaattcgttaactgagtcaatgatggaaaacttgcaaaggattatgaggccacctgttagtagtaattcgaagacagccgcttgggttactgagggcatgtatagcttctgttatagagtcatgttcgaggctgggtacttaaccattttcggccgcgacttgaccaggagggacacacagaaggcacatattcttaataatttggataatttcaagcaattcgataaggtgtttcctgccctcgttgctggacttccaatccatatgtttaggaccgcccataatgcgcgtgagaaactagctgaatcgcttagacatgagaaccttcaaaagagagaatccataagtgagttaatatcacttaggatgttccttaatgatacgcttagtacgtttgatgacttagaaaaagcaaaaacgcacttggttgtcctctgggcttctcaagctaacaccatacctgctacattctggtctctttttcaaatgatcaggaaccccgaggctatgaaggcagccaccgaagaggtaaagaggacacttgagaatgcgggccagaaagtttctctcgaagggaaccctatttgcctcagtcaggcagaactgaatgacttgcccgttttggatagtatcatcaaagaatcgttgagattaagttcggcttcacttaacattagaactgccaaggaggattttacattgcacttggaggatggaagttacaatattaggaaggatgatattattgctttgtacccacagttgatgcatttggaccctgaaatttatcctgatccgctaactttcaagtatgataggtatcttgatgagaacgggaagactaaaacgacattttactgcaatggcttaaaattaaagtactattatatgccatttggctcaggtgctaccatatgccccggaaggctttttgccattcatgagattaaacagtttctgatccttatgctgagttactttgaacttgaacttattgaaggtcaagctaagtgccctccattagaccagtcgagggccgggctcggtattctcccaccattgaacgacattgagttcaagtataagtttaaacatctc

SEQ ID NO: 15520 - DNA, 1512 bp, Artificial Sequence
  derived and/or modified sequence
atgatgaccacctcgctcatttggggaatcgccattgcggcttgttgttgcctctggctcatattggggattagacgccgacaaactggcgaaccaccacttgagaacggtctgatcccataccttggatgtgccctgcaattcggcgcaaatccactggagtttcttcgggctaaccaacgcaagcatggtcatgtgtttacttgcaagctgatggggaaatatgtccactttatcacgaatcccctttcataccacaaggtcctctgtcatggtaaatacttcgactggaaaaagtttcactttgcaacgtcagcgaaggcctttggccatagatcgattgatccaatggacggtaacacgaccgagaacattaacgataccttcatcaagaccttgcaaggacacgcgctgaactcacttactgagagcatgatggaaaatctccagaggattatgcgtcctccagtcagctcgaatagcaagaccgcagcctgggtgactgaaggaatgtactcgttctgctacagagtgatgtttgaagcaggatacttgaccattttcggacgcgatcttacccggagagatactcaaaaggcgcatatcctcaacaaccttgacaactttaaacagtttgataaggtctttcctgcgctggtcgctggtttgccgatccacatgtttcgtactgcacacaacgctcgcgaaaaactcgcggaatcgctcagacatgagaatctgcaaaagcgggagagcatttcggagctgatctctctgagaatgtttctcaacgacacgctgagcacttttgatgatctggaaaaggccaagactcatctcgtggtgctctgggcatcacaggcaaatactattcccgcaacgttttggtccctttttcagatgatacggaacccagaagcgatgaaagccgccaccgaagaggtcaaaagaactcttgaaaacgccggacagaaagtgtcccttgaagggaaccccatatgtctttcacaagcagagcttaacgaccttccggtgctcgattccatcatcaaagaatcgcttcgactttcgtcagcatctctgaatatcagaaccgcaaaggaggacttcactttgcacttggaggacggaagctacaacatccgtaaagatgatatcattgcactttaccctcaactcatgcatctggacccggagatttacccagacccactgacctttaagtacgatagatatctggacgagaatggtaaaaccaaaactactttttactgtaatgggttgaagctgaagtactactacatgcctttcggctcaggagccactatttgtccaggacggctgtttgccattcacgaaatcaagcagtttcttatccttatgcttagctattttgaactggaactcatcgaaggtcaggcaaagtgccctccgcttgatcaatcccgcgccggactgggtattctgcctccactcaatgacattgaattcaaatacaagttcaagcatctg

SEQ ID NO: 15521 - DNA, 1512 bp, Artificial Sequence
  derived and/or modified sequence
atgatgactacttcactgatctggggcatcgctattgccgcctgttgttgcctgtggctgattctgggcatcaggcgccgccaaaccggggagccgccactggaaaacggtctgattccatacctcggatgtgccctgcagttcggcgcgaacccgctcgaattcttgcgcgctaatcagcggaagcacggacatgtctttacttgcaagctgatgggaaagtacgtgcatttcatcactaacccactctcgtaccacaaagtcctgtgccacggcaagtactttgactggaagaagttccacttcgctacttccgccaaggcctttggccatcggtcgatcgatcccatggacggcaataccactgaaaacatcaacgacaccttcatcaaaaccctgcaagggcacgcactgaactcgcttactgagtccatgatggaaaacctgcaacgcatcatgcgtcccccggtcagctccaattcaaagactgctgcttgggtgaccgagggaatgtactccttttgctaccgcgtcatgttcgaagctggatacctgaccatcttcggacgggatctgactaggcgggacactcagaaagcgcacatcctgaacaatctggacaatttcaaacagtttgataaggtgttcccagcgctcgtggccggcctgcctatccacatgttccgcactgcccacaacgcccgggagaagctggccgaatccctgaggcatgaaaacctgcagaagcgggaatcaatctcagaactgatctccctccgcatgttcctgaacgataccctgtccacgttcgatgatctggagaaagcaaagactcatctggtcgtgctctgggcgtcccaagcgaacaccatccctgcgaccttctggtccctgttccagatgatccggaatcccgaagcgatgaaggccgcaaccgaggaagtgaagaggactctcgaaaacgccggccagaaagtgtccctggaaggaaatcctatctgtctgtctcaggcagagctgaatgacctgcccgtgcttgactcaatcatcaaggagtcgctgcggctctcctcagctagcctcaacatccgcactgcgaaggaggacttcaccctgcacctggaagatggtagctacaacatcagaaaggacgacatcatcgcgctctacccacagctcatgcatcttgacccagaaatctacccggatccacttacgtttaagtacgaccggtacctcgacgaaaacggcaagactaagaccaccttctactgcaatggattgaaactcaagtactactacatgccattcggctcgggagccacgatctgtcctggacggctgttcgcgattcacgagatcaaacagtttctgattctgatgctgtcatacttcgaacttgaactcatcgagggacaggccaagtgcccgcctcttgatcagtctcgggcgggactcggaatcctgccgccgctcaatgacatcgagtttaagtacaagtttaagcacctg

SEQ ID NO: 15522 - DNA, 1512 bp, Artificial Sequence
  derived and/or modified sequence
atgatgactacttcactgatctggggtattgcaatcgccgcctgctgctgtctctggctgattcttggcatcagacggaggcagaccggcgaaccgcccttggagaacggactgatcccttacctcggctgtgcactgcagttcggcgcgaatccgctggaattcctgcgcgcgaatcagcggaagcacggccacgttttcacgtgcaaactcatgggaaaatacgtccacttcatcacgaaccctctttcgtaccacaaggtcctgtgccacgggaagtacttcgactggaaaaagttccattttgcgactagcgcgaaggcgttcgggcacagatcaattgacccgatggatggtaataccactgaaaacattaacgacacctttatcaaaacgctccagggacacgcccttaactcgctgaccgaatccatgatggagaacttgcagcgcataatgaggccacccgtgtcgtcaaattcgaaaaccgccgcttgggtcaccgaaggaatgtacagcttttgctaccgggtgatgttcgaggctggatatttgactattttcggccgcgacctcactcgccgggacacccagaaggcgcatatcctcaacaatctggacaacttcaagcaattcgataaagtctttcctgccctggtggccggactgccaatccatatgttccgcaccgcacacaacgccagggagaagttggccgagtcccttcggcacgagaacttgcaaaaacgcgaaagcatctccgagttgatctccctccggatgtttctgaacgacaccctgtcaacttttgatgatctggaaaaggcaaaaactcatttggtggtcctctgggcgtcccaggcaaacaccattccggctactttctggtcgctgttccaaatgatcagaaatccagaagctatgaaggctgcaaccgaagaggtgaagagaacgctggaaaacgccggacagaaggtgtctctggaaggaaatccgatctgtttgtcccaagcagagctgaatgacctgcccgtgctcgattcgataatcaaggagtccctgcgcctgagcagcgcctcgttgaatatcagaacggccaaggaggatttcaccctccatctggaagatgggtcctataacatccgcaaagacgatatcattgctctttacccacaactcatgcatctggacccagaaatctaccccgatccgctcaccttcaagtacgaccgctacttggacgagaacggaaagacgaaaactactttctactgcaatggtctgaaactcaaatactactacatgccattcggaagcggtgccaccatctgcccgggccgactcttcgctattcatgaaatcaagcagttcctcatcctcatgctgtcatacttcgaactggagttgatagaaggacaagctaaatgccctccgttggaccagtcacgggcgggtctgggaatcctgccaccactcaacgatatcgagtttaagtataagttcaagcacctg

SEQ ID NO: 15523 - DNA, 1512 bp, Artificial Sequence
  derived and/or modified sequence
atgatgacgacgagcctcatttgggggattgcaattgccgcatgttgctgtttgtggttgattctgggaatccggaggagacagactggcgaaccgccattggaaaatgggctcattccttacctgggatgtgcactccaatttggcgctaatcctctggagttcctgagagcaaatcaaagaaagcacgggcatgtgtttacctgcaagctgatggggaaatacgtgcacttcattacgaatcccctctcctatcacaaggtgctttgtcatgggaagtacttcgattggaaaaagtttcattttgccacctcggctaaggcttttggacatcgatcgattgatcctatggatggtaacaccaccgaaaacataaacgacaccttcataaagacccttcaagggcacgctcttaactccctgaccgagtcaatgatggaaaacctgcaacgaattatgcggcctcctgtatcgtcgaactctaagaccgcagcatgggtgactgaaggcatgtactcgttctgctatagagtgatgttcgaagcgggttatctgaccattttcggacgagatcttacccggagagatactcagaaggcccatattctcaataacctggacaatttcaagcagtttgataaggtgtttcccgccctggtggcaggactgccaatccatatgttcagaaccgcccataatgcaagagaaaaactggcggagagcctgagacatgaaaacctgcagaaacgtgagagcattagcgagcttatctcattgaggatgtttctcaatgacaccctctcgaccttcgatgacctggagaaggcaaaaactcatttggttgtgctttgggcgtcacaggcaaacacgatcccggcaactttctggtcgcttttccaaatgattcgcaaccctgaggcaatgaaagcagcaaccgaggaggtgaagaggacgctggaaaatgcaggacaaaaagtctcacttgaaggaaatccaatctgtctctcccaggcagaacttaacgatctgccagtgctggattcgataatcaaggaatctcttagactttcttcagccagcctgaacattaggactgccaaagaagattttaccctccacctggaggatggatcctacaacataagaaaggacgatatcattgcgctctaccctcagcttatgcatctggaccccgaaatctaccctgaccctctcacctttaagtacgataggtacctggacgagaacggcaagactaaaactactttttactgcaacgggctgaagctcaaatactactacatgccatttggatccggcgccacgatctgtcctggacggctgtttgccattcacgagattaagcagttcctgatacttatgctgagctacttcgaactggaacttatagagggccaagccaagtgtcctcctcttgaccagtcgcgcgcaggcctgggtattttgcctccactgaacgatatagaattcaaatacaagtttaaacatctt

SEQ ID NO: 15524 - DNA, 1512 bp, Artificial Sequence
  derived and/or modified sequence
atgatgaccacgtcattaatatggggaatcgccatagctgcttgctgctgcctgtggctgatccttggtattcgacgccggcagacaggggaaccacctttggaaaacggcctgatcccttaccttgggtgcgcactgcagtttggcgcgaaccccttggagttcctgagggccaaccagaggaaacacggtcacgttttcacatgcaaactgatgggaaagtacgtccacttcatcaccaacccactatcctaccacaaggtgctgtgtcacggtaaatacttcgactggaagaagtttcacttcgcgacgagcgccaaggctttcggacatcgttcaattgaccccatggatggcaacacaactgagaacatcaatgacacattcatcaagacactccagggacacgccctgaattccctaaccgagagcatgatggagaacctgcagcgtattatgcgcccacctgtaagttctaactcaaagactgcggcctgggtcactgaggggatgtatagtttttgttaccgcgtaatgttcgaggcgggctatctcacaattttcggccgggacttgacgcggagggatacccaaaaggcacatattctcaataacctcgataatttcaagcagttcgataaggtgtttcccgccctcgtggctggactgcccatccacatgttcagaacagcacataatgctcgtgagaagctggcggagagcctcagacacgaaaatctgcaaaagcgagagagcatatctgagctcatctccctaagaatgttcctcaacgacactctttctacgtttgatgatctggagaaagccaagacacaccttgttgtactctgggcttcacaagccaacaccattccagccacattttggtccctgtttcagatgattcgaaatcctgaagctatgaaagctgccaccgaggaagttaaacgcaccctcgagaacgcaggccagaaggtttcgctggaaggcaacccaatttgcttaagccaggcagagctcaacgatctgcctgtcctcgatagcattatcaaagaatctctcagactgagctccgcatcactcaacatcaggactgccaaggaggactttactctgcacttagaggacggaagctataacatcagaaaggacgatattatagcactctaccctcagctgatgcacctggaccccgagatttaccctgacccattgaccttcaagtatgataggtacctagatgagaatgggaagaccaagactactttttattgtaatggcctaaagctgaagtactactacatgcctttcggatcaggggccactatctgtcctggcaggctgtttgcaatccatgagattaagcaattcctgattctgatgctgtcttattttgagcttgagctgatcgaggggcaagcaaagtgccctccactggatcagagcagggcgggcttgggaattctgccgcctctgaacgacattgaattcaaatacaagtttaaacacctc

SEQ ID NO: 15525 - DNA, 1512 bp, Artificial Sequence
  derived and/or modified sequence
atgatgactacctctcttatctgggggattgcaatcgcggcatgttgctgtctttggctcattctgggtattcgccgtcggcaaactggagaacccccgcttgaaaatgggctgataccctacctggggtgcgcgttgcagttcggtgccaaccccctggagttccttagagcaaaccaacgtaagcacggacatgtctttacctgcaaactgatgggtaagtacgtccacttcattaccaatccgctgtcgtaccataaggtgctgtgtcacggaaagtactttgactggaagaagtttcattttgcaacctcagctaaggcatttggacacagaagcattgaccctatggacggaaacaccaccgaaaacattaacgatactttcataaagactttgcaagggcacgcgcttaactctctgaccgaatcgatgatggaaaatctccaacgcatcatgcggccacccgtgtcgtccaactcgaaaactgctgcctgggtaaccgagggaatgtacagcttttgttaccgggttatgtttgaagcaggctacctgaccatctttggccgggatttgacgcgccgcgatactcagaaggcacatattcttaacaacctggataactttaaacaatttgacaaagtgttccctgcacttgtggcgggactccccattcatatgttccggaccgcacataacgccagggagaagctggctgaatcacttcgccatgagaacttgcaaaaacgagaatcgatatcggaacttatctctcttcggatgtttttgaatgatactctgagcacctttgacgaccttgaaaaagccaagactcatctggtcgtgctttgggcaagccaggcaaatactattcccgccaccttttggtccctgtttcagatgatcagaaaccccgaagcaatgaaggcggcaaccgaagaggtgaagagaaccctggagaacgcaggacagaaggtgtcactggaaggcaacccaatatgtttgtcgcaagcggaactgaatgaccttcccgtgctcgattccatcatcaaagaatcgctgcgcctgtcctcagcatcacttaacatcaggactgcaaaagaagatttcactctccatctggaggatggctcctacaacattagaaaagatgacatcattgcactctaccctcagctgatgcatcttgatccagagatttaccctgacccactgacctttaagtacgacagatacctggatgaaaatggaaagacgaaaactactttttactgtaacggtcttaaacttaagtactactacatgccatttggcagcggagcgaccatctgtcctggacggctctttgcaattcacgagatcaaacaatttctgatattgatgcttagctacttcgagcttgagcttatcgaaggccaggctaagtgcccgcccctggatcaatcacgtgcagggcttggtattctgccacctctgaacgacatagaattcaaatacaaattcaagcacctg

SEQ ID NO: 15526 - DNA, 1512 bp, Artificial Sequence
  derived and/or modified sequence
atgatgactacctcacttatatggggcatagctatcgccgcctgttgctgtctgtggttgatactggggattcggagacggcagactggagagccacctctggagaatggcctcatcccctatctaggctgtgccttgcagtttggcgccaaccctcttgaattcctgcgggccaaccagcgtaagcacggacatgtctttacttgtaagctcatggggaagtacgtgcacttcatcactaatcctctctcgtatcataaggtgctgtgccacgggaagtattttgactggaaaaagttccattttgccacttctgccaaagccttcggtcaccgttcaattgaccctatggacggcaataccaccgagaatatcaacgatacattcataaaaaccctgcagggccacgccttgaactcactgaccgagtccatgatggagaatctacagcggatcatgcgccctcccgttagctctaatagcaagactgctgcgtgggtgacagagggcatgtactcattttgctatagagtgatgttcgaagccggctacctcaccatatttggccgggacctgactagacgcgatacccagaaagcccacatcttgaacaatctggacaattttaaacaattcgacaaagtcttccctgcgctggtagctgggctgccaatccatatgttcagaacggcccacaacgctcgcgaaaagctcgcggagagccttcgacacgaaaacctccagaaaagggagagtatttccgagctgataagtctgagaatgttcctgaacgatacactctctactttcgacgacctggaaaaggcaaagacacacctggtggtgctgtgggcgtctcaggccaatacaatccccgccaccttttggagcctgtttcagatgatccgcaacccagaggccatgaaagcagcaaccgaggaggtcaaacgcaccctcgagaacgcagggcagaaagtatctctggaaggaaacccaatttgtctgtcgcaggccgaacttaacgatctcccagtgctggactctatcatcaaagagtctctccgcctctctagtgcatcattgaacatcagaactgctaaagaggatttcacgttgcacttggaagatgggagctacaatattagaaaggacgacattatagcgctgtatcctcaattgatgcacctggaccctgagatctaccccgatcccttgacgtttaagtacgataggtatctcgatgaaaacggcaagaccaagacaactttttattgtaacgggctaaaactcaagtactactatatgcccttcggatcgggcgcaacgatctgccctggcaggctcttcgctatccatgagattaagcagtttttgatcctcatgctttcctattttgagttagagctaatcgagggccaggccaaatgcccccccctagatcagtcccgagcaggactgggcattctgcctccacttaatgatatcgaattcaagtacaagttcaagcatttg

SEQ ID NO: 15527 - DNA, 1512 bp, Artificial Sequence
  derived and/or modified sequence
atgatgactacttccctgatttggggcattgccattgccgcatgctgttgtctttggctgatccttggaatccggagacgtcaaacgggggaaccgccattggaaaacggtcttattccttacctgggctgtgcattgcagtttggggccaaccctcttgagttccttcgtgcgaatcaaagaaagcatgggcacgtgtttacttgtaagttgatgggtaaatacgtccacttcataacgaacccacttagctaccataaggtgctttgtcatgggaagtactttgattggaagaagtttcattttgccactagcgcgaaggcattcggtcatcgttccatcgaccccatggatggaaacactactgaaaacattaacgacaccttcataaagactcttcaaggacatgccctcaactcgcttaccgagtcaatgatggagaaccttcaaagaattatgcggccccccgtgagctccaattccaaaactgcagcatgggtgaccgaaggaatgtactcgttttgttacagagtcatgtttgaagcaggttacctcaccatttttggacgggatctgacccgtcgcgatacccaaaaggctcatatactcaataaccttgacaatttcaaacaattcgacaaagtgttcccagcacttgtggcaggactgcctattcatatgtttcgtactgcacataatgcacgggagaaacttgcggaatcgcttaggcatgaaaacctgcagaagcgggaaagcatctcagagctgatttcccttcggatgttccttaacgatactctttcaacctttgatgatctggagaaggcaaagacccatctggtcgtgctttgggcgtcgcaagcaaacaccattccagcaactttttggtcactgtttcaaatgattcggaaccctgaggcaatgaaagcagctaccgaagaggtgaagagaaccctcgaaaacgccggtcagaaggtgtcactcgaaggtaaccctatttgcctgtcccaagcggaacttaacgatctccctgtccttgattccatcattaaagaatcgctgagactgtcgtcggccagcctgaacattagaaccgcaaaagaagattttacccttcatctcgaagatggatcgtacaacatccgcaaagacgatatcattgcgctctacccacagcttatgcatctggaccctgagatttaccccgaccccctgacctttaagtacgaccggtacctggatgagaatggcaaaactaagacgaccttttactgtaacggcctcaagctgaaatactactacatgccttttggttccggggctactatatgccctggaagattgtttgcaatccacgaaatcaagcagttcctcattcttatgctttcctactttgagttggagcttattgaaggacaggcgaaatgccctccacttgaccaatctagggcgggcctggggatcctccctccattgaacgatattgaattcaaatacaagttcaagcacctt

SEQ ID NO: 15528 - DNA, 1512 bp, Artificial Sequence
  derived and/or modified sequence
atgatgactacctcgctcatttggggaatcgcaatcgccgcctgctgctgcctttggttgattctgggcattcggcgcaggcagaccggagaaccgccattggagaatgggctcatcccatacctgggatgtgctctccagttcggagcgaatccgctggagtttctgagagctaaccaacgcaaacacggccatgtgttcacctgcaagttgatgggtaaatacgttcatttcatcaccaacccgctgtcataccacaaagtgctgtgtcacggaaagtacttcgactggaaaaagttccacttcgctacttccgcgaaggcgttcggacacagatcgatagaccccatggatggcaatactactgagaacatcaacgacacctttatcaagactttgcagggacatgcgctgaactcactgaccgaatcaatgatggaaaacctccagcgcattatgaggcctcccgtctcatctaacagtaagaccgccgcctgggtgaccgaaggaatgtactcgttctgctaccgcgtgatgtttgaggcgggatacctcaccattttcggacgcgacctcaccaggcgcgacacccagaaagcccacatcctgaacaacctcgataactttaagcagttcgacaaggtgtttccggcgctggtggcaggcctcccgatccatatgttcaggacggcgcacaacgcgcgtgagaagctggctgaatccctcaggcatgaaaacttgcaaaagagagagagcatctccgaactcatcagcctgcgcatgttcctgaacgacaccctctcaaccttcgatgatctcgaaaaggccaagacccacctggtggtgctgtgggcatcgcaggctaatactatccctgcaaccttctggtcgctgtttcaaatgatcaggaacccagaggccatgaaggctgccactgaagaagtgaaacgaacgctggaaaatgccggacaaaaagtttcgctggaaggcaacccaatctgcctttctcaggccgaactgaacgacctgcctgtgctcgattcgatcattaaggagtcactgcggctgtcctcagcatccctgaacatccgcactgccaaggaagatttcactctgcatctcgaggacggttcatacaacatccgcaaggacgacatcatcgccctgtacccccagctgatgcatttggaccctgaaatctacccagaccctctgacctttaagtacgatcggtacctggatgagaacggaaagactaaaaccaccttctactgtaacggactgaaattgaagtactactacatgccattcggatcaggcgcaaccatctgcccaggacgactttttgcgatccatgaaatcaaacaattcctgatcctgatgttgagctactttgagctggaactgatcgagggacaagcaaaatgcccgcctctggatcaaagcagagccggcctggggatcctccccccgctcaacgacatcgagttcaagtataagttcaagcatctg

SEQ ID NO: 15529 - DNA, 1512 bp, Artificial Sequence
  derived and/or modified sequence
atgatgaccacgtccttgatctggggcatcgcgatcgccgcttgttgctgcctgtggctcatcctgggaatcagacgccgccagactggagaaccgcccctcgaaaacggactgattccgtacttgggttgcgccctccagttcggcgctaatccgctggagttcttgcgagcaaaccagcgcaagcacggacatgtgttcacttgcaagctgatgggaaaatacgtgcacttcatcaccaacccgctttcataccacaaggtgctgtgccacggcaagtatttcgactggaaaaaatttcatttcgccacgtccgccaaggcgttcggtcatcgtagcatcgacccgatggatgggaataccaccgagaatatcaacgatactttcatcaagaccctgcaaggacacgccctgaactcgctcaccgaatcgatgatggagaatctgcagaggatcatgcggcccccggtgtcctcgaactcgaaaactgccgcatgggtcaccgagggcatgtacagcttctgctaccgcgttatgttcgaggcagggtacctcactatctttggacgcgatctcaccagacgggatacgcagaaggcgcacatcctgaacaacctggataattttaaacaattcgacaaggtgtttcctgcactggtggcaggccttccgatccatatgtttcggactgcgcacaatgcccgcgaaaagctggccgaatcactgcggcacgaaaacctccaaaaaagagaatccatcagcgagctcatctcgctccgcatgtttttgaacgatactctctcgaccttcgacgacctggaaaaggcaaagactcatctggtcgtcctgtgggcttcccaggccaataccattccagctacgttctggtcacttttccagatgatcaggaaccctgaagccatgaaggcggccaccgaagaagtgaagcggaccctggaaaatgcgggacagaaggtcagcctggaaggaaacccaatctgtctgtcacaagccgaactcaacgaccttccggtgcttgacagtatcatcaaggagtccctgaggctttcgagcgcgtccctgaatattcgcactgctaaggaggatttcactctgcatctggaggatgggagctacaacatccggaaggatgacataatcgccctgtatccgcagttgatgcatctcgaccctgaaatttaccctgacccgctgacctttaaatacgaccggtacctggacgagaacggaaagaccaaaactactttctactgcaatggactcaagttgaagtactactacatgccattcggctctggagcaaccatctgtcccggtagactgttcgctatccacgagatcaaacagttcctgattctgatgttgtcgtactttgaactcgagctgattgaggggcaagcgaaatgcccaccactcgaccaatcaagagccggtctgggaatcctcccacctcttaacgacattgagttcaagtacaagttcaagcacctc

SEQ ID NO: 15530 - DNA, 1512 bp, Artificial Sequence
  derived and/or modified sequence
atgatgaccactagccttatttgggggatcgcaatcgcagcatgttgctgcctttggctcatccttggaataagacgacggcagacgggggagccacctctcgaaaacggactcatcccctacctgggatgtgccctgcagtttggagccaacccccttgaatttctgcgtgcaaaccaacggaaacacggacatgtgtttacttgtaaactgatgggaaagtacgtgcactttatcacgaatcccctttcgtaccataaggtcctgtgtcatggcaaatactttgattggaagaaattccattttgccacgtcggcaaaggcttttggccatagatccatcgaccctatggacggcaataccacggaaaacattaacgacactttcattaagactcttcagggacacgcgcttaactcactgactgaatccatgatggaaaacctccaacggataatgcgtcctccagtgagcagcaacagtaagacggctgcctgggtgactgaaggaatgtactcgttctgttacagagtgatgtttgaagcgggctacctgaccattttcggaagggacctgactcgccgcgacacccagaaggcacatatccttaacaacctcgataacttcaaacaatttgataaggtgtttcctgccctggttgcgggacttccaattcatatgtttcgtactgcacataatgcacgcgaaaagctcgcagaaagcctgcgccatgaaaaccttcaaaagagagaatcaatttcggaactgatttcgttgcggatgttcctgaatgatactctttcgactttcgatgatctggaaaaggcgaaaacccatcttgtggtgctgtgggcgtctcaagcaaataccatccctgcaaccttttggtcactgttccaaatgatcagaaatccagaggcgatgaaggcagcgacggaggaagtgaagcgcaccctggagaatgcaggccaaaaggtgtcgctggaaggaaaccctatatgcctgtcccaagcagaactcaacgacctgcccgtccttgattcaatcatcaaagaatccctgagactgtcgtcggcatcccttaacattagaacggcaaaggaggattttactctccacctggaagatggatcgtacaacatcagaaaggatgacataattgcactctacccacaactcatgcacctggaccctgaaatctacccagatcctcttaccttcaaatacgacagatatcttgatgagaatggtaagactaagactaccttctactgtaatgggctcaaactgaagtactactacatgccctttgggtcaggagccactatctgtccaggcagacttttcgcaatacacgagatcaagcaatttctgatactgatgctgtcctattttgagctggaactcattgagggacaggcaaagtgtccaccccttgatcagtctcgcgcaggtctgggaattctccccccacttaacgatatagaattcaagtacaagtttaagcatctt

SEQ ID NO: 15531 - DNA, 1512 bp, Artificial Sequence
  derived and/or modified sequence
atgatgactacaagtttaatctggggcatcgccattgccgcttgctgttgtctatggctaatactcggcatccgccgcaggcaaactggcgaacctcccctggaaaatgggcttattccgtacttgggatgcgccttgcaatttggtgccaaccctctggagttcctcagagccaatcagaggaagcacgggcatgtgttcacctgtaaattgatgggcaagtacgtgcactttatcaccaatcccctatcctaccataaggtgctctgccatggtaaatatttcgactggaagaaattccattttgctacctccgctaaggctttcggccataggtctatcgatcccatggacggtaataccacagagaatataaacgatacctttatcaaaactctgcagggacatgcgcttaacagtcttacagaatcaatgatggaaaatcttcaaagaattatgcgcccacccgtgtcttccaattctaagactgccgcgtgggtgaccgagggtatgtactccttctgctatagggttatgttcgaggctggatatctcaccatctttggtcgggatctaactcgtcgtgacacccagaaggcacacatactcaataaccttgacaacttcaagcagttcgacaaagtcttccccgccctcgtggcaggactccccattcacatgttcagaacggctcataatgcacgggaaaagctggccgagtcccttcgtcacgagaacctgcagaaaagagaatctatttctgagttgatatcgctccgcatgttcctgaatgataccttatcgaccttcgacgacctcgagaaagctaagacccatttggtcgtgctttgggcctcacaggccaacactatccccgcgacattttggagcttgttccagatgatccggaatccggaggcgatgaaagccgctacggaggaggtcaagcgaacactggaaaatgctggtcagaaggtgtccctcgaagggaaccccatttgtctgtctcaggctgagctcaacgatctccctgttctcgactccattatcaaggagtccctaagattgtcctcggctagcttaaacatccgaacagccaaggaagacttcacacttcatctggaggacggatcgtacaacattcgcaaggatgatattatcgcgttgtacccacaacttatgcatctcgaccccgagatttatcccgacccccttacctttaaatatgatcgttatctcgacgagaatggtaagaccaagacgacattctactgtaatggcctcaagcttaaatactactacatgcccttcggttctggcgctaccatttgtcctggtaggctcttcgctatccacgaaataaagcagtttctcatcctcatgctctcatacttcgaactggaattgatcgaggggcaggcgaaatgccccccccttgaccaaagccgtgcaggcttggggatcctccctccacttaacgacattgagttcaaatataaatttaagcatttg

SEQ ID NO: 15532 - DNA, 1512 bp, Artificial Sequence
  derived and/or modified sequence
atgatgaccacgtccctcatttgggggatcgcaatcgccgcgtgctgctgcttgtggctcatacttggaattaggagacgacaaaccggagaaccacctctggaaaatggactgattccttacttgggttgtgcacttcaattcggagcgaatccgcttgaattcctgcgagcaaaccaaagaaaacatggtcatgtgtttacgtgtaagctgatggggaagtacgtgcactttatcaccaacccattgtcctaccacaaagtgctctgccacggaaaatacttcgattggaaaaagtttcattttgcgacttccgcaaaggcattcggacatagatccattgacccaatggatggcaataccactgaaaacattaatgatacctttatcaaaacgctccaaggtcatgcgctcaattcgttgaccgagtcaatgatggagaaccttcagcggatcatgcgcccacctgtgtcatcaaactcgaaaactgcagcttgggtcaccgaaggtatgtactccttctgctaccgggttatgttcgaagcagggtaccttactatattcggcagggaccttaccaggagagatacccaaaaggcccacatactgaacaaccttgacaactttaagcagttcgataaagtgtttccagcgctcgtcgcgggactcccaattcacatgtttagaactgcgcataatgcccgggagaagttggcagagtccctgagacatgagaatctgcagaagcgcgaaagcattagcgagcttatctcgcttcgaatgtttctgaacgatactctgagcaccttcgatgacctggagaaggcaaagacgcatctcgtggttctgtgggctagccaagcaaacaccattccagcgacgttctggtccctcttccagatgatccgtaaccctgaggcgatgaaggcagcaaccgaggaagtgaagagaacccttgaaaacgctgggcagaaggtcagcctcgagggtaaccccatttgtctctcgcaagccgagctgaatgatcttccagtgcttgattccatcataaaggaatccctgcggctctccagcgcgtccttgaacatccgtactgcaaaggaagattttactctgcatcttgaagatggatcatacaacataagaaaagacgacatcatcgctctgtatcctcagcttatgcatttggatcctgagatttacccagatcccctgactttcaagtacgatcgctaccttgatgagaacggtaagactaagactaccttttactgtaatgggttgaaacttaagtactactacatgcctttcgggtcgggcgcaactatttgtcctggccgtttgttcgccattcatgagatcaagcaatttctgatccttatgctcagctactttgaattggaacttatagaaggccaggcaaagtgtcctcctctcgatcagtcgagagcaggccttggcattcttccccctcttaacgacatcgagttcaagtacaaattcaaacacctt

SEQ ID NO: 15533 - DNA, 1512 bp, Artificial Sequence
  derived and/or modified sequence
atgatgacaacgtccttaatttggggtatagcaattgccgcttgttgttgtctctggttaatcctcggaatcaggcgcagacagacaggggagcctccactggaaaatggactcataccctatctgggttgtgccctgcaatttggggccaatccgctggaattcttacgtgctaatcagcggaaacacggtcacgtctttacatgtaagctcatgggcaaatatgtccattttatcactaatccactgtcctaccacaaggtactgtgtcacgggaaatattttgattggaagaagttccactttgccacgtccgcaaaagcattcgggcatcggagcatcgatccgatggatggcaacaccacagaaaacattaatgataccttcataaagacactccaaggtcacgcactgaactccctgactgagtcaatgatggagaacctccaaagaatcatgcgccccccggtatcctcgaactccaaaaccgccgcatgggtgactgaaggaatgtactctttttgctatcgggtcatgtttgaagccggctatttgacaatttttgggagagatctgacacggcgtgacacacagaaagcccacatcctaaataatttagacaatttcaagcagttcgataaagtgtttccagctttggtggctgggctgccaatccacatgtttcgcaccgctcacaacgcgcgggagaagctcgcggagtctctccgacacgagaacctgcagaagagagaatcaatatccgagctgatttctctgcgcatgtttctgaacgatacactgagtacctttgacgatctcgagaaggcgaaaacccaccttgtagtactgtgggccagccaagcaaatacgataccagccaccttttggtcactcttccagatgataaggaaccctgaagctatgaaggctgcaacagaggaagtcaagagaacacttgagaacgctgggcagaaagtctccttggagggcaacccgatatgtctgagccaggcagagttgaatgatctgcctgtgttggactccatcatcaaagagtctctccgcttatcttctgccagtctgaacattaggacagctaaagaagacttcacactccacctagaggacggctcatacaacatcaggaaagacgatatcattgctctgtatccccaactcatgcatctggacccggagatttatccggatcctttgacgtttaaatacgatcggtatctggacgaaaatggaaagaccaaaacaaccttctactgtaatggactgaaactgaaatactactacatgccattcggatccggtgccaccatttgccctgggcgccttttcgccattcacgaaatcaagcagttccttatcctgatgttatcttatttcgagttggagctcatcgagggtcaagcaaagtgccctcccctggaccagagccgggctggactgggaattcttcctcccctcaatgatattgagttcaaatacaaatttaagcacctg

SEQ ID NO: 15534 - DNA, 1512 bp, Artificial Sequence
  derived and/or modified sequence
atgatgaccacatcactgatctggggaattgctattgcagcgtgctgctgcctgtggctgattttaggcatccgcagaagacagactggcgaacctcccttggagaacggtctcattccatacctcggctgcgctctgcagttcggggccaacccacttgagttccttagggcgaaccaaaggaagcatgggcacgtgtttacatgtaagctgatgggcaaatacgtccatttcatcacgaatccacttagctaccataaggtgctgtgtcacggcaaatattttgattggaagaaatttcactttgcgacatcagccaaagcttttggccacaggagcatcgaccctatggacgggaacaccaccgaaaacatcaacgacacatttattaagaccctgcagggccatgcactcaactcattgaccgaatccatgatggaaaatcttcagcgcataatgagaccacctgtgtcctctaacagcaagaccgcagcctgggtcaccgagggaatgtatagcttctgctacagggttatgttcgaggctggatatctgacaatcttcggcagagatctgactcggagggacacacaaaaggcacacattttgaacaacctggataatttcaaacaattcgataaggtttttccggccctcgtggcggggcttcctattcacatgttcagaactgcccataacgcaagagaaaaactggctgaaagcctgagacatgagaatctgcagaaaagggagtcaatcagcgaactgatctcgctgcggatgtttctgaacgacactctgtcgacattcgatgacttggaaaaagctaaaacccatctggtggtcctctgggccagtcaggcaaacaccatcccggcaaccttctggtccctttttcagatgattcggaacccagaggctatgaaggcggccacagaggaagtcaaacgaacattggaaaatgctggacaaaaagtgtcactggaaggaaatcctatctgcctctcgcaggcagagctcaacgatctgcctgtgctcgattctattatcaaggaaagcctgcgcttgagctcagcaagcctgaatatcagaacagccaaggaagactttacactgcaccttgaagacggaagttataacattaggaaggacgatatcattgcgctttatccgcaactgatgcatctggaccccgagatctacccagatcctcttacatttaagtacgacaggtacctggacgaaaacgggaaaactaagaccactttctactgcaacgggctcaaactcaagtattactacatgcctttcggaagcggagccaccatctgtcctggacgtctgttcgcaattcacgagatcaaacagttcctaatcctgatgctttcatactttgagctagaactgattgagggtcaagccaagtgccctccactcgatcaaagcagggcagggctgggtatccttccgcctttgaatgatatcgaattcaaatataaatttaaacaccta

SEQ ID NO: 15535 - DNA, 1512 bp, Artificial Sequence
  derived and/or modified sequence
atgatgactacgtccctgatttggggtatagctatcgctgcttgttgctgtctttggcttattctgggtattagacgtcgacaaaccggagaacctccactggagaatgggcttatcccctacctgggttgcgcgcttcaattcggagcaaacccactcgagttcttgagagcaaaccaacgcaagcacgggcatgtgttcacctgtaagctcatgggaaagtacgtgcatttcataacgaaccctctttcgtatcacaaggttctttgtcacgggaagtacttcgactggaagaagttccactttgctactagcgccaaagcatttggccatagatcaatcgacccgatggatggtaatacgaccgaaaacatcaatgacacgttcattaagactctccagggacatgcattgaactccctgaccgaatcaatgatggaaaacctccagagaataatgcggcctccagtctcttccaacagcaaaactgcagcatgggtgactgaaggtatgtacagcttttgttaccgggtcatgtttgaagcaggttacctgaccatctttggcagggatctgactcgccgcgatacccaaaaagcccatatactgaacaacctggacaactttaaacaattcgataaagtctttccagcactcgtggcagggcttcccatccacatgtttaggaccgcacataatgcaagggaaaagctcgcggaatcgcttagacacgaaaatcttcaaaagagagaatccatttcagaacttatttcgctccgcatgtttcttaatgatactttgtcgacctttgacgatctggaaaaagccaagactcatcttgtggtgctttgggcatcgcaagcaaataccatcccagcaaccttttggtcgctttttcagatgatccgcaatcctgaagcgatgaaggcagccaccgaagaagtgaaacggactttggagaatgccgggcaaaaagtgtcccttgaaggcaacccaatctgcctttcgcaggcagagctgaatgacctcccagtcctggactcgataatcaaggaatcactgcgcctcagctccgcctccctcaacattaggaccgcaaaggaggacttcaccctgcaccttgaagatggttcctacaacatacgcaaggatgacataattgccctctacccccagcttatgcacctcgatccagagatatatcctgaccccctcacttttaagtacgaccgatacctggatgagaatggtaaaactaagactacgttttactgcaatggccttaagctcaaatactattacatgccattcggatcgggtgccaccatttgtccggggcgcctttttgcgatccatgaaatcaaacagtttcttattcttatgctttcctactttgagcttgaacttatcgaaggccaagctaagtgtccccctttggaccaatcgcgcgccggacttggaatccttccgccactgaacgacatcgaattcaagtacaagtttaagcatctc

SEQ ID NO: 15536 - DNA, 1512 bp, Artificial Sequence
  derived and/or modified sequence
atgatgactacgtctcttatctggggaatcgcgattgccgcctgctgctgtctctggctgatccttgggatcagacggaggcaaaccggtgaacctccgttggaaaacggtctgataccatatctcggctgcgccctgcagttcggagcaaatcccctggagttcctgagggcaaaccagcgaaagcacggccatgtgtttacgtgtaagctgatgggaaaatacgtgcactttatcactaatccactctcctaccacaaggtgctttgccacggcaagtatttcgattggaagaagtttcactttgctacctcggctaaggcgttcggccaccgtagcattgatcctatggatggaaataccactgagaacatcaacgacaccttcattaagacgctgcaggggcatgccttgaactcattgactgaatcgatgatggaaaacctgcagagaatcatgcgccccccggtcagctcgaactctaaaaccgccgcctgggtgacggaaggaatgtacagtttctgctaccgggtcatgttcgaagcgggatacctcaccatctttggccgcgacctcacccggcgcgatactcagaaggcccacatcctcaacaacttggacaactttaagcaatttgataaagtgttcccggcactcgtggcaggactcccaatccacatgtttcgcactgcccacaatgcacgcgagaaactggcagaatcgcttagacatgagaatcttcaaaagagagaatcaatcagcgaactgattagtctccgcatgttcctgaatgacactctctccacttttgacgatttggaaaaagcaaagacccatctcgtggtcctgtgggcgtcgcaggcaaacactatcccggctaccttctggtcactgttccaaatgatacgaaatccagaggcaatgaaagccgctaccgaagaagtcaagagaaccctggagaacgcggggcagaaagtgtcactcgagggcaatccgatctgcctgtcgcaggctgagctgaacgacctgccggtcctggactccatcattaaggagagcctgcgcctgtcgagcgcctctctgaacatcagaacggcaaaagaggacttcactctgcacctggaagatggttcctacaatatcagaaaggatgacattatcgcgctgtaccctcagctgatgcacctcgacccggaaatctacccagacccactcactttcaagtacgatcggtacctggatgagaacggcaagaccaagaccaccttctactgtaacggattgaagttgaagtactattacatgcccttcggctcaggagccactatttgcccgggacggctctttgccattcatgagatcaagcagttcctcatcctgatgctcagctacttcgagttggaactcatcgaagggcaggccaagtgcccgccgttggatcaatcccgcgcaggtctgggaatacttcctccgctcaacgacatcgagtttaagtacaaattcaaacatctg

SEQ ID NO: 15537 - DNA, 1512 bp, Artificial Sequence
  derived and/or modified sequence
atgatgaccacctcgctgatttgggggatcgcgatcgcagcctgctgctgcctgtggctcatcctcggaatccgcagaaggcagactggagaaccaccgcttgagaatggactgatcccgtacctgggctgcgcccttcagttcggagcgaaccctctcgagtttctgcgcgccaaccagcgcaaacatggacacgttttcacctgcaagctgatgggcaagtacgtgcacttcattactaacccgctgtcataccacaaagtgctgtgccacgggaaatactttgactggaagaagttccacttcgcgacctcggcgaaggcatttggacacaggtcgatagatccaatggacggaaacaccactgaaaacattaatgacacctttatcaagactctccagggacacgctctcaattccctgactgaatccatgatggaaaacctccagagaatcatgaggccccccgtctcgtcgaactcaaaaaccgccgcgtgggtcaccgagggcatgtactcgttttgttaccgtgtgatgtttgaagccggatatctgaccatcttcggacgggatttgactcgcagggatactcaaaaggctcacatcctcaacaacctcgataactttaagcagttcgataaggttttcccagctctggtggctggactgccaatccacatgtttaggactgcccacaatgcccgggagaagctcgcggagtcgctccggcatgaaaacttgcagaaacgcgagtccatcagcgagctgatctcactgcggatgttcttgaacgataccctgtcgacgttcgacgatctggagaaggcaaagactcatctggtggtgctgtgggcgtcacaagccaacaccatccctgcaactttctggtccttgttccagatgatcagaaatccggaagcgatgaaggccgccactgaagaggtcaagagaacgcttgaaaacgccggccagaaggtgagcctcgaaggcaatcctatctgcctcagccaagccgaactgaatgacctgccagtgttggactccatcattaaggagagcctcaggctttcgtcagcctcccttaacatccgcactgcaaaagaagatttcaccctgcatttggaagatggatcctacaacattaggaaggacgacatcatcgctctctacccgcaactcatgcacctggacccggaaatctaccctgacccactgactttcaagtacgaccgctacttggacgaaaatggcaaaaccaagaccaccttctactgcaatggacttaaactgaaatactactacatgccattcggctcaggcgctacgatctgtccaggccggctcttcgctatccatgagatcaagcagttcctgatcctgatgttgtcgtatttcgagcttgaactgattgaaggccaggctaagtgccccccactggaccagtcacgggcgggattgggaatcctgccgccgctgaacgatatcgaattcaagtacaagtttaagcatctc

SEQ ID NO: 15538 - DNA, 1512 bp, Artificial Sequence
  derived and/or modified sequence
atgatgaccacaagcctgatatgggggattgctatagccgcctgttgctgcctgtggctaatcctcggcatcaggcggaggcaaacaggcgagcctccactggaaaatgggttgatcccctacctaggatgcgctctccagtttggggctaatccgctcgagttcctgagggcaaaccagcgaaaacacggccacgtttttacctgcaaactcatgggcaagtatgttcactttataacaaatcctctttcttatcataaagtgctgtgtcatgggaagtatttcgactggaaaaaatttcacttcgctacatccgccaaagctttcggtcataggtccattgatccaatggacggtaatacaacagaaaatatcaacgatacctttattaaaactttacagggccatgccctcaacagcctcaccgagtctatgatggagaatcttcaaagaattatgagaccacctgtgagcagtaactcaaaaacagctgcctgggtgaccgagggcatgtatagcttttgttacagggtcatgttcgaggccggctacctgacaattttcgggcgggatctgactagaagggatacacagaaggcccacattttaaataatctcgacaactttaaacagtttgacaaggttttccctgccctggttgctggactgcccatacacatgtttagaaccgctcacaacgctagagagaagttggctgagagccttcggcatgagaatttacagaagcgggaaagcataagtgaactcataagcttgaggatgtttctaaacgatacactgagcaccttcgatgatctggaaaaagcaaagacccacctggttgttctatgggcatcacaggcaaacaccatccccgccaccttttggagtctgttccagatgattagaaatccagaagctatgaaggctgctactgaggaagtaaagcgaacactggagaacgctggccagaaggtgtccctggagggaaatcctatctgcctctcccaggctgagctgaacgatctacctgtcctcgacagcataattaaggaatccttaagactgtcaagtgcatctctgaatataaggaccgctaaggaagatttcactctgcacctggaggacggatcctacaacattaggaaggatgatattattgctctgtaccctcaactgatgcacctggatccagaaatctatcccgatcctctaacttttaagtatgacaggtatctggatgagaacggaaagaccaagacaaccttttattgtaacggcttgaagctaaagtattattatatgcccttcggaagcggggccaccatatgccccggaagattattcgccattcacgaaattaagcagttcttaatcctgatgctaagctattttgagctggaactgatagaaggtcaggctaagtgccctcctctagatcagagcagggctgggctcggcatactgcctcccctgaacgatatcgagtttaagtacaaattcaagcattta

SEQ ID NO: 15539 - DNA, 1512 bp, Artificial Sequence
  derived and/or modified sequence
atgatgacaacttctttaatatggggaatcgccatagcagcgtgctgttgcttgtggctcattctcgggattcgccgcagacagaccggggagccccccctcgagaatgggctgattccctatctggggtgtgcgctacaattcggtgccaatcccctcgaatttctgagggccaatcagcggaagcatggtcatgtgtttacttgcaaactgatgggcaagtacgtgcactttataacaaaccccctttcatatcacaaggtactctgtcacgggaagtacttcgattggaaaaaattccatttcgcaacatctgcgaaagcatttgggcaccggtctatagatccaatggatggaaacacaactgaaaatattaacgacacctttattaagacactgcagggtcatgccctcaacagcctcaccgagtcaatgatggaaaacttacagcgtattatgaggccacctgtaagcagcaactctaagaccgcggcatgggtcactgaaggcatgtactccttttgttaccgggtgatgttcgaggccggttaccttaccatttttggacgggacttaaccaggagggatacccaaaaggcccacattctgaataatcttgacaactttaagcagttcgacaaagtattccccgcactggtggcgggccttccaattcatatgttcagaaccgcccacaacgcaagagaaaaactggccgagtcactacgtcacgaaaacctgcaaaaacgggaatcaatttccgagctgatttctctgagaatgttcctgaatgataccttgagtacctttgatgatcttgagaaggctaaaactcatcttgttgttctgtgggccagtcaggccaacacgatccccgcaacgttttggagcttatttcaaatgatcaggaatccagaggccatgaaggcagccactgaagaggtcaagcggaccttggagaacgcaggtcaaaaagtgagtttggaggggaatccaatttgtctatcgcaagccgagctgaatgatctgccagttttggattccataattaaagaatcattgcgtctgagtagtgcatcgttaaacataaggactgcaaaggaggatttcaccctccacctggaggatgggagctacaacatccgaaaagatgatatcatcgccctataccctcaactgatgcacctggaccctgaaatttaccccgatcccctgacgttcaagtacgacaggtacctggacgagaacggtaagactaagactacattctactgtaacggcttgaaacttaagtattactatatgcctttcggcagcggggctaccatttgccctgggcggctgtttgctatacatgaaattaaacagtttctcattctcatgctgagctactttgagctggaattaattgaaggacaagcaaaatgtcctcccttagaccagtctcgagcaggtcttggcatcctccctccattaaacgacatcgaattcaaatataagttcaaacatctt

SEQ ID NO: 15540 - DNA, 1512 bp, Artificial Sequence
  derived and/or modified sequence
atgatgactacttcactgatctggggtatagcgatcgccgcttgctgttgtctgtggctgatcttgggaatcaggcggagacagaccggagagcctccactggagaatggcctgatcccatacttggggtgcgcccttcagttcggggcgaatcctctagaatttctgcgggcgaatcagcgcaagcatggccacgtgttcacgtgcaaactgatgggaaagtacgttcacttcattactaacccccttagctaccacaaggttctgtgccacggcaagtacttcgattggaagaaattccacttcgccacctctgcgaaggcattcgggcatcggtctatagatcccatggacggtaatacgacggagaacatcaacgatacctttatcaaaacattgcaggggcacgctttaaacagtctaactgaatccatgatggagaacctgcagcgcataatgagacctcccgtttccagtaacagcaagacagccgcctgggtgaccgagggaatgtattcattttgctatagggttatgtttgaggctggttatctgacaatcttcgggagggacctgacgagaagagatactcaaaaggcacacatcctgaacaacctcgacaacttcaaacagtttgacaaggtgtttcccgccctcgtggccggtctgccgatccatatgttcaggactgcccataacgccagagaaaagctggcagagtccctgcgccacgaaaatctgcaaaagagggagtctatcagcgagttgatttcactgagaatgtttctgaatgatacactctcaaccttcgatgacctggagaaagccaaaacccatctagttgttctgtgggccagccaggctaatacaatcccagcaaccttctggagcctgttccagatgattagaaatcctgaagctatgaaggcggccacagaagaggtcaagcggactttagagaacgccggccagaaagtgtccttggagggcaatcccatatgcctgtctcaggccgagcttaacgacctgcccgtgcttgacagcatcatcaaagaaagcctgcgattgtctagcgcctccctcaacatccgcaccgctaaagaggacttcacgctacatctcgaggacgggtcttataatattcggaaagacgacatcattgccctgtatcctcagcttatgcatctggaccctgagatctatcccgatcctctaacatttaagtacgaccgatatctggacgaaaacggaaagactaaaactactttttactgcaatggattaaagctgaagtactattacatgcctttcggcagtggggcaactatttgcccaggccgactgtttgctatacacgaaattaagcagttcctgatcctgatgcttagctactttgagctcgagctcatagaaggccaggccaagtgtccccctctggatcagtccagggccggccttggtatcttgccaccactgaacgatatagagttcaagtataagtttaagcacctg

SEQ ID NO: 15541 - DNA, 1512 bp, Artificial Sequence
  derived and/or modified sequence
atgatgactacctctctgatatggggtatcgccatcgctgcctgttgctgcctgtggctaatcctcggaataagaaggcgtcaaaccggggagccaccactggagaatggcctcataccgtacctggggtgcgccctgcagttcggcgctaatcctctggaatttctccgagctaatcagcgcaagcacggccacgtgttcacctgcaagctgatgggcaagtatgtgcacttcattaccaaccctctgagttaccacaaagtactctgccacggcaaatactttgactggaagaagtttcatttcgcgacgtctgctaaggcattcggacaccggtctattgatcctatggacgggaacacaaccgagaacatcaatgacactttcattaaaactttgcaaggccatgctcttaactcactgaccgaatcaatgatggagaacttgcagagaatcatgcggcctcccgtttcaagcaacagtaagacggcagcctgggtgaccgaaggcatgtactcattttgctatagggtgatgtttgaagcgggctatctgacaatttttggcagggatttaacccggagagatactcaaaaagctcatattctgaataacctggacaattttaaacagtttgacaaagtgttccccgcacttgtggccggattgcccatccatatgttccgaacagcacacaatgctagggagaagctcgccgaatctctccgccatgagaacctacagaagcgcgagtccatctccgagcttatctccttgcgcatgttcctcaatgacacgctctcaactttcgacgatctggagaaggccaaaacacatctggtcgtcctctgggcaagccaagccaatactatccctgccaccttttggagcctgttccagatgatccgcaaccctgaggccatgaaggctgccaccgaagaggtgaagcgtacgctggagaatgcgggacagaaggtgagcttggagggcaatcctatctgcctgtcccaggccgagctgaacgatctgccagtgttggatagcataattaaagagtcccttaggctgagcagcgccagtttgaatataagaaccgcgaaggaagacttcaccctccacctcgaggacggctcatacaacataagaaaggatgacattatagccttgtacccacagttgatgcacctggaccccgaaatttatcctgaccccctgactttcaagtatgatcgctatttggatgaaaatggcaagaccaaaacaacgttctattgtaatggactcaaacttaagtactattacatgcctttcgggtccggggcaaccatttgccccggccgactctttgccatccatgagatcaaacaattccttatactgatgctgtcctactttgagctggaattgatcgaaggtcaggcaaaatgtccgcctctggaccaaagccgcgcaggactgggaatccttcctcccttaaacgatatcgagttcaaatacaagtttaagcatctg

SEQ ID NO: 15542 - DNA, 1512 bp, Artificial Sequence
  derived and/or modified sequence
atgatgactacctcgttgatctggggtattgcgattgcagcctgttgttgcctgtggcttatcctcgggattagaagaaggcagactggagagccgcccctggaaaacggcctcattccgtatcttggttgtgcgcttcaatttggtgctaatcctctcgaattcttgagagcgaaccaacggaagcacggacatgtttttacttgcaagctcatgggcaaatacgtccacttcataaccaaccctctctcctaccacaaagtgctgtgtcatggtaagtacttcgattggaaaaagtttcattttgctacgagcgcaaaggcttttggacaccgttcgatagatcccatggatggcaacactactgaaaacataaacgatacttttatcaagactcttcaggggcatgcactgaattcgctgaccgaatcaatgatggaaaaccttcaacggattatgcgaccgcccgtcagcagcaacagcaagactgccgcatgggtgaccgaagggatgtactcgttctgctaccgcgtgatgtttgaagcaggatacctgaccatatttggaagggacctgacccgcagggacactcagaaggcacatattctcaataatctggataacttcaagcaattcgataaggtgtttccagccctggtggccggacttccaattcatatgtttcgaactgcacacaatgcacgtgagaagctggcagagagcctcagacatgaaaacctgcaaaaaagggaatcgatttccgagttgatctcgcttaggatgtttctcaacgataccctcagcacgtttgatgatcttgaaaaagcaaagacccatctcgtagtgctgtgggcctcgcaagcgaataccattcccgcgactttttggtccctgtttcagatgataaggaatccagaagccatgaaagccgccactgaagaggtgaagcgcacccttgaaaacgcaggtcaaaaggtttctcttgaaggtaaccccatttgtctttcgcaggcagagttgaacgatcttccagtgctcgattcgataatcaaagagtctctgcggctgtcatccgcaagcctgaatatcaggactgcgaaggaggatttcaccttgcatttggaggacgggtcatacaacatcagaaaagacgacatcattgcgttgtacccccagcttatgcatctcgatcctgaaatctaccctgacccactgaccttcaaatacgaccggtacctggacgaaaacggtaaaaccaagaccaccttttactgtaatggtttgaagctcaagtattactatatgccgtttggctcgggtgcaaccatttgtcctgggagattgttcgcaatccatgagattaaacaatttctgatcctgatgctgtcatacttcgagcttgagttgattgaaggacaggcgaagtgcccaccgctcgatcaatcacgagctggactcggaattcttccgcctttgaacgacattgagttcaaatacaagtttaagcacctt

SEQ ID NO: 15543 - DNA, 1512 bp, Artificial Sequence
  derived and/or modified sequence
atgatgactacctcactcatttgggggatcgcaatcgcggcatgctgttgcttgtggctcatccttggtattaggaggcgtcaaaccggtgaacctcctctggaaaacggtcttatcccttacctgggttgcgcactgcagtttggtgctaaccccctggaattccttcgcgcaaatcagcgaaaacatggacatgtgtttacgtgcaagctgatgggcaagtacgtgcactttatcaccaatcctctgtcataccacaaggtgctgtgccacggtaaatactttgactggaagaagttccattttgccacctccgccaaagcatttgggcatcggagcattgacccgatggatggaaacactaccgaaaacatcaatgacacctttatcaagactttgcaaggacatgcactcaattccttgaccgaatcaatgatggagaacctccaaaggatcatgcgccctccagtctcttccaattcgaaaactgctgcatgggtgaccgagggaatgtactcgttttgttaccgtgtgatgttcgaagcgggatacctgactattttcggtagggaccttactcgtagagacacccagaaggcacacatccttaacaacctggacaactttaagcaatttgataaggtattccctgcactcgtcgccggactcccaatccacatgtttagaactgcacataatgcacgcgagaaattggccgagagccttagacatgagaatctgcaaaagcgggaatccatatccgaactgatctcgctgagaatgtttcttaacgatactctttcgacttttgatgatttggaaaaggcaaaaactcatctcgtggtgctttgggcttcccaagccaacactattcctgcaacgttttggagcctctttcaaatgatccggaacccagaagcaatgaaagcagcgaccgaagaagtgaagcgtactctggagaacgctggtcaaaaagtctcccttgaaggcaacccaatttgtctgtcgcaggccgagctgaacgatctccccgtgctggactcgattatcaaggaatcccttcgcctgtcgagcgccagcctcaatattcgcaccgcaaaagaagatttcactctccatctggaagatggttcatataacataagaaaagacgacattatcgcactctaccctcagcttatgcatctggatcccgaaatctacccggacccacttacgttcaaatacgacagatatcttgatgaaaatggaaaaaccaagactactttttactgcaacggccttaaactgaagtactattacatgccctttggatccggagccaccatttgtcctggacgcctgttcgcaatccacgaaatcaagcagttccttattctgatgcttagctattttgaattggaactgatcgaaggccaggcaaaatgtcccccacttgatcaatcacgcgcaggtcttggaattctgcctccacttaacgatattgaattcaaatacaagttcaaacatctt

SEQ ID NO: 15544 - DNA, 1512 bp, Artificial Sequence
  derived and/or modified sequence
atgatgaccacctctcttatctggggtatcgctatagctgcttgttgttgcctttggctgatcctgggcataagacgcaggcaaaccggagaacctccactcgaaaacggcttgatcccctacctgggctgcgccctgcagtttggagcaaacccacttgagtttctgagagccaaccagaggaagcacggacatgtttttacatgcaaactcatgggaaagtatgtgcacttcatcactaacccactttcataccataaggtcctttgtcacggaaaatactttgattggaagaagtttcacttcgcaacaagcgcaaaagcttttggtcataggtctattgaccctatggacggtaataccactgagaacatcaacgataccttcattaagactctccagggccatgctcttaactcattgaccgaatctatgatggaaaatcttcagaggatcatgcgccctcctgtgtcatccaactccaaaacagctgcctgggtaactgagggaatgtattctttctgctatcgcgtaatgttcgaggctggttacttgactatcttcggtagggatctgacaaggagagacacccagaaagcacatattctcaacaatctggataactttaagcagtttgacaaagtgttcccagcacttgtcgctggcttgccaattcatatgtttcgcactgcccacaacgcccgcgaaaagcttgccgaatcactgaggcacgagaatttgcaaaagagggagtccatctcagaacttatatctctgcgcatgtttttgaatgatacactgtctacttttgatgacctcgaaaaggccaagactcatctggtggtcctttgggcttcccaagcaaacactatccccgctactttttggagtttgttccaaatgatcaggaacccagaggctatgaaagcagctaccgaggaggtgaaacgcacactggagaacgccggacagaaggtgtcactcgaaggaaacccaatctgcctctcacaagctgaactgaacgacctccccgtgttggactccatcatcaaggagagcttgcgtctgagttcagctagtttgaacataaggaccgctaaggaggacttcaccttgcacctggaggatggcagttacaatatccgtaaggatgatataatcgccctgtacccacagctgatgcacttggaccccgagatctaccctgaccccctgactttcaagtatgaccgttatctggatgagaacggcaaaacaaagaccaccttctactgcaacggactcaagttgaaatattattacatgcctttcggtagcggtgccactatatgtccaggaagactcttcgccatccacgaaattaaacagttccttatactgatgttgagctatttcgagcttgaacttatcgaaggccaggctaagtgcccacctctggatcaaagccgtgcaggactcggcatcttgccacccctgaacgacatcgagttcaagtacaagttcaagcacttg

SEQ ID NO: 15545 - DNA, 1512 bp, Artificial Sequence
  derived and/or modified sequence
atgatgactacttcactcatctggggaattgccatagcagcctgctgctgcctatggctaatactcggaatccggagacggcagacaggggaacccccacttgagaatggactcataccatatctggggtgcgcactgcagttcggggctaatcctctggaattcttacgcgccaatcagaggaaacatgggcacgtgtttacatgtaaactaatgggaaagtatgtgcatttcattacaaaccctctctcctatcacaaagtgctctgccatgggaaatatttcgattggaaaaaattccatttcgccacttctgccaaagctttcggacacaggagtattgatccaatggatggaaatactacagaaaacatcaacgatacttttataaagacactccaggggcatgccctgaattccctgacggaatctatgatggaaaatctgcagcgcataatgcggccacccgtatcttccaattcaaagacagctgcttgggtgactgaagggatgtattctttttgttacagggtgatgtttgaggctggatatttaacaatattcggacgagacctcactagaagagatacacagaaagcgcacatcttaaataatctcgataattttaaacagtttgataaagtgttccccgccctggtggcgggactccctatccatatgttcaggactgcacacaacgcccgcgaaaaactggctgaatcacttcgccatgaaaatctccagaagagggaatccatttctgaactgatatcccttagaatgttcttgaatgatactctctctactttcgatgatctggaaaaagctaaaactcaccttgtcgtattatgggcatcccaggcaaatacaataccagctacattttggtccttgttccagatgataagaaatcccgaggctatgaaagccgctacagaggaggtaaaaagaacacttgaaaacgctggacaaaaagtgagtttagaaggaaaccctatctgtctgtctcaggcagagctcaatgatctacccgttctagattctatcatcaaagaatcactcagactgtcatctgcatccttgaacatcaggacagccaaagaggattttactcttcatcttgaagatggatcttataacatccggaaggatgatatcattgcgctatacccacagctgatgcatttggatcctgaaatctatcctgatccccttacattcaaatatgaccggtatctcgatgaaaatgggaaaacaaaaacaacattttattgtaacggactcaagcttaagtattattatatgccttttggatcgggggcgacaatatgccctgggaggctttttgccatccatgaaataaaacagttccttatcttgatgctctcttactttgaactcgagcttatcgaaggacaggcgaaatgtcctcctcttgaccagagtagggccggactggggattcttccccctttgaacgacattgagtttaaatataaattcaaacatctg

SEQ ID NO: 15546 - DNA, 1512 bp, Artificial Sequence
  derived and/or modified sequence
atgatgaccacgtcgctcatctggggaatcgctatcgctgcctgctgctgtctctggctgattctgggaatccggaggagacaaactggcgaaccgcctctggagaacggcctcatcccataccttggctgcgccctccagttcggcgcaaatcccctcgaattcctccgcgccaatcagcgaaagcacggtcacgtgttcacttgcaagctgatgggcaagtacgtccatttcattaccaatccactgagctaccacaaggttttgtgtcacggaaagtacttcgactggaagaaattccattttgctacctcggccaaggctttcggacaccgcagcattgatccaatggatggcaataccactgagaacatcaatgacactttcatcaagaccctgcaaggtcatgcgctgaactcgctgaccgagtcgatgatggagaatctgcagagaatcatgaggccaccggtgtcatctaactcaaagactgccgcatgggtcactgagggaatgtactccttttgttaccgcgtgatgttcgaggcggggtaccttacgattttcggccgcgacctgacccgccgcgatactcaaaaggcccatatcctgaacaatctggacaactttaagcagttcgacaaggtgttcccggccctcgtcgcgggtctgccgatccatatgttccggactgcccataatgccagagagaagctggccgagtccctcagacacgaaaacttgcagaagcgcgagtcgatttcggaactgatctccctgcgaatgttcctgaatgacacgctcagcactttcgatgatctggagaaagccaaaacccacctcgtcgtgttgtgggcgtcccaggcgaacaccattccggcgaccttctggtcgctttttcaaatgatccggaacccggaagcaatgaaagccgctactgaggaggtgaaacgcactctcgaaaatgctggccagaaggtttcgctcgagggaaaccccatctgcctgagccaagccgaactgaacgacctgccggtgctggattcgatcatcaaggagagcctccgcttgtcatcggcttccttgaatattcggactgcaaaggaggatttcactctgcatttggaggacggaagctacaacatccgcaaagacgacattattgcactgtaccctcaactgatgcacctggacccggagatctatccggacccgctgactttcaaatacgacagatacctggacgagaatggaaagactaagaccaccttctactgtaacggactcaagctcaaatactactacatgccgttcggtagcggagctaccatctgcccggggagactgttcgctattcatgaaatcaagcagttccttatcctcatgctctcctacttcgaactcgagctgatcgagggccaggccaagtgcccgccgttggatcaatcccgggctggactgggaatcctgccacccctgaatgacatcgaattcaaatacaagtttaagcatctc

SEQ ID NO: 15547 - DNA, 1512 bp, Artificial Sequence
  derived and/or modified sequence
atgatgaccacctcgctcatctggggcatcgcaatagctgcttgctgttgtctgtggctcattcttggcatccgtcgccggcaaacgggcgaaccaccccttgagaatgggctgattccatatctcggctgcgccctgcagtttggagccaaccccctcgagttcctccgtgccaaccagcgcaagcacggtcatgtttttacctgcaaactgatgggtaagtacgttcacttcatcacgaacccactctcttaccacaaggtgctctgccacggtaaatactttgattggaagaagttccattttgctacttccgcaaaggccttcggccaccgctctattgatccgatggatggtaacaccacggaaaatatcaatgacaccttcatcaagaccttgcaaggccatgccctgaactccctgactgagtccatgatggagaacctacagcgaatcatgcgcccgcccgtgtcttcaaacagcaagactgcggcctgggtgaccgagggaatgtactccttctgttatcgcgtgatgtttgaagctggctatctgaccatcttcggtcgtgatctgacccgtcgtgatacccagaaggctcacattctgaacaatctggataacttcaagcagttcgacaaggtcttccccgctctcgtagcaggcctgccaatccacatgttccgcactgcccataacgcccgcgagaagcttgctgagtcgctccgccatgagaatttgcagaagagagaaagcatcagcgaactcatcagccttaggatgttccttaacgacaccctctcaaccttcgacgacctggagaaggccaagacccatctggtcgttctctgggcctctcaggccaacacgatccccgcaaccttctggtcgctgttccagatgatccgaaacccagaggcgatgaaggccgccacggaggaagtcaagcgcaccctcgaaaacgccggacaaaaggtctctctagaaggaaaccctatctgcttgtctcaagccgaactcaacgatctgcccgtgctcgacagtataattaaggagtctttgagactttcgagcgccagcctaaacattcgtaccgccaaggaggatttcaccctgcacctcgaggatggtagttacaacatccgtaaggatgacatcatcgctctgtacccccagctgatgcacctggaccccgagatttatccggatcctttgactttcaagtatgaccgttacctcgacgagaacggcaagacaaagacgacgttttattgcaatggacttaagcttaagtattactatatgccattcggttcgggcgctaccatttgccctggacgcctcttcgccatccatgaaatcaagcagttcttgatcctgatgttgtcctattttgagcttgagctcatcgaaggacaggctaaatgtcctcccctcgaccagagtcgtgccggcctcggcattctcccccccctgaacgacatcgagttcaaatacaagttcaagcacctc

SEQ ID NO: 15548 - DNA, 1512 bp, Artificial Sequence
  derived and/or modified sequence
atgatgacgacctcgctgatctggggaatcgcgatcgcggcctgctgctgtctctggctgatcctcggtatccgccggaggcagaccggggagccgccgcttgagaatggacttatcccgtatctcggatgtgccctgcagttcggagctaacccgctcgaattcctgcgcgccaaccaaaggaaacatggccacgtgttcacttgcaagctgatggggaaatacgtgcacttcatcacgaacccactgtcataccacaaggtcctttgtcacggaaagtacttcgactggaagaagttccacttcgcaactagcgccaaggccttcggccacaggagtattgaccctatggacggaaacaccactgagaacattaacgataccttcatcaaaaccttgcaaggacacgctcttaatagcctcactgaatcaatgatggagaacctgcaacgcattatgcgtcctcctgtctcctcgaacagcaagactgcggcatgggtgactgaaggaatgtacagcttttgctaccgggtcatgtttgaggcaggctatcttactatcttcggaagggacctcaccagacgggatacccaaaaggcccatatcctcaataatctcgacaactttaaacagttcgataaggtctttccagcgctggtggcgggtttgccaatccacatgttcagaactgcacataacgcccgcgaaaagctggcagagtcgctgcggcatgaaaacctgcagaagagagaatccatctctgaactcatttcactgcggatgtttttgaacgacacccttagcaccttcgacgatctggagaaggccaagacccacctggtggtcctctgggcctcccaagccaacactatcccggcgacgttctggtcgctctttcagatgattcggaatccagaagcaatgaaagccgctaccgaagaagtgaaaagaaccctggaaaatgcgggacagaaagtctcgcttgaaggcaatccaatctgtctgtcgcaagccgagctcaatgatctgccggtccttgattctattatcaaggaatccctgagactgtcctccgcctcactcaacatccggaccgccaaagaagattttactctccacctggaagatggatcgtacaacatccggaaagacgacatcatcgccctctacccgcagctcatgcacctggacccggaaatctacccggacccactcacttttaagtacgacagataccttgacgagaacggcaagactaagactactttctactgtaatggactgaaactgaagtactactacatgccatttggtagcggagccacgatctgtccgggacgcctcttcgccatccacgaaatcaagcaattcctgatcctgatgttgagctattttgagctggagctcatcgaaggacaggctaaatgcccaccactggaccaatcacgggccggcctgggaatcctcccaccacttaacgacatcgaattcaagtacaagtttaagcacctg

SEQ ID NO: 15549 - DNA, 1512 bp, Artificial Sequence
  derived and/or modified sequence
atgatgaccacttcactgatctggggaatcgccatcgccgcctgctgttgcctttggcttatccttggaatccgtcgtagacagaccggagaaccgcctctcgagaacggactcatcccgtacctcggatgcgccctccagttcggtgctaacccactggagtttcttcgcgcgaaccaacggaagcacggtcatgtgttcacttgcaagttgatgggcaaatacgtgcactttatcaccaatcctctgtcctaccacaaggtgctgtgtcacggtaagtactttgactggaaaaagttccatttcgctacctccgcgaaggcgttcggccaccggagcatcgacccgatggacggtaataccacggaaaacattaacgacactttcattaagacgctccaaggacatgctctgaattccctgaccgaatccatgatggagaacctccaacggattatgcgcccgcccgtgtcaagcaactccaagactgctgcttgggttactgaaggtatgtactccttttgttacagggtcatgttcgaggccggatatctgaccattttcggtcgggacctgacccgccgcgacactcagaaagcgcacatcctcaataacctcgataacttcaaacagtttgacaaggtgttcccggcactggtggcgggattgcctatccacatgttccggactgcgcataatgcccgggaaaagctcgcggagagccttaggcatgagaatctgcagaaacgggagagcatctcggagttgatcagcctcagaatgttcctcaacgacaccctgtcaacttttgatgatctggaaaaggccaagactcatttggtggtcttgtgggcctcgcaggcaaacactatcccggcaactttctggtcactcttccaaatgattagaaatccggaagctatgaaggccgcgacggaagaggtcaaaaggactctggagaatgccgggcaaaaagtgtccctcgaagggaacccaatttgcctgtcacaagccgaactcaacgacttgccagtattggactcgatcatcaaagaatctctccggctgtctagcgcctcgctgaacattcgaaccgcaaaagaagattttaccctgcacctcgaagatggctcatacaacattcggaaggacgatatcatcgcgctgtacccccagctcatgcacttggatccagaaatctaccctgacccgctcaccttcaagtacgatcgttaccttgatgaaaacggcaaaactaagactaccttctactgcaacggactcaagctcaagtactactatatgcctttcggctccggcgcgacgatctgcccggggagactgtttgcaattcacgaaatcaagcagttcctgatccttatgttgtcctatttcgagctggaactgatagaaggacaggctaagtgccctccgctcgatcaatcccgcgccggactgggaatcttgccaccattgaacgacattgagttcaaatacaagttcaagcacctg

SEQ ID NO: 15550 - DNA, 1512 bp, Artificial Sequence
  derived and/or modified sequence
atgatgaccaccagcctgatctggggcatcgccatcgccgcctgctgctgcctgtggctgatcctgggcatccgccgccgccagaccggcgagccccccctggagaacggcctgatcccctacctgggctgcgccctgcagttcggcgccaaccccctggagttcctgcgcgccaaccagcgcaagcacggccacgtgttcacctgcaagctgatgggcaagtacgtgcacttcatcaccaaccccctgagctaccacaaggtgctgtgccacggcaagtacttcgactggaagaagttccacttcgccaccagcgccaaggccttcggccaccgcagcatcgaccccatggacggcaacaccaccgagaacatcaacgacaccttcatcaagaccctgcagggccacgccctgaacagcctgaccgagagcatgatggagaacctgcagcgcatcatgcgcccccccgtgagcagcaacagcaagaccgccgcctgggtgaccgagggcatgtacagcttctgctaccgcgtgatgttcgaggccggctacctgaccatcttcggccgcgacctgacccgccgcgacacccagaaggcccacatcctgaacaacctggacaacttcaagcagttcgacaaggtgttccccgccctggtggccggcctgcccatccacatgttccgcaccgcccacaacgcccgcgagaagctggccgagagcctgcgccacgagaacctgcagaagcgcgagagcatcagcgagctgatcagcctgcgcatgttcctgaacgacaccctgagcaccttcgacgacctggagaaggccaagacccacctggtggtgctgtgggccagccaggccaacaccatccccgccaccttctggagcctgttccagatgatccgcaaccccgaggccatgaaggccgccaccgaggaggtgaagcgcaccctggagaacgccggccagaaggtgagcctggagggcaaccccatctgcctgagccaggccgagctgaacgacctgcccgtgctggacagcatcatcaaggagagcctgcgcctgagcagcgccagcctgaacatccgcaccgccaaggaggacttcaccctgcacctggaggacggcagctacaacatccgcaaggacgacatcatcgccctgtacccccagctgatgcacctggaccccgagatctaccccgaccccctgaccttcaagtacgaccgctacctggacgagaacggcaagaccaagaccaccttctactgcaacggcctgaagctgaagtactactacatgcccttcggcagcggcgccaccatctgccccggccgcctgttcgccatccacgagatcaagcagttcctgatcctgatgctgagctacttcgagctggagctgatcgagggccaggccaagtgcccccccctggaccagagccgcgccggcctgggcatcctgccccccctgaacgacatcgagttcaagtacaagttcaagcacctg

SEQ ID NO: 15551 - DNA, 2950 bp, Artificial Sequence
  derived and/or modified sequence
gctttgtcaaccaagctcaagttaatggatctggatactatgtatataaaaagcctagcttgagtctcttttcagtggcatccttccctttctaatcagagattttcttcctcagagattttggcctagatttgcaaaatgatgaccacatctttgatttgggggattgctatagcagcatgctgttgtctatggcttattcttggaattaggagaaggcaaacgggtgaaccacctctagagaatggattaattccatacctgggctgtgctctgcaatttggtgccaatcctcttgagttcctcagagcaaatcaaaggaaacatggtcatgtttttacctgcaaactaatgggaaaatatgtccatttcatcacaaatcccttgtcataccataaggtgttgtgccacggaaaatattttgattggaaaaaatttcactttgctacttctgcgaaggcatttgggcacagaagcattgacccgatggatggaaataccactgaaaacataaacgacactttcatcaaaaccctgcagggccatgccttgaattccctcacggaaagcatgatggaaaacctccaacgtatcatgagacctccagtctcctctaactcaaagaccgctgcctgggtgacagaagggatgtattctttctgctaccgagtgatgtttgaagctgggtatttaactatctttggcagagatcttacaaggcgggacacacagaaagcacatattctaaacaatcttgacaacttcaagcaattcgacaaagtctttccagccctggtagcaggcctccccattcacatgttcaggactgcgcacaatgcccgggagaaactggcagagagcttgaggcacgagaacctccaaaagagggaaagcatctcagaactgatcagcctgcgcatgtttctcaatgacactttgtccacctttgatgatctggagaaggccaagacacacctcgtggtcctctgggcatcgcaagcaaacaccattccagcgactttctggagtttatttcaaatgattaggaacccagaagcaatgaaagcagctactgaagaagtgaaaagaacattagagaatgctggtcaaaaagtcagcttggaaggcaatcctatttgtttgagtcaagcagaactgaatgacctgccagtattagatagtataatcaaggaatcgctgaggctttccagtgcctccctcaacatccggacagctaaggaggatttcactttgcaccttgaggacggttcctacaacatccgaaaagatgacatcatagctctttacccacagttaatgcacttagatccagaaatctacccagaccctttgacttttaaatatgataggtatcttgatgaaaacgggaagacaaagactaccttctattgtaatggactcaagttaaagtattactacatgccctttggatcgggagctacaatatgtcctggaagattgttcgctatccacgaaatcaagcaatttttgattctgatgctttcttattttgaattggagcttatagagggccaagctaaatgtccacctttggaccagtcccgggcaggcttgggcattttgccgccattgaatgatattgaatttaaatataaattcaagcatttgtgaatacatggctggaataagaggacactagatgatattacaggactgcagaacaccctcaccacacagtccctttggacaaatgcatttagtggtggtagaaatgattcaccaggtccaatgttgttcaccagtgcttgcttgtgaatcttaacattttggtgacagtttccagatgctatcacagactctgctagtgaaaagaactagtttctaggagcacaataatttgttttcatttgtataagtccatgaatgttcatatagccagggattgaagtttattattttcaaaggaaaacacctttattttattttttttcaaaatgaagatacacattacagccaggtgtggtagcaggcacctgtagtcttagctactcgagaggccaaagaaggaggatggcttgagcccaggagttcaagaccagcctggacagcttagtgagatcccgtctccgaagaaaagatatgtattctaattggcagattgttttttcctaaggaaactgctttatttttataaaactgcctgacaattatgaaaaaatgttcaaattcacgttctagtgaaactgcattatttgttgactagatggtggggttcttcgggtgtgatcatatatcataaaggatatttcaaatgattatgattagttatgtcttttaataaaaaggaaatatttttcaacttcttctatatccaaaattcagggctttaaacatgattatcttgatttcccaaaaacactaaaggtggttttattttcccttcatgttttaacttattgttgctgaaaactctatgtccggctttaactatcttctctatatttttatttcattcacattaatgagaagagttttctcagagattaaaaaaggtagtttttctgtcattgttaaatacacattatcactgaaaaaatgtagcttttatgtgatatgttttaaagttaaaactggatggaaatagccatttggaagctttggttatgaaacatgtggagtgtattaagtgcagcttgacattatgttttatttaaatgctttttatcgctaaatgacttgcagatgaaaaaaactaaggtgactcgagtgtttaaatgctgtgtacaacaatgctttgataaaatattttaagtatgagttatcagctctatgtcaattgatatttctgtgtagtatttatatttaaattatatttacctttttgcttattttacaaatattaagaaaatattctaacatttgataattttgaaatgattcatctttcagaaataaaagtatgaatcta

SEQ ID NO: 15552 - DNA, 1515 bp, Artificial Sequence
  derived and/or modified sequence
atgatgaccaccagcctgatctggggcatcgccatcgccgcctgctgctgcctgtggctgatcctgggcatcagaagaagacagaccggcgagccccccctggagaacggcctgatcccctacctgggctgcgccctgcagttcggcgccaaccccctggagttcctgagagccaaccagagaaagcacggccacgtgttcacctgcaagctgatgggcaagtacgtgcacttcatcaccaaccccctgagctaccacaaggtgctgtgccacggcaagtacttcgactggaagaagttccacttcgccaccagcgccaaggccttcggccacagaagcatcgaccccatggacggcaacaccaccgagaacatcaacgacaccttcatcaagaccctgcagggccacgccctgaacagcctgaccgagagcatgatggagaacctgcagagaatcatgagaccccccgtgagcagcaacagcaagaccgccgcctgggtgaccgagggcatgtacagcttctgctacagagtgatgttcgaggccggctacctgaccatcttcggcagagacctgaccagaagagacacccagaaggcccacatcctgaacaacctggacaacttcaagcagttcgacaaggtgttccccgccctggtggccggcctgcccatccacatgttcagaaccgcccacaacgccagagagaagctggccgagagcctgagacacgagaacctgcagaagagagagagcatcagcgagctgatcagcctgagaatgttcctgaacgacaccctgagcaccttcgacgacctggagaaggccaagacccacctggtggtgctgtgggccagccaggccaacaccatccccgccaccttctggagcctgttccagatgatcagaaaccccgaggccatgaaggccgccaccgaggaggtgaagagaaccctggagaacgccggccagaaggtgagcctggagggcaaccccatctgcctgagccaggccgagctgaacgacctgcccgtgctggacagcatcatcaaggagagcctgagactgagcagcgccagcctgaacatcagaaccgccaaggaggacttcaccctgcacctggaggacggcagctacaacatcagaaaggacgacatcatcgccctgtacccccagctgatgcacctggaccccgagatctaccccgaccccctgaccttcaagtacgacagatacctggacgagaacggcaagaccaagaccaccttctactgcaacggcctgaagctgaagtactactacatgcccttcggcagcggcgccaccatctgccccggcagactgttcgccatccacgagatcaagcagttcctgatcctgatgctgagctacttcgagctggagctgatcgagggccaggccaagtgcccccccctggaccagagcagagccggcctgggcatcctgccccccctgaacgacatcgagttcaagtacaagttcaagcacctgtag

SEQ ID NO: 15553 - DNA, 1678 bp, Artificial Sequence
  derived and/or modified sequence
gggaaataagagagaaaagaagagtaagaagaaatataagagccaccatgatgaccacatctttgatttgggggattgctatagcagcatgctgttgtctatggcttattcttggaattaggagaaggcaaacgggtgaaccacctcttgagaatggattaattccatacctgggctgtgctctgcaatttggtgccaatcctcttgagttcctcagagcaaatcaaaggaaacatggtcatgtttttacctgcaaactaatgggaaaatatgtccatttcatcacaaatcccttgtcataccataaggtgttgtgccacggaaaatattttgattggaaaaaatttcactttgctacttctgcgaaggcatttgggcacagaagcattgacccgatggatggaaataccactgaaaacataaacgacactttcatcaaaaccctgcagggccatgccttgaattccctcacggaaagcatgatggaaaacctccaacgtatcatgagacctccagtctcctctaactcaaagaccgctgcctgggtgacagaagggatgtattctttctgctaccgagtgatgtttgaagctgggtatttaactatctttggcagagatcttacaaggcgggacacacagaaagcacatattctaaacaatcttgacaacttcaagcaattcgacaaagtctttccagccctggtagcaggcctccccattcacatgttcaggactgcgcacaatgcccgggagaaactggcagagagcttgaggcacgagaacctccaaaagagggaaagcatctcagaactgatcagcctgcgcatgtttctcaatgacactttgtccacctttgatgatctggagaaggccaagacacacctcgtggtcctctgggcatcgcaagcaaacaccattccagcgactttctggagtttatttcaaatgattaggaacccagaagcaatgaaagcagctactgaagaagtgaaaagaacattagagaatgctggtcaaaaagtcagcttggaaggcaatcctatttgtttgagtcaagcagaactgaatgacctgccagtattagatagtataatcaaggaatcgctgaggctttccagtgcctccctcaacatccggacagctaaggaggatttcactttgcaccttgaggacggttcctacaacatccgaaaagatgacatcatagctctttacccacagttaatgcacttagatccagaaatctacccagaccctttgacttttaaatatgataggtatcttgatgaaaacgggaagacaaagactaccttctattgtaatggactcaagttaaagtattactacatgccctttggatcgggagctacaatatgtcctggaagattgttcgctatccacgaaatcaagcaatttttgattctgatgctttcttattttgaattggagcttatagagggccaagctaaatgtccacctttggaccagtcccgggcaggcttgggcattttgccgccattgaatgatattgaatttaaatataaattcaagcatttgtgataataggctggagcctcggtggccatgcttcttgccccttgggcctccccccagcccctcctccccttcctgcacccgtacccccgtggtctttgaataaagtctgagtgggcggc

SEQ ID NO: 15554 - DNA, 1512 bp, Artificial Sequence
  derived and/or modified sequence
atgatgaccacatctttgatttgggggattgctatagcagcatgctgttgtctatggcttattcttggaattaggagaaggcaaacgggtgaaccacctcttgagaatggattaattccatacctgggctgtgctctgcaatttggtgccaatcctcttgagttcctcagagcaaatcaaaggaaacatggtcatgtttttacctgcaaactaatgggaaaatatgtccatttcatcacaaatcccttgtcataccataaggtgttgtgccacggaaaatattttgattggaaaaaatttcactttgctacttctgcgaaggcatttgggcacagaagcattgacccgatggatggaaataccactgaaaacataaacgacactttcatcaaaaccctgcagggccatgccttgaattccctcacggaaagcatgatggaaaacctccaacgtatcatgagacctccagtctcctctaactcaaagaccgctgcctgggtgacagaagggatgtattctttctgctaccgagtgatgtttgaagctgggtatttaactatctttggcagagatcttacaaggcgggacacacagaaagcacatattctaaacaatcttgacaacttcaagcaattcgacaaagtctttccagccctggtagcaggcctccccattcacatgttcaggactgcgcacaatgcccgggagaaactggcagagagcttgaggcacgagaacctccaaaagagggaaagcatctcagaactgatcagcctgcgcatgtttctcaatgacactttgtccacctttgatgatctggagaaggccaagacacacctcgtggtcctctgggcatcgcaagcaaacaccattccagcgactttctggagtttatttcaaatgattaggaacccagaagcaatgaaagcagctactgaagaagtgaaaagaacattagagaatgctggtcaaaaagtcagcttggaaggcaatcctatttgtttgagtcaagcagaactgaatgacctgccagtattagatagtataatcaaggaatcgctgaggctttccagtgcctccctcaacatccggacagctaaggaggatttcactttgcaccttgaggacggttcctacaacatccgaaaagatgacatcatagctctttacccacagttaatgcacttagatccagaaatctacccagaccctttgacttttaaatatgataggtatcttgatgaaaacgggaagacaaagactaccttctattgtaatggactcaagttaaagtattactacatgccctttggatcgggagctacaatatgtcctggaagattgttcgctatccacgaaatcaagcaatttttgattctgatgctttcttattttgaattggagcttatagagggccaagctaaatgtccacctttggaccagtcccgggcaggcttgggcattttgccgccattgaatgatattgaatttaaatataaattcaagcatttg

SEQ ID NO: 15555 - protein, 521 aa, Artificial Sequence
  derived and/or modified sequence
MLAKGLPPRSVLVKGCQTFLSAPREGLGRLRVPTGEGAGISTRSPRPFNEIPSPGDNGWLNLYHFWRETGTHKVHLHHVQNFQKYGPIYREKLGNVESVYVIDPEDVALLFKSEGPNPERFLIPPWVAYHQYYQRPIGVLLKKSAAWKKDRVALNQEVMAPEATKNFLPLLDAVSRDFVSVLHRRIKKAGSGNYSGDISDDLFRFAFESITNVIFGERQGMLEEVVNPEAQRFIDAIYQMFHTSVPMLNLPPDLFRLFRTKTWKDHVAAWDVIFSKADIYTQNFYWELRQKGSVHHDYRGILYRLLGDSKMSFEDIKANVTEMLAGGVDTTSMTLQWHLYEMARNLKVQDMLRAEVLAARHQAQGDMATMLQLVPLLKASIKETLRLHPISVTLQRYLVNDLVLRDYMIPAKTLVQVAIYALGREPTFFFDPENFDPTRWLSKDKNITYFRNLGFGWGVRQCLGRRIAELEMTIFLINMLENFRVEIQHLSDVGTTFNLILMPEKPISFTFWPFNQEATQQ

SEQ ID NO: 15556 - protein, 414 aa, Artificial Sequence
  derived and/or modified sequence
MLAKGLPPRSVLVKGCQTFLSAPREGLGRLRVPTGEGAGISTRSPRPFNEIPSPGDNGWLNLYHFWRETGTHKVHLHHVQNFQKYGPIYREKLGNVESVYVIDPEDVALLFKSEGPNPERFLIPPWVAYHQYYQRPIGVLLKKSAAWKKDRVALNQEVMAPEATKNFLPLLDAVSRDFVSVLHRRIKKAGSGNYSGDISDDLFRFAFESITNVIFGERQGMLEEVVNPEAQRFIDAIYQMFHTSVPMLNLPPDLFRLFRTKTWKDHVAAWDVIFSKADIYTQNFYWELRQKGSVHHDYRGILYRLLGDSKMSFEDIKANVTEMLAGGVDTTSMTLQWHLYEMARNLKVQDMLRAEVLAARHQAQGDMATMLQLVPLLKASIKETLRHWCKWPSMLWAESPPSSSTRKILTQPDG

SEQ ID NO: 15557 - protein, 144 aa, Artificial Sequence
  derived and/or modified sequence
MLAKGLPPRSVLVKGCQTFLSAPREGLGRLRVPTGEGAGISTRSPRPFNEIPSPGDNGWLNLYHFWRETGTHKVHLHHVQNFQKYGPIYREKLGNVESVYVIDPEDVALLFKSEGPNPERFLIPPWVAYHQYYQRPIGVLLNHH

SEQ ID NO: 15558 - DNA, 1566 bp, Artificial Sequence
  derived and/or modified sequence
atgctggccaagggcctgccccccagaagcgtgctggtgaagggctgccagaccttcctgagcgcccccagagagggcctgggcagactgagagtgcccaccggcgagggcgccggcatcagcaccagaagccccagacccttcaacgagatccccagccccggcgacaacggctggctgaacctgtaccacttctggagagagaccggcacccacaaggtgcacctgcaccacgtgcagaacttccagaagtacggccccatctacagagagaagctgggcaacgtggagagcgtgtacgtgatcgaccccgaggacgtggccctgctgttcaagagcgagggccccaaccccgagagattcctgatccccccctgggtggcctaccaccagtactaccagagacccatcggcgtgctgctgaagaagagcgccgcctggaagaaggacagagtggccctgaaccaggaggtgatggcccccgaggccaccaagaacttcctgcccctgctggacgccgtgagcagagacttcgtgagcgtgctgcacagaagaatcaagaaggccggcagcggcaactacagcggcgacatcagcgacgacctgttcagattcgccttcgagagcatcaccaacgtgatcttcggcgagagacagggcatgctggaggaggtggtgaaccccgaggcccagagattcatcgacgccatctaccagatgttccacaccagcgtgcccatgctgaacctgccccccgacctgttcagactgttcagaaccaagacctggaaggaccacgtggccgcctgggacgtgatcttcagcaaggccgacatctacacccagaacttctactgggagctgagacagaagggcagcgtgcaccacgactacagaggcatcctgtacagactgctgggcgacagcaagatgagcttcgaggacatcaaggccaacgtgaccgagatgctggccggcggcgtggacaccaccagcatgaccctgcagtggcacctgtacgagatggccagaaacctgaaggtgcaggacatgctgagagccgaggtgctggccgccagacaccaggcccagggcgacatggccaccatgctgcagctggtgcccctgctgaaggccagcatcaaggagaccctgagactgcaccccatcagcgtgaccctgcagagatacctggtgaacgacctggtgctgagagactacatgatccccgccaagaccctggtgcaggtggccatctacgccctgggcagagagcccaccttcttcttcgaccccgagaacttcgaccccaccagatggctgagcaaggacaagaacatcacctacttcagaaacctgggcttcggctggggcgtgagacagtgcctgggcagaagaatcgccgagctggagatgaccatcttcctgatcaacatgctggagaacttcagagtggagatccagcacctgagcgacgtgggcaccaccttcaacctgatcctgatgcccgagaagcccatcagcttcaccttctggcccttcaaccaggaggccacccagcagtag

SEQ ID NO: 15559 - DNA, 1245 bp, Artificial Sequence
  derived and/or modified sequence
atgctggccaagggcctgccccccagaagcgtgctggtgaagggctgccagaccttcctgagcgcccccagagagggcctgggcagactgagagtgcccaccggcgagggcgccggcatcagcaccagaagccccagacccttcaacgagatccccagccccggcgacaacggctggctgaacctgtaccacttctggagagagaccggcacccacaaggtgcacctgcaccacgtgcagaacttccagaagtacggccccatctacagagagaagctgggcaacgtggagagcgtgtacgtgatcgaccccgaggacgtggccctgctgttcaagagcgagggccccaaccccgagagattcctgatccccccctgggtggcctaccaccagtactaccagagacccatcggcgtgctgctgaagaagagcgccgcctggaagaaggacagagtggccctgaaccaggaggtgatggcccccgaggccaccaagaacttcctgcccctgctggacgccgtgagcagagacttcgtgagcgtgctgcacagaagaatcaagaaggccggcagcggcaactacagcggcgacatcagcgacgacctgttcagattcgccttcgagagcatcaccaacgtgatcttcggcgagagacagggcatgctggaggaggtggtgaaccccgaggcccagagattcatcgacgccatctaccagatgttccacaccagcgtgcccatgctgaacctgccccccgacctgttcagactgttcagaaccaagacctggaaggaccacgtggccgcctgggacgtgatcttcagcaaggccgacatctacacccagaacttctactgggagctgagacagaagggcagcgtgcaccacgactacagaggcatcctgtacagactgctgggcgacagcaagatgagcttcgaggacatcaaggccaacgtgaccgagatgctggccggcggcgtggacaccaccagcatgaccctgcagtggcacctgtacgagatggccagaaacctgaaggtgcaggacatgctgagagccgaggtgctggccgccagacaccaggcccagggcgacatggccaccatgctgcagctggtgcccctgctgaaggccagcatcaaggagaccctgagacactggtgcaagtggcccagcatgctgtgggccgagagcccccccagcagcagcaccagaaagatcctgacccagcccgacggctag

SEQ ID NO: 15560 - DNA, 435 bp, Artificial Sequence
  derived and/or modified sequence
atgctggccaagggcctgccccccagaagcgtgctggtgaagggctgccagaccttcctgagcgcccccagagagggcctgggcagactgagagtgcccaccggcgagggcgccggcatcagcaccagaagccccagacccttcaacgagatccccagccccggcgacaacggctggctgaacctgtaccacttctggagagagaccggcacccacaaggtgcacctgcaccacgtgcagaacttccagaagtacggccccatctacagagagaagctgggcaacgtggagagcgtgtacgtgatcgaccccgaggacgtggccctgctgttcaagagcgagggccccaaccccgagagattcctgatccccccctgggtggcctaccaccagtactaccagagacccatcggcgtgctgctgaaccaccactag

SEQ ID NO: 15561 - DNA, 2001 bp, Artificial Sequence
  derived and/or modified sequence
gacagacccagcattcctcccagcgcacgccgccgcccgggccgcgctattccgaaattgggtccgccctagcgtggcccccggcctgctcctgcgctcttcgcgggtcgctcacctccgcctcccctcgacacagcccgagcccatccgccccccgggtcgacccgcgtttacctcagggcgaggtccaggcgctcggccccgcggaggcggcggcggccccaccgcaggtcctaggtcccagtcactctgccgccaagttccccaacacggactccgtgcgctttgaggtgttacgggggcgctggagcactggcttcgctggccctgccaggaggcggcggcgaagcagggagcgacccggtatgcgtttctctgcccggcctgcggccctgcagcatccactcctcgcctctgctggcctctgccctcgctcgctgcgttcacccgagctcacccgagcccaccggagccgacagtggcgcgctaagggagaagctcggcaacgtggagtcggtttatgtcatcgaccctgaagatgtggcccttctctttaagtccgagggccccaacccagaacgattcctcatcccgccctgggtcgcctatcaccagtattaccagagacccataggagtcctgttgaagaagtcggcagcctggaagaaagaccgggtggccctgaaccaggaggtgatggctccagaggccaccaagaactttttgcccctgttggatgcagtgtctcgggacttcgtcagtgtcctgcacaggcgcatcaagaaggcgggctccggaaattactcgggggacatcagtgatgacctgttccgctttgcctttgagtccatcactaacgtcatttttggggagcgccaggggatgctggaggaagtagtgaaccccgaggcccagcgattcattgatgccatctaccagatgttccacaccagcgtccccatgctcaaccttcccccagacctgttccgtctgttcaggaccaagacctggaaggaccatgtggctgcatgggacgtgattttcagtaaagctgacatatacacccagaacttctactgggaattgagacagaaaggaagtgttcaccacgattaccgtggcatcctctacagactcctgggagacagcaagatgtccttcgaggacatcaaggccaacgtcacagagatgctggcaggaggggtggacacgacgtccatgaccctgcagtggcacttgtatgagatggcacgcaacctgaaggtgcaggatatgctgcgggcagaggtcttggctgcgcggcaccaggcccagggagacatggccacgatgctacagctggtccccctcctcaaagccagcatcaaggagacactaagacttcaccccatctccgtgaccctgcagagatatcttgtaaatgacttggttcttcgagattacatgattcctgccaagacactggtgcaagtggccatctatgctctgggccgagagcccaccttcttcttcgacccggaaaattttgacccaacccgatggctgagcaaagacaagaacatcacctacttccggaacttgggctttggctggggtgtgcggcagtgtctgggacggcggatcgctgagctagagatgaccatcttcctcatcaatatgctggagaacttcagagttgaaatccaacacctcagcgatgtgggcaccacattcaacctcattctgatgcctgaaaagcccatctccttcaccttctggccctttaaccaggaagcaacccagcagtgatcagagaggatggcctgcagccacatgggaggaaggcccaggggtggggcccatggggtctctgcatcttcagtcgtctgtcccaagtcctgctcctttctgcccagcctgctcagcaggttgaatgggttctcagtggtcaccttcctcagctcagctgggccactcctcttcacccaccccatggagacaataaacagctgaaccatgtgg

SEQ ID NO: 15562 - DNA, 1934 bp, Artificial Sequence
  derived and/or modified sequence
agcctgcagcaggaggaaggacgtgaacattttatcagcttctggtatggccttgagctggtagttataatcttggccctggtggcccagggctacagtcatcctagcagtccccgctgaagtggagcaggtacagtcacagctgtggggacagcatgctggccaagggtcttcccccacgctcagtcctggtcaaaggctgccagacctttctgagtgcccccagggaggggctggggcgtctcagggtgcccactggcgagggagctggcatctccacccgcagtcctcgccccttcaatgagatcccctctcctggtgacaatggctggctaaacctgtaccatttctggagggagacgggcacacacaaagtccaccttcaccatgtccagaatttccagaagtatggcccgatttacagggagaagctcggcaacgtggagtcggtttatgtcatcgaccctgaagatgtggcccttctctttaagtccgagggccccaacccagaacgattcctcatcccgccctgggtcgcctatcaccagtattaccagagacccataggagtcctgttgaagaagtcggcagcctggaagaaagaccgggtggccctgaaccaggaggtgatggctccagaggccaccaagaactttttgcccctgttggatgcagtgtctcgggacttcgtcagtgtcctgcacaggcgcatcaagaaggcgggctccggaaattactcgggggacatcagtgatgacctgttccgctttgcctttgagtccatcactaacgtcatttttggggagcgccaggggatgctggaggaagtagtgaaccccgaggcccagcgattcattgatgccatctaccagatgttccacaccagcgtccccatgctcaaccttcccccagacctgttccgtctgttcaggaccaagacctggaaggaccatgtggctgcatgggacgtgattttcagtaaagctgacatatacacccagaacttctactgggaattgagacagaaaggaagtgttcaccacgattaccgtggcatcctctacagactcctgggagacagcaagatgtccttcgaggacatcaaggccaacgtcacagagatgctggcaggaggggtggacacgacgtccatgaccctgcagtggcacttgtatgagatggcacgcaacctgaaggtgcaggatatgctgcgggcagaggtcttggctgcgcggcaccaggcccagggagacatggccacgatgctacagctggtccccctcctcaaagccagcatcaaggagacactaagacttcaccccatctccgtgaccctgcagagatatcttgtaaatgacttggttcttcgagattacatgattcctgccaagacactggtgcaagtggccatctatgctctgggccgagagcccaccttcttcttcgacccggaaaattttgacccaacccgatggctgagcaaagacaagaacatcacctacttccggaacttgggctttggctggggtgtgcggcagtgtctgggacggcggatcgctgagctagagatgaccatcttcctcatcaatatgctggagaacttcagagttgaaatccaacacctcagcgatgtgggcaccacattcaacctcattctgatgcctgaaaagcccatctccttcaccttctggccctttaaccaggaagcaacccagcagtgatcagagaggatggcctgcagccacatgggaggaaggcccaggggtggggcccatggggtctctgcatcttcagtcgtctgtcccaagtcctgctcctttctgcccagcctgctcagcaggttgaatgggttctcagtggtcaccttcctcagctcagctgggccactcctcttcacccaccccatggagacaataaacagctgaaccatgtgg

SEQ ID NO: 15563 - DNA, 1794 bp, Artificial Sequence
  derived and/or modified sequence
attccgaaattgggtccgccctagcgtggcccccggcctgctcctgcgctcttcgcgggtcgctcacctccgcctcccctcgacacagcccgagcccatccgccccccgggtcgacccgcgtttacctcagggcgaggtccaggcgctcggccccgcggaggcggcggcggccccaccgcaggtcctaggtcccagtcactctgccgccaagttccccaacacggactccgtgcgctttgaggtgttacgggggcgctggagcactggcttcgctggccctgccaggaggcggcggcgaagcagggagcgacccggtatgcgtttctctgcccggcctgcggccctgcagcatccactcctcgcctctgctggcctctgccctcgctcgctgcgttcacccgagctcacccgagcccaccggagccgacagtggcgcgctaaggaagtcggcagcctggaagaaagaccgggtggccctgaaccaggaggtgatggctccagaggccaccaagaactttttgcccctgttggatgcagtgtctcgggacttcgtcagtgtcctgcacaggcgcatcaagaaggcgggctccggaaattactcgggggacatcagtgatgacctgttccgctttgcctttgagtccatcactaacgtcatttttggggagcgccaggggatgctggaggaagtagtgaaccccgaggcccagcgattcattgatgccatctaccagatgttccacaccagcgtccccatgctcaaccttcccccagacctgttccgtctgttcaggaccaagacctggaaggaccatgtggctgcatgggacgtgattttcagtaaagctgacatatacacccagaacttctactgggaattgagacagaaaggaagtgttcaccacgattaccgtggcatcctctacagactcctgggagacagcaagatgtccttcgaggacatcaaggccaacgtcacagagatgctggcaggaggggtggacacgacgtccatgaccctgcagtggcacttgtatgagatggcacgcaacctgaaggtgcaggatatgctgcgggcagaggtcttggctgcgcggcaccaggcccagggagacatggccacgatgctacagctggtccccctcctcaaagccagcatcaaggagacactaagacttcaccccatctccgtgaccctgcagagatatcttgtaaatgacttggttcttcgagattacatgattcctgccaagacactggtgcaagtggccatctatgctctgggccgagagcccaccttcttcttcgacccggaaaattttgacccaacccgatggctgagcaaagacaagaacatcacctacttccggaacttgggctttggctggggtgtgcggcagtgtctgggacggcggatcgctgagctagagatgaccatcttcctcatcaatatgctggagaacttcagagttgaaatccaacacctcagcgatgtgggcaccacattcaacctcattctgatgcctgaaaagcccatctccttcaccttctggccctttaaccaggaagcaacccagcagtgatcagagaggatggcctgcagccacatgggaggaaggcccaggggtggggcccatggggtctctgcatcttcagtcgtctgtcccaagtcctgctcctttctgcccagcctgctcagcaggttgaatgggttctcagtggtcaccttcctcagctcagctgggccactcctcttcacccaccccatggagacaataaacagctgaaccatg

SEQ ID NO: 15564 - DNA, 1629 bp, Artificial Sequence
  derived and/or modified sequence
ccgctgaagtggagcaggtacagtcacagctgtggggacagcatgctggccaagggtcttcccccacgctcagtcctggtcaaaggctgccagacctttctgagtgcccccagggaggggctggggcgtctcagggtgcccactggcgagggagctggcatctccacccgcagtcctcgccccttcaatgagatcccctctcctggtgacaatggctggctaaacctgtaccatttctggagggagacgggcacacacaaagtccaccttcaccatgtccagaatttccagaagtatggcccgatttacagggagaagctcggcaacgtggagtcggtttatgtcatcgaccctgaagatgtggcccttctctttaagtccgagggccccaacccagaacgattcctcatcccgccctgggtcgcctatcaccagtattaccagagacccataggagtcctgttgaagaagtcggcagcctggaagaaagaccgggtggccctgaaccaggaggtgatggctccagaggccaccaagaactttttgcccctgttggatgcagtgtctcgggacttcgtcagtgtcctgcacaggcgcatcaagaaggcgggctccggaaattactcgggggacatcagtgatgacctgttccgctttgcctttgagtccatcactaacgtcatttttggggagcgccaggggatgctggaggaagtagtgaaccccgaggcccagcgattcattgatgccatctaccagatgttccacaccagcgtccccatgctcaaccttcccccagacctgttccgtctgttcaggaccaagacctggaaggaccatgtggctgcatgggacgtgattttcagtaaagctgacatatacacccagaacttctactgggaattgagacagaaaggaagtgttcaccacgattaccgtggcatcctctacagactcctgggagacagcaagatgtccttcgaggacatcaaggccaacgtcacagagatgctggcaggaggggtggacacgacgtccatgaccctgcagtggcacttgtatgagatggcacgcaacctgaaggtgcaggatatgctgcgggcagaggtcttggctgcgcggcaccaggcccagggagacatggccacgatgctacagctggtccccctcctcaaagccagcatcaaggagacactaagacactggtgcaagtggccatctatgctctgggccgagagcccaccttcttcttcgacccggaaaattttgacccaacccgatggctgagcaaagacaagaacatcacctacttccggaacttgggctttggctggggtgtgcggcagtgtctgggacggcggatcgctgagctagagatgaccatcttcctcatcaatatgctggagaacttcagagttgaaatccaacacctcagcgatgtgggcaccacattcaacctcattctgatgcctgaaaagcccatctccttcaccttctggccctttaaccaggaagcaacccagcagtgatcagagaggatggcctgcagccacatgggaggaaggcccaggggtggggcccatggggtctctgcatcttcagtcgtctgtcccaagtcctgctcctttc

SEQ ID NO: 15565 - DNA, 870 bp, Artificial Sequence
  derived and/or modified sequence
acagtcatcctagcagtccccgctgaagtggagcaggtacagtcacagctgtggggacagcatgctggccaagggtcttcccccacgctcagtcctggtcaaaggctgccagacctttctgagtgcccccagggaggggctggggcgtctcagggtgcccactggcgagggagctggcatctccacccgcagtcctcgccccttcaatgagatcccctctcctggtgacaatggctggctaaacctgtaccatttctggagggagacgggcacacacaaagtccaccttcaccatgtccagaatttccagaagtatggcccgatttacagggagaagctcggcaacgtggagtcggtttatgtcatcgaccctgaagatgtggcccttctctttaagtccgagggccccaacccagaacgattcctcatcccgccctgggtcgcctatcaccagtattaccagagacccataggagtcctgttgaaccatcactaacgtcatttttggggagcgccaggggatgctggaggaagtagtgaaccccgaggcccagcgattcattgatgccatctaccagatgttccacaccagcgtccccatgctcaaccttcccccagacctgttccgtctgttcaggaccaagacctggaaggaccatgtggctgcatgggacgtgattttcagtaaagctgacatatacacccagaacttctactgggaattgagacagaaaggaagtgttcaccacgattaccgtggcatcctctacagactcctgggagacagcaagatgtccttcgaggacatcaaggccaacgtcacagagatgctggcaggaggggtggacacgacgtccatgaccctgcagt

SEQ ID NO: 15566 - DNA, 1566 bp, Artificial Sequence
  derived and/or modified sequence
atgctcgccaaaggcctcccaccccggtccgtgctggtgaaaggatgccagacatttttgagcgccccgcgggagggactgggtcggctaagggtccccacgggggagggggccggtattagtacccgttccccgcggccttttaacgaaattccgagcccaggcgacaacgggtggctcaacctctaccatttttggagagaaaccggcacacacaaggtccacttacatcacgtgcaaaattttcagaaatatgggcccatctatcgcgaaaaattggggaacgtcgaaagcgtttacgtgatagaccctgaggacgtggctcttctgtttaaaagcgaagggcccaatccagaacggttcctcatcccgccctgggttgcgtatcaccagtactaccaacgccctatcggagtgcttctcaaaaagagtgcagcctggaaaaaggatagagtagctctgaatcaagaggttatggccccagaggcaaccaaaaattttctaccgctgctcgacgccgtctcacgggacttcgttagtgtactgcacagacgcatcaaaaaagctggttctggcaattactcaggagacattagtgatgatctttttcgttttgcgttcgagtcaatcacaaacgttatcttcggcgagagacagggcatgcttgaagaggtggtcaatcctgaagcacagcggttcatcgatgcaatctatcagatgttccacaccagcgtgccaatgcttaacctgcccccggatctgtttcggctgtttagaacaaaaacttggaaggatcacgtcgctgcttgggacgtcatcttttctaaggctgatatttacacccagaatttttactgggagttaagacagaaaggcagcgtccaccatgactataggggcatcctgtaccgcttgttgggagattctaaaatgtcgtttgaagacattaaggccaatgttacggagatgcttgcaggaggagtagacaccaccagcatgacgcttcagtggcacctctacgaaatggccaggaatcttaaggtgcaggacatgctgcgggcagaggtactggcagcccgacaccaggctcagggtgatatggccactatgctgcagctggttcctttgctgaaggccagcattaaggaaacacttaggctgcatcccatcagcgtgacccttcagagatatctcgtgaacgatttagtactccgtgactacatgatcccagcgaagacattggtgcaagtggccatctacgccttaggaagagaacctacattcttcttcgatcccgagaactttgaccccacacggtggctgtcaaaagataaaaatatcacatattttagaaatctggggttcgggtggggggtcaggcaatgcctgggcagacgcattgcagaattggagatgacaatcttcttgatcaacatgctggaaaacttccgggtggaaatacaacatctgagcgacgttggcacgacatttaaccttatcctgatgcctgagaaacccatctcctttaccttttggccattcaatcaggaagctacccagcagtag

SEQ ID NO: 15567 - DNA, 1245 bp, Artificial Sequence
  derived and/or modified sequence
atgttggccaaaggattgccacctcggagcgtcctggttaagggctgccagacatttctaagtgcccctcgagaagggctcgggcggttacgggttcctacaggagaaggtgccggcatctcgactcggtctccccggccatttaatgaaatcccttctcccggggataacggctggttaaatctgtaccacttttggagagaaacaggcacacacaaagtacatttacaccatgtccagaactttcaaaagtatggaccaatttacagagagaagctggggaatgtcgagtcagtgtatgtgattgatcctgaagacgtcgccttgctgtttaagtctgagggaccgaaccccgaaagattcctgatacctccttgggttgcctaccatcagtattatcagagacccatcggagtcctgctcaaaaaaagtgcagcgtggaaaaaagacagggttgccctcaaccaggaggtcatggctcccgaggccacgaaaaattttctccctctgctggatgccgtgtctcgggattttgtatcagtgctgcaccggcgtattaagaaggctgggtccggaaactattctggggacatatctgatgacctttttagattcgcgttcgaaagtatcactaatgtaatcttcggcgaaagacaggggatgctagaagaggtggtgaacccagaggcccaacgattcatcgacgccatctatcaaatgttccatactagcgttccaatgcttaatctcccccccgacttgtttaggctttttcggaccaaaacttggaaggaccacgtggccgcttgggacgtaatttttagcaaggccgatatctacacacagaacttttactgggaactgcgacagaaaggtagcgtgcatcacgactaccgcgggattctgtaccgtctactgggggattccaagatgtccttcgaggacatcaaggccaatgtgacagagatgctggctggcggagtagacaccacatccatgaccctgcaatggcatctttacgagatggcgcggaatctgaaggtacaagatatgctaagagcagaggtcctagccgctcgtcaccaggcccagggagacatggctactatgctgcaacttgtcccactcttgaaggccagtattaaggagactctaaggcactggtgcaaatggccttccatgctgtgggccgagtctcccccttcttcatccacacgtaagatcctgacacagccagacggctag

SEQ ID NO: 15568 - DNA, 435 bp, Artificial Sequence
  derived and/or modified sequence
atgcttgccaagggcttgcctccaaggtcagttctggttaaagggtgtcagacatttctctccgcaccccgggaaggtctaggcagacttcgggtacccaccggtgaaggcgccggcatctcaaccaggtcccctcgcccatttaacgagatcccatctcctggagataacggttggctcaacctttatcacttctggcgcgaaactggtacccacaaagtgcatcttcatcatgtacagaatttccaaaaatacgggcctatataccgcgagaaactcggcaatgtggagtctgtgtacgtcatcgacccagaagacgttgctcttttatttaaaagtgaaggtccaaatcctgaaaggttcctcatccccccatgggtggcttaccatcagtactatcagcgacccatcggcgtactgctgaatcatcactag

SEQ ID NO: 15569 - DNA, 1566 bp, Artificial Sequence
  derived and/or modified sequence
atgctggccaagggcctgcccccaagatctgtgctggtgaagggctgccagaccttcctgagcgccccccgggagggcctgggccgcctgcgggtgcccaccggggagggcgccggcatcagcaccaggagcccccggcccttcaatgagatccccagccctggggacaatggctggctgaacctgtaccacttctggagggagaccggcacccacaaggtgcacctgcaccacgtgcagaacttccagaagtatggccccatctaccgggagaagctgggcaatgtggagagcgtgtatgtgattgatcctgaagatgtggccctgctcttcaagtctgagggccccaaccctgagcgcttcctgatccccccctgggtggcctaccaccagtactaccagaggcccatcggcgtgctgctgaagaagtctgctgcctggaagaaggacagagtggccctgaaccaggaggtgatggcccctgaggccaccaagaacttcctgcccctgctggatgctgtgtcccgggactttgtgtctgtgctgcaccggcgcatcaagaaggccggcagcggcaactacagcggggacatcagtgatgacctcttccgctttgcctttgagagcatcaccaacgtcatctttggagagcggcagggcatgctggaggaggtggtgaaccctgaggcccagcgcttcattgatgccatctaccagatgttccacacctctgtgcccatgctgaacctgcccccagacctcttccgcctcttccgcaccaagacctggaaggaccacgtggccgcctgggatgtgatcttcagcaaggctgacatctacacccagaacttctactgggagctgcggcagaagggctctgtgcaccacgactaccggggcatcctgtaccgcctgctgggggacagcaagatgagctttgaggacatcaaggccaacgtgacagagatgctggccggcggcgtggacaccacctccatgaccctgcagtggcacctgtatgagatggccaggaacctgaaggtgcaggacatgctgcgggcagaggtgctggccgcccggcaccaggcccagggcgacatggccaccatgctgcagctggtgcccctgctgaaggccagcatcaaggagaccctgcggctgcaccccatctctgtgaccctgcagcgctacctggtgaatgacctggtgctgcgggactacatgatcccagccaagaccctggtgcaggtggccatctatgccctgggccgggagcccaccttcttctttgatcctgaaaattttgaccccacccgctggctgagcaaggacaagaacatcacctacttcaggaacctgggcttcggctggggcgtgcggcagtgcctgggcagaagaattgctgagctggagatgaccatcttcctgatcaacatgctggagaacttccgggtggagatccagcacctgagtgatgtgggcaccaccttcaacctgatcctgatgcctgagaagcccatctccttcaccttctggcccttcaaccaggaggccacccagcagtag

SEQ ID NO: 15570 - DNA, 1245 bp, Artificial Sequence
  derived and/or modified sequence
atgctggccaagggcctgcccccaagatctgtgctggtgaagggctgccagaccttcctgagcgccccccgggagggcctgggccgcctgcgggtgcccaccggggagggcgccggcatcagcaccaggagcccccggcccttcaatgagatccccagccctggggacaatggctggctgaacctgtaccacttctggagggagaccggcacccacaaggtgcacctgcaccacgtgcagaacttccagaagtatggccccatctaccgggagaagctgggcaatgtggagagcgtgtatgtgattgatcctgaagatgtggccctgctcttcaagtctgagggccccaaccctgagcgcttcctgatccccccctgggtggcctaccaccagtactaccagaggcccatcggcgtgctgctgaagaagtctgctgcctggaagaaggacagagtggccctgaaccaggaggtgatggcccctgaggccaccaagaacttcctgcccctgctggatgctgtgtcccgggactttgtgtctgtgctgcaccggcgcatcaagaaggccggcagcggcaactacagcggggacatcagtgatgacctcttccgctttgcctttgagagcatcaccaacgtcatctttggagagcggcagggcatgctggaggaggtggtgaaccctgaggcccagcgcttcattgatgccatctaccagatgttccacacctctgtgcccatgctgaacctgcccccagacctcttccgcctcttccgcaccaagacctggaaggaccacgtggccgcctgggatgtgatcttcagcaaggctgacatctacacccagaacttctactgggagctgcggcagaagggctctgtgcaccacgactaccggggcatcctgtaccgcctgctgggggacagcaagatgagctttgaggacatcaaggccaacgtgacagagatgctggccggcggcgtggacaccacctccatgaccctgcagtggcacctgtatgagatggccaggaacctgaaggtgcaggacatgctgcgggcagaggtgctggccgcccggcaccaggcccagggcgacatggccaccatgctgcagctggtgcccctgctgaaggccagcatcaaggagaccctgcggcactggtgcaagtggcccagcatgctgtgggccgagagcccccccagcagcagcaccaggaagatcctgacccagccagatggatag

SEQ ID NO: 15571 - DNA, 435 bp, Artificial Sequence
  derived and/or modified sequence
atgctggccaagggcctgcccccaagatctgtgctggtgaagggctgccagaccttcctgagcgccccccgggagggcctgggccgcctgcgggtgcccaccggggagggcgccggcatcagcaccaggagcccccggcccttcaatgagatccccagccctggggacaatggctggctgaacctgtaccacttctggagggagaccggcacccacaaggtgcacctgcaccacgtgcagaacttccagaagtatggccccatctaccgggagaagctgggcaatgtggagagcgtgtatgtgattgatcctgaagatgtggccctgctcttcaagtctgagggccccaaccctgagcgcttcctgatccccccctgggtggcctaccaccagtactaccagaggcccatcggcgtgctgctgaaccaccactag

SEQ ID NO: 15572 - DNA, 1566 bp, Artificial Sequence
  derived and/or modified sequence
atgctggccaagggcctgcccccccggagcgtgctggtgaagggctgccaaacattcctatctgcacctcgcgaggggctgggtcgtctgcgcgtacctaccggcgagggagcaggcatctcaaccagaagccctcgccctttcaacgagattcccagccctggagacaatggatggctcaatctgtaccacttctggagggagacagggacgcacaaagttcacctgcaccacgtgcagaacttccagaagtacggccctatctacagggagaaactggggaacgtcgaatctgtttacgtgatagacccagaagacgttgcactcttgtttaagtccgagggccctaatccagagagattcctgatcccgccttgggtggcctaccatcagtactatcagcggcccatcggcgtgctgctgaagaagtctgctgcctggaaaaaggatcgggtagccctaaatcaagaggtcatggccccagaggccactaagaatttcctgcccctcctggacgccgtcagtagagatttcgtgtctgttctgcaccgccggatcaagaaagccggatccggcaactattctggggacatatccgacgatctattccgttttgcttttgagagtattacaaatgtgattttcggggaaaggcaaggcatgctggaggaggtcgtgaacccagaggcacagaggtttatagacgctatttaccaaatgtttcacactagcgtacctatgctgaatttaccccccgatttgttccgcctctttagaacaaaaacatggaaggaccacgtcgccgcctgggacgtgatttttagtaaagctgatatctatactcagaacttctattgggagcttaggcagaagggatctgtccaccacgactatcgcggaatcctctaccgcctcctgggtgacagcaaaatgtcctttgaggacatcaaggccaacgtcaccgagatgctggccggcggagtggacaccaccagtatgacgttacagtggcatctttatgaaatggcacgtaatcttaaagttcaggatatgctgagggcggaagttcttgccgcccgacatcaagcacaaggtgacatggctaccatgttgcagctggtgccattacttaaagcgagcatcaaggagacccttaggctccatcccatttcggtcacccttcagcggtacctggtcaacgaccttgttctgcgcgattatatgatccctgccaagaccctggtacaggtagccatttacgccttgggaagagagccgacctttttctttgatcctgagaattttgacccaacccgctggttatcaaaagataaaaacatcacttactttcgcaacttgggtttcgggtggggggtccgccaatgtctgggaaggcggattgccgaacttgagatgaccatattcctaatcaatatgctcgagaatttcagggtggaaatccagcacctctcagacgttggaacaacctttaacctcattctaatgccggaaaagccaatcagtttcacattttggcccttcaatcaggaggcgacccagcaatag

SEQ ID NO: 15573 - DNA, 1245 bp, Artificial Sequence
  derived and/or modified sequence
atgctggccaagggcctgcccccccggagcgtgctggtgaagggctgccagacctttctaagcgctccccgtgaggggctgggtcgcctacgtgtgccaactggcgagggtgccggcatctctactcgcagtcctcgccccttcaacgaaatccccagcccaggcgacaatggatggctcaatctttatcatttctggagagaaactggaacccataaggttcacctccaccacgttcagaattttcagaagtatgggcctatctatcgcgaaaagctgggtaacgtagaaagcgtatacgtcatcgacccagaggacgtggcactcctcttcaaatccgagggccccaaccccgaaagattcctcatacccccttgggtggcttatcaccagtattatcagcggcccattggcgtcttgctgaagaaatccgctgcctggaagaaggaccgcgtcgcgctgaatcaggaggtaatggctcccgaggctacaaagaactttctaccccttcttgatgccgtcagcagagacttcgtgtcagtgctgcacaggcggatcaagaaagctggcagcggcaattacagcggagatatttccgatgacctattccgctttgcctttgaaagcattacaaacgtcatcttcggtgagcgccagggaatgctggaagaggtcgttaacccggaggctcagcgattcatagacgcaatttatcagatgttccacactagtgtgcctatgctcaacctgcctccagatctctttcggctatttaggaccaagacttggaaggatcatgttgccgcctgggatgttatttttagtaaagctgatatctacacacaaaacttttattgggagctgcgccagaaaggttccgtacatcacgattacagggggattctgtatagactacttggggactccaagatgagcttcgaagacatcaaggccaacgttacagagatgcttgctggcggggtcgataccacaagcatgacgctccagtggcacctctatgagatggcacggaaccttaaggtgcaagatatgctgagagccgaggttctggcagcccgacaccaggcccagggcgacatggccactatgttgcaactggtgcccttattgaaagcttccattaaagaaacccttcgacattggtgcaagtggccatccatgctatgggccgaaagcccgccttccagctcgacaaggaaaattctcacccaacctgacggttag

SEQ ID NO: 15574 - DNA, 435 bp, Artificial Sequence
  derived and/or modified sequence
atgctggccaagggcctgcccccccggagcgtgctggtgaagggctgccagacattcttatccgcaccacgtgagggcctcggacggcttcgggttcctacaggcgagggggctgggatctcaactagatcgcctcggcccttcaatgagattccttctcccggcgacaacggctggctgaacctgtatcacttttggcgggagaccggtacacacaaggtgcacctgcaccatgtccaaaatttccagaaatacggcccgatttaccgtgaaaagctgggcaatgtagaaagcgtctacgtcatagatcccgaggacgtagctctcctgtttaagagtgagggtcccaatccagaacggttccttatcccaccttgggtcgcttaccaccaatattaccagcgccctatcggggtactccttaatcaccattag

SEQ ID NO: 15575 - DNA, 1566 bp, Artificial Sequence
  derived and/or modified sequence
atgttggccaagggcctccctcctagatctgtgctcgtgaaggggtgccaaaccttcttatccgctccccgagaggggctgggaagattgcgcgtgcctaccggggaaggggcaggcatttcaacgagaagccctcggcctttcaatgagattccgtctcctggagataacggttggttgaacctgtaccacttctggcgagagactggaactcataaggtacatctgcaccacgtgcaaaactttcagaaatacggtccgatttaccgggagaagcttgggaatgttgaaagcgtttacgtaatcgaccctgaagatgtggccctgctttttaaatccgagggacccaaccctgagagattcctcattcctccctgggtcgcttaccatcaatattaccagaggcctattggagttttgctaaagaagtccgctgcgtggaaaaaggatcgggtcgccctcaatcaggaggttatggctcccgaagccaccaagaactttctgccactgctggacgcagtgagccgggacttcgttagtgtgttgcatcggagaatcaagaaggcgggaagtggaaattactctggagatatttccgacgatctctttcgtttcgctttcgaatctattacaaacgtaatttttggtgaacggcagggaatgttggaggaagtggtgaacccagaggcccagcgtttcatagatgccatctaccaaatgttccacaccagtgtgccaatgctcaatctgcctccagacttatttagactgtttagaactaaaacatggaaagaccatgtggccgcatgggacgtcatcttttcaaaagccgacatttacactcagaacttctattgggagctgcgccagaagggttctgtccaccatgactatcggggtatactttacagacttctgggtgactctaaaatgagttttgaggatattaaagcgaatgtgacagagatgctggctggcggagtggatacaacctctatgaccctccagtggcacctttatgaaatggcgagaaacttgaaggtgcaggacatgctccgcgctgaggtactggctgctcggcatcaagcccagggtgatatggccaccatgttgcagctggtcccccttttgaaggcctcgatcaaggagactttacgactccatcccatttctgttacactgcagaggtatctcgtgaacgaccttgtcctgagggactatatgatccccgctaagacactcgtccaggtggcaatctacgccttgggccgtgagccaactttcttttttgatcctgagaacttcgacccaaccaggtggttgtctaaagataaaaatatcacctacttccggaacctggggtttggttggggtgtacgacagtgcctcgggagaaggatagcagagctggagatgaccatatttctcattaacatgctcgagaacttcagagtcgagatccaacacttgtcagatgtagggacgactttcaatttgatcctcatgccagagaagcccatctctttcacattctggccctttaatcaggaagccactcaacagtag

SEQ ID NO: 15576 - DNA, 1245 bp, Artificial Sequence
  derived and/or modified sequence
atgctggcaaagggattacctcccagatccgtactcgtcaaaggctgccagacttttctcagcgcacctcgtgagggactcggaagactgagggtccccacaggtgagggcgctggcatttccactagaagcccaagacctttcaatgaaatcccatcacccggtgacaatgggtggctgaacctttatcacttttggcgggagaccgggactcataaggtgcatctacatcacgtccagaacttccaaaagtatggaccaatttatcgcgaaaagctcggaaatgtggagagcgtgtacgtcatcgatcccgaggatgttgccttgctttttaagagtgagggaccgaacccggagcgtttcctgataccaccctgggtggcgtatcaccagtactaccaacgtcctattggagtgttactcaagaagtccgccgcttggaaaaaagatagggtggccctcaatcaggaggtcatggcaccagaggctactaaaaatttccttccgctcctagatgccgtttctcgcgactttgtttccgtgctgcatagacgcatcaagaaagctggaagcggaaactacagtggggacattagcgacgatctctttcggttcgcttttgaatccatcacgaacgtcattttcggcgagcggcaggggatgctagaggaagtggtgaatcctgaggctcagcggttcatagatgccatataccagatgttccacaccagcgttcctatgctgaacttgcctcccgatttattcagattatttcggaccaaaacgtggaaggaccatgtggcagcttgggatgtgattttttccaaggccgatatttacactcaaaatttttattgggaattgcgtcagaagggatctgtgcatcatgactaccgcggaatactgtaccggcttctgggagatagcaagatgtcatttgaggacattaaggccaatgtgactgaaatgttagccggtggagtcgacactacttccatgacacttcaatggcatctttatgaaatggcacgcaatttaaaggtacaggatatgctgagggccgaagtgctcgccgcaaggcatcaggcgcagggtgatatggccaccatgctgcagctggtgccgctcctgaaagcctccatcaaagaaacattgaggcattggtgtaaatggccgagcatgctatgggcagagtcaccccctagctcttcaactaggaaaattctcactcaacccgatggatag

SEQ ID NO: 15577 - DNA, 435 bp, Artificial Sequence
  derived and/or modified sequence
atgctcgcaaaagggttaccgccacggtccgttctggtgaagggttgccaaacattcctttctgcacctagggagggcctaggcaggcttcgtgttccaaccggtgagggcgctggcatctcgactagatcccccaggccctttaacgagattccatcgcccggagataacggctggttaaacctgtaccacttttggcgggagaccggaacacacaaggtgcatctgcatcatgtccagaacttccagaagtatggaccaatatacagagaaaagctgggaaatgtcgagtcagtttatgtgattgaccccgaggatgtcgccctgctatttaagagcgaaggacccaacccagagcgatttctgatacctccgtgggtagcctaccaccagtattatcagcgccctataggagtgttactgaatcaccactag

SEQ ID NO: 15578 - protein, 514 aa, Artificial Sequence
  derived and/or modified sequence
MSSPISKSRSLAAFLQQLRSPRQPPRLVTSTAYTSPQPREVPVCPLTAGGETQNAAALPGPTSWPLLGSLLQILWKGGLKKQHDTLVEYHKKYGKIFRMKLGSFESVHLGSPCLLEALYRTESAYPQRLEIKPWKAYRDYRKEGYGLLILEGEDWQRVRSAFQKKLMKPGEVMKLDNKINEVLADFMGRIDELCDERGHVEDLYSELNKWSFESICLVLYEKRFGLLQKNAGDEAVNFIMAIKTMMSTFGRMMVTPVELHKSLNTKVWQDHTLAWDTIFKSVKACIDNRLEKYSQQPSADFLCDIYHQNRLSKKELYAAVTELQLAAVETTANSLMWILYNLSRNPQVQQKLLKEIQSVLPENQVPRAEDLRNMPYLKACLKESMRLTPSVPFTTRTLDKATVLGEYALPKGTVLMLNTQVLGSSEDNFEDSSQFRPERWLQEKEKINPFAHLPFGVGKRMCIGRRLAELQLHLALCWIVRKYDIQATDNEPVEMLHSGTLVPSRELPIAFCQR

SEQ ID NO: 15579 - DNA, 1545 bp, Artificial Sequence
  derived and/or modified sequence
atgtcgtctccgatctccaaatcaaggtcccttgctgcttttttacagcagctccgcagccccagacaaccacccaggctcgtgacttcgaccgcctacacctccccacagccgagggaggttcccgtgtgtcctcttacggccggtggagagacccagaacgcagccgcgctacccgggccaacatcatggcctctattgggcagcttgctgcaaatactgtggaagggaggattaaagaagcagcatgacacgctcgttgagtaccacaagaagtatggtaagatttttcggatgaagctgggaagcttcgaatccgtccatctcggctccccttgtctgctcgaagccttatacagaaccgaatccgcctacccccagaggctcgaaattaagccatggaaggcgtatcgagattatcgcaaagagggatacggactcctaatcctggagggcgaggactggcaacgagtgaggagcgcattccagaagaagctgatgaaaccaggggaagtcatgaaactcgacaacaagatcaatgaagtactcgccgacttcatgggaaggatcgacgagctgtgcgatgagcgcggacacgtcgaagatctttactccgaactgaacaagtggagcttcgagagcatctgtctggtgctctacgaaaaacgatttggcctgctccagaagaacgcaggtgatgaggccgtaaacttcattatggcaataaagaccatgatgagcactttcggtagaatgatggtgaccccagttgagcttcataaatccctaaacacgaaggtctggcaggatcacactctggcctgggatactattttcaagtcagtgaaggcttgtattgacaaccggcttgaaaaatattcacagcaaccctccgccgatttcctgtgcgacatttaccaccagaacaggctcagcaagaaggagttgtacgccgccgtcactgaactgcagctggccgcagttgagaccacggcaaacagtctgatgtggattttgtataatctgagtcggaaccctcaggtgcaacaaaagctgctgaaggagattcagtctgtgctacctgagaaccaggtgccacgggctgaagacctgcgtaacatgccttatttgaaagcatgccttaaagagtccatgcgcctcaccccctctgtgccatttactacccggaccctggacaaagcgaccgtactgggcgagtacgctttgcctaagggaactgtcctcatgctgaatactcaggttctggggagtagtgaagataacttcgaagacagcagtcagtttagacctgagcggtggctgcaggaaaaagagaaaatcaacccctttgcacatcttccatttggggtcgggaaacgaatgtgtattggtcggagacttgcggaactgcagctgcatcttgcactgtgctggatcgtgcgcaagtatgatatccaggcaaccgacaatgagcctgtggagatgctacattctggaaccctggtgccaagtcgggagctgcctatagccttctgccagaggtag

SEQ ID NO: 15580 - DNA, 1545 bp, Artificial Sequence
  derived and/or modified sequence
atgagcagccccatcagcaagagccgcagcctggccgccttcctgcagcagctgcggagcccccggcagcccccccggctggtgaccagcacagcctacaccagcccccagccccgggaggtgcctgtgtgccccctgacagctggaggagagacccagaatgctgctgccctgcccggccccacctcctggcccctgctgggcagcctgctgcagatcctgtggaagggcggcctgaagaagcagcacgacaccctggtggagtaccacaagaagtatggcaagatcttcaggatgaagctgggcagctttgagagcgtgcacctgggcagcccctgcctgctggaggccctgtacagaacagaaagtgcctacccccagaggctggagatcaagccctggaaggcctacagagactacaggaaggagggctacggcctgctgatcctggagggggaggactggcagagggtgcgcagcgccttccagaagaagctgatgaagccaggagaggtgatgaagctggacaacaagatcaatgaggtgctggccgacttcatgggcagaattgatgagctgtgtgatgagcggggccacgtggaggacctgtacagcgagctgaacaagtggagctttgagagcatctgcctggtgctgtatgagaagcgcttcggcctgctgcagaagaatgctggagatgaagctgtgaacttcatcatggccatcaagaccatgatgagcacctttggaaggatgatggtgacccctgtggagctgcacaagagcctgaacaccaaggtgtggcaggaccacaccctggcctgggacaccatcttcaagtctgtgaaggcctgcatcgacaaccggctggagaagtacagccagcagcccagcgctgacttcctgtgtgacatctaccaccagaaccggctgagcaagaaggagctgtatgctgctgtgacagagctgcagctggccgctgtggagaccacagccaacagcctgatgtggatcctgtacaacctgagcaggaacccccaggtgcagcagaagctgctgaaggagatccagagcgtgctgcctgagaaccaggtgcccagggctgaggacctgaggaacatgccctacctgaaggcctgcctgaaggagagcatgaggctgacccccagcgtgcccttcaccaccaggaccctggacaaggccaccgtgctgggggagtatgccctgcccaagggcaccgtgctgatgctgaacacccaggtgctgggcagcagcgaggacaactttgaggacagcagccagttccggcctgagcgctggctgcaggagaaggagaagatcaacccctttgcccacctgccctttggagtgggcaagaggatgtgcattggaagaaggctggccgagctgcagctgcacctggccctgtgctggatcgtgaggaaatatgacatccaggccacagacaatgaacctgtggagatgctgcacagcggcaccctggtgcccagccgggagctgcccatcgccttctgccagaggtag

SEQ ID NO: 15581 - DNA, 1545 bp, Artificial Sequence
  derived and/or modified sequence
atgagcagccccatcagcaagagccggagcctggccgccttcctgcagcagttacgctcacctcgccaacctccccggttggtcacatccacggcctacaccagtccacagccacgggaggtccctgtgtgccctcttaccgctggaggtgagactcaaaacgccgccgccttgccgggccctacttcctggccgctgctcggctccctattgcaaatcctgtggaaaggtggactgaaaaaacaacatgacaccttagtcgagtatcacaagaaatacggcaaaatcttccgtatgaaactcgggagttttgagtctgtgcacctcgggtctccctgcctgctcgaggccctttatcgaaccgaatcagcctatccacagcgtctcgaaataaaaccttggaaggcttatcgcgactaccgaaaagagggctatggccttctcattttggagggcgaagattggcaaagagtgcggtcagcctttcagaagaagctcatgaagcccggcgaggtaatgaaactggataacaagattaatgaggttcttgctgatttcatgggacggatcgacgaactatgcgacgagagagggcacgttgaggacttatacagtgaactgaacaagtggtccttcgagtccatctgcctagttttgtacgagaagcggtttggcctgctgcagaaaaacgcgggcgatgaagcagtgaactttatcatggcaattaagacaatgatgagtactttcggacgcatgatggtgacacccgtggaattacacaagtcattgaacactaaggtttggcaggaccacacactcgcctgggacactatcttcaagagcgtaaaagcctgcatcgataacagactggaaaaatactcccaacaacctagcgctgactttctgtgcgacatctaccaccagaatcgcctttccaaaaaggagctttatgcagctgtcaccgagttacagttggctgctgttgaaaccaccgcgaactctctcatgtggatcctctacaatcttagtaggaacccgcaagtccagcagaagctgctgaaagaaatacaaagtgtgttgccagagaatcaggtccccagggccgaagacctcaggaacatgccctacctaaaagcgtgtctgaaagagtctatgagattgaccccttcggtgccctttactacgcggaccctcgacaaagccactgttctgggcgagtacgcactgccgaagggtacagttctcatgcttaacacacaagtgctggggagctctgaagataattttgaggattccagtcagtttaggcccgagcggtggctgcaggagaaagaaaagatcaacccttttgctcacttaccctttggcgtgggcaaaagaatgtgcatcgggagacggctcgccgaactgcagctccacctggctctctgctggattgtgagaaaatacgatattcaggcaactgacaacgaacccgtggagatgttgcacagtgggactctggttccctcacgggagctgcccatcgccttctgccaaaggtag

SEQ ID NO: 15582 - DNA, 1545 bp, Artificial Sequence
  derived and/or modified sequence
atgtcatctccgatttctaaatcccggtcactcgcggcattcttacagcaattgcgctctccaagacagccaccgcgtctggtcacctccaccgcatacacgagtccacaaccacgtgaggtcccggtttgccccctgacggccggtggcgagacacagaacgctgcagcactgcccggacccactagctggcctctgcttggttcacttttacaaatcctgtggaagggagggcttaaaaaacaacacgataccctagtggaataccacaagaagtatgggaagatattccggatgaagctgggaagttttgagagcgtgcacttaggaagcccttgcctcctggaagccttgtaccgcactgagagcgcctacccgcagcggctcgaaattaaaccgtggaaagcgtatcgtgattatcgcaaagagggatacgggttactgattctagaaggcgaggactggcaacgcgtccggtccgctttccagaagaagctcatgaagcccggtgaggttatgaagcttgataataaaatcaacgaggtcctagcagatttcatgggtcgaatcgacgagctgtgtgacgagagaggccatgtggaggatctgtatagcgagctcaataaatggtcattcgaatccatttgtctggtactttacgaaaaaaggttcggtctattgcagaaaaatgccggagacgaagctgttaacttcattatggccatcaagacaatgatgagcacattcggcagaatgatggtaacacctgtggagctccacaaatccctgaatacaaaggtatggcaggaccatacgctggcgtgggacaccatatttaagtccgtcaaggcttgcattgataaccggctcgagaagtattcccagcagcctagtgctgacttcctttgcgatatttaccaccagaataggctttcgaaaaaagagctttatgccgctgtcacggaactacaactggcggctgtggaaaccaccgctaacagcctcatgtggatcctctataacttgtctagaaatccccaggtccaacaaaaactcctgaaggaaatccagagcgtgctgcctgagaaccaggtgccacgagcggaggatctgcgcaacatgccctacctcaaggcttgcttaaaggagtctatgcgtttaacacccagcgttcccttcaccacccgaaccctcgataaggccactgtgctgggagaatacgctcttcctaaagggactgtgctcatgctaaacacccaggtcctcgggagcagtgaagataatttcgaggactcttctcagttcagaccagaacggtggctgcaggagaaggaaaagatcaacccttttgctcacttacctttcggagtgggcaagaggatgtgcatcggccgaaggttggccgaactccagctccacttggctctatgctggatcgtgagaaagtatgatatccaggccacagacaatgaacccgtggagatgctgcacagtgggacgctcgtgcccagccgggagcttcccatcgcgttttgccagaggtag

SEQ ID NO: 15583 - DNA, 3262 bp, Artificial Sequence
  derived and/or modified sequence
ggaggaaacgcagcgccagcagcatctcatctaccctccttgacacctccccgtggctccagccagaccctagaggtcagccttgcggaccaacaggaggactcccagctttcccttttcaagaggtccccagacaccggccaccctcttccagcccctgcggccagtgcaaggaggcaccaatgctctgaggctgtcgcgtggtgcagcgtcgagcatcctcgccgaggtcctttctgctgcctgtcccgcctcaccccgctccatcacaccagctggccctctttgcttccttttcccagaatcgttaagccccgactcccactagcacctcgtaccaacctcgccccaccccatcctcctgccttcccgcgctccggtgtcccccgctgccatgagctcccccatcagcaagagccgctcgcttgccgccttcctgcagcagctgcgcagtccgaggcagcccccgagactggtgacatctacggcgtacacgtcccctcagccgcgagaggtgccagtctgcccgctgacagctggtggcgagactcagaacgcggccgccctgccgggccccaccagctggccactgctgggcagcctgctgcagattctctggaaagggggtctcaagaaacagcacgacaccctggtggagtaccacaagaagtatggcaagattttccgcatgaagttgggttcctttgagtcggtgcacctgggctcgccatgcctgctggaagcgctgtaccgcaccgagagcgcgtacccgcagcggctggagatcaaaccgtggaaggcctatcgcgactaccgcaaagaaggctacgggctgctgatcctggaaggggaagactggcagcgggtccggagtgcctttcaaaagaaactaatgaaaccaggggaagtgatgaagctggacaacaaaatcaatgaggtcttggccgattttatgggcagaatagatgagctctgtgatgaaagaggccacgttgaagacttgtacagcgaactgaacaaatggtcgtttgaaagtatctgcctcgtgttgtatgagaagagatttgggcttctccagaagaatgcaggggatgaagctgtgaacttcatcatggccatcaaaacaatgatgagcacgtttgggaggatgatggtcactccagtcgagctgcacaagagcctcaacaccaaggtctggcaggaccacactctggcctgggacaccattttcaaatcagtcaaagcttgtatcgacaaccggttagagaagtattctcagcagcctagtgcagatttcctttgtgacatttatcaccagaatcggctttcaaagaaagaattgtatgctgctgtcacagagctccagctggctgcggtggaaacgacagcaaacagtctaatgtggattctctacaatttatcccgtaatccccaagtgcaacaaaagcttcttaaggaaattcaaagtgtattacctgagaatcaggtgccacgggcagaagatttgaggaatatgccgtatttaaaagcctgtctgaaagaatctatgaggcttacgccgagtgtaccatttacaactcggactcttgacaaggcaacagttctgggtgaatatgctttacccaaaggaacagtgctcatgctaaatacccaggtgttgggatccagtgaagacaattttgaagattcaagtcagtttagacctgaacgttggcttcaggagaaggaaaaaattaatccttttgcgcatcttccatttggcgttggaaaaagaatgtgcattggtcgccgattagcagagcttcaactgcatttggctctttgttggattgtccgcaaatacgacatccaggccacagacaatgagcctgttgagatgctacactcaggcaccctggtgcccagccgggaactccccatcgcgttttgccagcgataatacgcctcagatggtggtatttgctaacatcatatccaactcagggaagcggactgagtgctgggatccaaggcattctacagggttcactgctggtttacacttcacctgtgtcagcaccatcttcaggtgcttagaatggcctgggagcctgttctgtcttgcatcttccatgacatgaaagggaggctggcacttgtcagtcaggtagaggttacaaaccgtttcaggccctgcctaccacattcactgtttgaatctttaattcccaagaataagtttacatttcacaatgaatgacctacaacagctaaattttctggggctgggagtaatactgacaatccatttactgtagctctgcttaatgtactacttaggaaaatgtccctgcttaataatgtaagccaagctaaatgatggttaaagttatcaggcctcccatgaaattgcgttcttcctgcattgaaataaaaacattattgggaaactagagaacacctctatttttaaaaggactttaacgaagtcaaacaacttataagactagtgattcactggggcattattttgttagaggaccttaaaattgtttattttttaaatgtgattcctttatggcattagggtaaagatgaagcaataatttttaaattgtgtatgtgcatatgaagcacagacatgcatgtgtgtgtgtgtctgtgtgtgtgtgtccgtgtatgtgtgtgtgggttctaatggtaatttgcctcagtcatttttttaatatttgcagtacttgatttaggatctgtggtgcagggcaatgtttcaaagtttagtcacagcttaaaaacattcagtgtgactttaatattataaaatgatttcccatgccataatttttctgtctattaaatgggacaagtgtaaagcatgcaaaagttagagatctgttatataacatttgttttgtgatttgaactcctaggaaaaatatgatttcataaatgtaaaatgcacagaaatgcatgcaatacttataagacttaaaaattgtgtttacagatggtttatttgtgcatatttttactactgcttttcctaaatgcatactgtatataattctgtgtatttgataaatatttcttcctacattatatttttagaatatttcagaaatatacatttatgtctttatattgtaataaatatgtacatatctaggtatatgctttctctctgctgtgaaattatttttagaattataaattcacgtcttgtcagatttcatctgtataccttcaaattctctgaaagtaaaaataaaagtttttaaatatt

SEQ ID NO: 15584 - DNA, 1545 bp, Artificial Sequence
  derived and/or modified sequence
atgagcagccccatcagcaagagcagaagcctggccgccttcctgcagcagctgagaagccccagacagccccccagactggtgaccagcaccgcctacaccagcccccagcccagagaggtgcccgtgtgccccctgaccgccggcggcgagacccagaacgccgccgccctgcccggccccaccagctggcccctgctgggcagcctgctgcagatcctgtggaagggcggcctgaagaagcagcacgacaccctggtggagtaccacaagaagtacggcaagatcttcagaatgaagctgggcagcttcgagagcgtgcacctgggcagcccctgcctgctggaggccctgtacagaaccgagagcgcctacccccagagactggagatcaagccctggaaggcctacagagactacagaaaggagggctacggcctgctgatcctggagggcgaggactggcagagagtgagaagcgccttccagaagaagctgatgaagcccggcgaggtgatgaagctggacaacaagatcaacgaggtgctggccgacttcatgggcagaatcgacgagctgtgcgacgagagaggccacgtggaggacctgtacagcgagctgaacaagtggagcttcgagagcatctgcctggtgctgtacgagaagagattcggcctgctgcagaagaacgccggcgacgaggccgtgaacttcatcatggccatcaagaccatgatgagcaccttcggcagaatgatggtgacccccgtggagctgcacaagagcctgaacaccaaggtgtggcaggaccacaccctggcctgggacaccatcttcaagagcgtgaaggcctgcatcgacaacagactggagaagtacagccagcagcccagcgccgacttcctgtgcgacatctaccaccagaacagactgagcaagaaggagctgtacgccgccgtgaccgagctgcagctggccgccgtggagaccaccgccaacagcctgatgtggatcctgtacaacctgagcagaaacccccaggtgcagcagaagctgctgaaggagatccagagcgtgctgcccgagaaccaggtgcccagagccgaggacctgagaaacatgccctacctgaaggcctgcctgaaggagagcatgagactgacccccagcgtgcccttcaccaccagaaccctggacaaggccaccgtgctgggcgagtacgccctgcccaagggcaccgtgctgatgctgaacacccaggtgctgggcagcagcgaggacaacttcgaggacagcagccagttcagacccgagagatggctgcaggagaaggagaagatcaaccccttcgcccacctgcccttcggcgtgggcaagagaatgtgcatcggcagaagactggccgagctgcagctgcacctggccctgtgctggatcgtgagaaagtacgacatccaggccaccgacaacgagcccgtggagatgctgcacagcggcaccctggtgcccagcagagagctgcccatcgccttctgccagagatag

SEQ ID NO: 15585 - protein, 497 aa, Artificial Sequence
  derived and/or modified sequence
MGLPALLASALCTFVLPLLLFLAAIKLWDLYCVSGRDRSCALPLPPGTMGFPFFGETLQMVLQRRKFLQMKRRKYGFIYKTHLFGRPTVRVMGADNVRRILLGEHRLVSVHWPASVRTILGSGCLSNLHDSSHKQRKKVIMRAFSREALECYVPVITEEVGSSLEQWLSCGERGLLVYPEVKRLMFRIAMRILLGCEPQLAGDGDSEQQLVEAFEEMTRNLFSLPIDVPFSGLYRGMKARNLIHARIEQNIRAKICGLRASEAGQGCKDALQLLIEHSWERGERLDMQALKQSSTELLFGGHETTASAATSLITYLGLYPHVLQKVREELKSKGLLCKSNQDNKLDMEILEQLKYIGCVIKETLRLNPPVPGGFRVALKTFELNGYQIPKGWNVIYSICDTHDVAEIFTNKEEFNPDRFMLPHPEDASRFSFIPFGGGLRSCVGKEFAKILLKIFTVELARHCDWQLLNGPPTMKTSPTVYPVDNLPARFTHFHGEI

SEQ ID NO: 15586 - DNA, 1287 bp, Artificial Sequence
  derived and/or modified sequence
atgaaacgcaggaagtacggttttatctacaagacccatcttttcgggagacccactgtcagagtgatgggagctgacaacgtgcgcagaatacttctgggcgaacatcgattggtgagtgtgcactggcccgcttcagtacggaccatcctcggatccggatgtttgtctaatctacacgacagctcgcacaaacaacggaagaaggtgatcatgcgtgcattcagccgggaggcgttagagtgttacgttccggtgattactgaggaagtgggatccagcctcgagcagtggctgagctgtggcgaaagggggctgcttgtctacccagaggtgaagcgcctcatgtttcgcatagcaatgcgaatactgctggggtgcgaaccacagctcgcaggtgatggagacagtgagcagcaacttgttgaagctttcgaagagatgacgcgcaatttgttttccctgcctatcgacgttcctttcagtggactgtaccgtgggatgaaagcgcgaaacctgatacacgcccgaatcgaacagaatatacgggcaaagatttgcggattgagggcctcggaggccgggcaagggtgcaaggacgccttgcagttgctgatcgagcattcttgggaaagaggagagaggctggatatgcaggccctgaagcagtcgtctacagagctgctttttggcggtcatgagactaccgcctctgccgctacctctctgattacatacctggggttgtaccctcatgttcttcagaaagttagagaagagctgaaaagcaagggactgctgtgtaagtcaaaccaagacaataagctagacatggaaattcttgagcagcttaagtatatcggatgcgtgattaaggaaacactgcgcctcaaccctcccgtcccaggcggcttcagagtggccctgaaaacattcgagctgaacgggtaccagatccccaagggatggaatgtgatctatagcatctgtgatactcacgacgtggcagagattttcacgaataaggaggaatttaatcccgaccgtttcatgttaccacacccggaggatgcaagccggtttagttttatcccttttggcggtgggttacgctcttgcgttggaaaggaatttgcgaaaatactcctgaaaatcttcactgtagagttggctcgccattgcgactggcagttacttaacggaccgccgactatgaagactagtcccaccgtctaccccgttgacaacctccccgcaagattcacccacttccacggagagatttag

SEQ ID NO: 15587 - DNA, 1287 bp, Artificial Sequence
  derived and/or modified sequence
atgaaacggcggaagtatggcttcatctacaaaacccatctgtttggtagacccacagttcgcgtgatgggcgccgataatgttcgcaggattttgctcggagagcaccgtcttgtgtctgtccactggcctgctagtgtccgaactattctcggatcaggctgcttatccaatcttcatgactcaagtcataagcagagaaaaaaagtaataatgcgtgccttctcccgggaggccctggagtgttatgtcccagtgatcactgaggaggtggggagctcattagaacagtggctctcatgcggggaaaggggtttgcttgtgtatcccgaggtcaaacgtctcatgttccggattgccatgcgcatcttactaggctgtgagccacagctggcaggcgatggcgatagtgagcaacaactggttgaagcgtttgaggagatgaccagaaaccttttcagcctgcccatagacgtgcccttctccggcctgtacagaggcatgaaggcaaggaaccttattcatgcgcgcatcgagcaaaacatacgtgcaaagatttgcggcctgagagcatcagaggccgggcagggatgtaaggacgccctgcagttactaatcgagcactcatgggaaaggggtgagaggctggacatgcaggcattgaagcagagctcaactgagctgctattcgggggccatgagactaccgcctcggccgcaacttctctgatcacctaccttggattgtacccgcatgtgctgcaaaaggtgcgggaagaactaaagtctaagggactgctatgcaagtcaaaccaggacaacaaattggatatggaaatactagagcagttgaagtatattgggtgcgtcatcaaggagactctccgcctcaatccccccgtaccaggggggtttagagtcgctctaaaaactttcgaactcaatggatatcaaatacccaaaggatggaacgtgatttactccatctgtgacacccatgacgttgcagagattttcaccaacaaagaggagttcaaccctgacaggttcatgctaccacatcctgaggatgcctcacgattttcttttattccattcggtggggggctgaggtcatgcgttggaaaggaatttgcgaagattctgctgaaaattttcactgttgaacttgccaggcactgtgactggcaactactcaatgggccacccactatgaaaacatcccctacagtctaccccgttgacaatctgccagcccgtttcacccacttccatggtgagatctag

SEQ ID NO: 15588 - DNA, 1494 bp, Artificial Sequence
  derived and/or modified sequence
atgggtctgcctgcattgttggcttcagctctgtgcacattcgtgctccctttactattgttcctcgctgccattaagctatgggatctctactgtgtgtctggtcgggataggagttgtgcactgcccctgccgccaggcaccatgggctttccttttttcggggagaccttgcagatggtgctgcagcggcggaagtttctccagatgaaacggcgtaagtatggtttcatttataagacccatctgttcggccgccctaccgtgcgggtcatgggtgcagataacgttcgcaggatcttgcttggcgagcatcgcctggtaagcgtccattggcctgcctcagtaaggacgatcctgggatcaggatgcttgagtaatctgcacgatagctcacacaagcagcgcaaaaaagtgattatgcgcgcgttcagtcgggaagccctggaatgttatgtgcctgtgattacagaggaagtcggaagctcgctcgagcaatggctctcctgtggagaacgcggactgctggtgtaccctgaggttaaacgtctgatgtttcgcatcgccatgagaatcctgctcggttgcgagccacagctggcaggagacggagattcagagcagcagctggtggaagcctttgaggaaatgacgcgcaatctgttttccctgcccatcgatgtgcccttcagcgggctctatcgaggaatgaaggcaagaaatctgatccatgccaggattgagcagaacattagggctaagatctgcggcctgcgggccagcgaggccggacagggctgcaaggatgcattgcagctcctcatagagcactcctgggagcgtggtgaacgtctggacatgcaagcgctgaagcaatctagcaccgagctgctgttcgggggccacgagacgacagcatccgcagcgacgtccctgattacctacctagggctgtaccctcacgtgcttcagaaggtgagggaagagctcaaatcaaaaggtttgctgtgtaagtctaatcaggataacaaattggatatggagattctcgagcagctgaagtacattggatgtgtaattaaagagactctacgcctcaatccacctgtgcctgggggcttccgggttgctttaaaaaccttcgagcttaatggttatcaaattcccaaaggctggaacgtcatctactcaatctgtgacactcatgacgtcgccgaaatcttcacgaacaaagaggaatttaatcccgatcgattcatgttgcctcatccggaagacgcgagcaggttttcttttataccattcgggggagggcttcggtcctgcgttggaaaggagttcgcaaaaatccttctcaagatttttaccgtcgaactggcccggcactgcgactggcagcttctcaatggtcctcctaccatgaaaacttctcccaccgtttatcccgtggacaacctcccagcccgcttcactcacttccacggcgagatttag

SEQ ID NO: 15589 - DNA, 1287 bp, Artificial Sequence
  derived and/or modified sequence
atgaagaggaggaaatatggcttcatctacaagacccacctgtttggccggcccaccgtgcgggtgatgggcgctgacaacgtgcggcgcatcctgctgggggagcaccggctggtgtctgtgcactggccagcctctgtgaggaccatcctgggcagcggctgcctgagcaacctgcatgacagcagccacaagcagaggaagaaggtgatcatgagggccttcagccgggaggccctggagtgctacgtgcctgtgatcacagaggaggtgggcagcagcctggagcagtggctgagctgtggggagcggggcctgctggtgtacccagaggtgaagaggctgatgttcagaattgccatgaggatcctgctgggctgtgagccccagctggccggagatggagacagcgagcagcagctggtggaggcctttgaggagatgaccaggaacctcttcagcctgcccattgatgtgcccttcagcggcctgtaccggggcatgaaggccaggaacctgattcatgcccgcatcgagcagaacatccgggccaagatctgtggcctgcgggccagcgaggccggccagggctgcaaggatgccctgcagctgctgattgagcacagctgggagcggggggagcggctggacatgcaggccctgaagcagagcagcacagagctgctgtttggaggccacgagaccacagccagcgctgccaccagcctcatcacctacctgggcctgtacccccacgtgctgcagaaggtgcgggaggagctgaagagcaagggcctgctgtgcaagagcaaccaggacaacaagctggacatggagatcctggagcagctgaagtacatcggctgtgtgatcaaggagaccctgcggctgaacccccctgtgcctgggggcttccgggtggccctgaagacctttgagctgaatggctaccagatccccaagggctggaatgtcatctacagcatctgtgacacccatgatgtggccgagatcttcaccaacaaggaggagttcaacccagaccgcttcatgctgccccacccagaagatgccagccgcttctccttcatcccctttggaggcggcctgcggagctgtgtgggcaaggagtttgccaagatcctgctgaagatcttcaccgtggagctggcccggcactgtgactggcagctgctgaatggcccccccaccatgaagaccagccccaccgtgtaccctgtggacaacctgcctgcccgcttcacccacttccatggagagatctag

SEQ ID NO: 15590 - DNA, 1494 bp, Artificial Sequence
  derived and/or modified sequence
atgggcctgcctgccctgctggccagcgccctgtgcacctttgtgctgcccctgctgctcttcctggccgccatcaagctgtgggacctgtactgtgtgtctggccgggacaggagctgtgccctgcccctgcccccaggcaccatgggcttccccttcttcggggagaccctgcagatggtgctgcagaggaggaagttcctgcagatgaagaggaggaaatatggcttcatctacaagacccacctgtttggccggcccaccgtgcgggtgatgggcgctgacaacgtgcggcgcatcctgctgggggagcaccggctggtgtctgtgcactggccagcctctgtgaggaccatcctgggcagcggctgcctgagcaacctgcatgacagcagccacaagcagaggaagaaggtgatcatgagggccttcagccgggaggccctggagtgctacgtgcctgtgatcacagaggaggtgggcagcagcctggagcagtggctgagctgtggggagcggggcctgctggtgtacccagaggtgaagaggctgatgttccgcatcgccatgaggatcctgctgggctgtgagccccagctggccggagatggagacagcgagcagcagctggtggaggcctttgaggagatgaccaggaacctcttcagcctgcccattgatgtgcccttcagcggcctgtaccggggcatgaaggccaggaacctgatccacgccagaattgagcagaacatccgggccaagatctgtggcctgcgggccagcgaggccggccagggctgcaaggatgccctgcagctgctgattgagcacagctgggagcggggggagcggctggacatgcaggccctgaagcagagcagcacagagctgctgtttggaggccacgagaccacagccagcgctgccaccagcctcatcacctacctgggcctgtacccccacgtgctgcagaaggtgcgggaggagctgaagagcaagggcctgctgtgcaagagcaaccaggacaacaagctggacatggagatcctggagcagctgaagtacatcggctgcgtcatcaaggagaccctgcggctgaacccccctgtgcctgggggcttccgggtggccctgaagacctttgagctgaatggctaccagatccccaagggctggaatgtcatctacagcatctgtgacacccatgatgtggccgagatcttcaccaacaaggaggagttcaacccagaccgcttcatgctgccccacccagaagatgccagccgcttctccttcatcccctttggaggcggcctgcggagctgtgtgggcaaggagtttgccaagatcctgctgaagatcttcaccgtggagctggcccggcactgtgactggcagctgctgaatggaccacccaccatgaagaccagccccaccgtgtaccctgtggacaacctgcctgcccgcttcacccacttccacggggagatctag

SEQ ID NO: 15591 - DNA, 1287 bp, Artificial Sequence
  derived and/or modified sequence
atgaagcggcggaagtacggcttcatctacaagacccacctgttcggccgccccactgtgcgcgtgatgggcgctgataacgtccgcagaatattgctgggcgaacaccgacttgtctctgtccactggccagccagcgtgagaaccatcttaggctccggctgcctgagcaacctacatgatagtagccataagcaacgcaagaaagtgataatgcgggctttcagccgtgaggctctcgagtgctatgtacccgtgatcacagaagaggtgggaagttctttggagcaatggctttcctgcggggagaggggcctccttgtgtatcctgaggttaaaaggctgatgtttagaatcgctatgcgcatccttttaggctgtgaaccacaactcgccggcgacggggacagcgagcagcagctcgttgaagcttttgaggaaatgaccagaaacttattttccctccctattgatgtcccgttctctggcctgtaccgaggaatgaaggctagaaacctcatacacgcacgaattgaacaaaatatccgggcgaagatttgtggtctacgggcaagtgaggcaggtcagggatgtaaggatgcgctccagctgctgatcgaacattcctgggagagaggggaacgcctggatatgcaggccctcaaacagagtagcacagagctgctgtttggggggcatgagacaacagcttcagctgctacctccttgatcacatatttaggactgtaccctcatgtactccagaaggttcgggaagagttaaagtcaaaagggttgctctgtaagtccaatcaggataataagctggacatggagatcctggagcagctgaagtacatcggctgcgtgataaaagaaacattacggttgaatcctcctgtcccaggcgggtttcgggtcgccctcaagacattcgagctgaatgggtaccagatcccaaagggctggaacgttatatacagcatctgcgacacccacgatgtggctgaaatcttcactaataaagaggagtttaaccccgatcgttttatgctgccacaccccgaggacgcttcccggttttctttcatcccatttggggggggccttagaagctgtgtgggaaaagagtttgccaagatactcctgaagatttttacagtggaattagctcgacactgcgactggcaactgctgaatggaccccctacaatgaaaactagcccgactgtgtatccagtggataacctaccggcacgatttacgcatttccatggcgagatctag

SEQ ID NO: 15592 - DNA, 1287 bp, Artificial Sequence
  derived and/or modified sequence
atgaagcggcggaagtacggcttcatctacaagacccacctgttcggccgaccaactgtgcgggttatgggggcagacaacgtcagacgtattctattaggtgagcacagactcgtttccgtccactggcctgctagcgtgaggactattcttgggtcagggtgtcttagtaatctgcatgacagcagccacaagcaacgcaaaaaggttatcatgcgcgctttcagtcgggaagccctggagtgctatgttcctgttatcacggaggaggttggctcgtctctcgagcagtggctgtcttgcggtgagaggggcctactggtttacccagaagtgaagagactgatgttcaggatcgcgatgaggatcctgctgggctgcgagcctcagcttgccggtgatggagatagcgaacaacaactcgtggaggcatttgaggagatgacaaggaatctcttctccctgcctatagatgtgccgttttccggcttgtatcgtggtatgaaggctaggaatctcattcatgcccgcatcgagcagaatataagggctaaaatctgtgggctacgtgcttctgaggcgggccagggctgcaaggatgcactccagttgcttatcgaacacagctgggagaggggagaacgcctggatatgcaggccctcaaacagtcgtccactgagttactttttggcggacacgaaactaccgcctcagccgccacttccctcatcacctacttgggactctacccacacgtgctgcagaaggttcgggaagaactaaaaagcaagggcctcctttgtaaaagtaaccaggacaataaacttgatatggaaattctagagcagctgaaatacattggatgcgttataaaagaaacactgcggctcaatccacccgttcccggcggtttcagagtggctctcaaaacttttgagttgaatggctaccagatccctaagggctggaatgttatatactccatttgtgatacccacgacgtcgccgaaatttttaccaataaagaggagtttaaccctgaccgattcatgctgcctcaccccgaggatgcctcccgattttcatttatcccctttgggggtgggctacggtcttgtgttgggaaagaattcgcaaaaattctattgaagatatttacagtcgagttggcccggcactgcgattggcagctcttaaatgggccgcccactatgaagacatcccctaccgtctatcccgtcgacaatctgcctgcccgcttcacccattttcatggtgagatttag

SEQ ID NO: 15593 - DNA, 1494 bp, Artificial Sequence
  derived and/or modified sequence
atgggcctgcccgccctgctggccagcgccctgtgcaccttcgtgttgcccctgctcctgtttctggcggctattaaactttgggacctctattgcgtgagcggtcgagatagatcatgtgccctgcccctgcctcctgggactatgggtttcccgttctttggggagactttgcaaatggtgctgcagaggaggaagttcttgcaaatgaagagacgcaaatacggctttatctacaaaactcacttgtttgggcgcccaacagttagagtgatgggggcggataatgttcgaagaatccttcttggggagcatcgcctggtgagcgtgcactggcccgccagcgtgcggacaattctgggcagtgggtgcctatccaatcttcacgacagcagtcataagcagcgaaaaaaagtgatcatgcgggctttcagtagggaagctctggaatgctatgtgccagtgatcaccgaggaggtcggtagcagcttagagcagtggctgagctgtggcgaacgaggactgctggtgtatccagaggtgaagaggcttatgtttcgcattgccatgcggatccttctgggatgtgagccacaacttgctggagacggagactcagaacagcaactggtggaggcattcgaggagatgactagaaatttattttctctgccgatcgatgttcctttctcggggttgtaccgcggcatgaaagcacggaacctcatacatgcccgcattgagcagaatatccgggctaaaatctgtgggttgcgagcctccgaagctggccagggctgcaaagatgctctgcagctgctcattgagcactcctgggagcgaggcgaaagacttgatatgcaggcattgaagcagtcctctacagagcttctgttcggcggccacgaaacaaccgcctcggccgcgactagcctaattacttatttgggtctctacccacatgtgttgcaaaaggttcgggaggagctgaagagtaaaggcctcctgtgcaagagtaaccaggataataaactagatatggagattctggaacagttaaaatacatcggttgtgtaattaaggagacactgcgactgaacccccctgtcccaggtggctttcgagtggcccttaaaaccttcgaactcaacggttatcagatcccaaaggggtggaacgtgatctattccatctgcgatacgcacgacgttgccgaaatattcactaacaaggaagagtttaatccagacaggtttatgcttccacaccctgaagacgcttctcggttttcatttatccccttcggtggcggactgaggagttgtgtgggaaaggaattcgccaaaattttactgaaaatattcacagtggaactagctcgacattgtgactggcaactcttaaacgggccacctaccatgaagacgagtccaaccgtgtatcctgtggacaacctccccgctcgctttacacactttcacggtgagatttag

SEQ ID NO: 15594 - DNA, 1287 bp, Artificial Sequence
  derived and/or modified sequence
atgaagaggagaaaatacgggtttatctataaaacccatttgtttgggagaccaacagtccgtgtaatgggggcagataacgtgcgaaggatccttcttggagaacacaggttagtctctgttcactggcccgcaagtgtgagaacaattctgggatccggttgcctgagtaacctgcatgactcatctcataaacagcgaaagaaagtcataatgagagcgttctcccgtgaagccctcgaatgctacgttccggtcatcactgaggaggtgggatcttcactcgagcaatggctgagctgcggggagcgagggctcttggtgtaccccgaggtaaaacgactcatgtttcggatcgccatgaggattctgcttggctgtgaaccacagctagcaggcgacggagattctgaacagcaattagtggaggcattcgaagaaatgactcgcaaccttttttctttgccaattgacgtgccattctcaggcctctaccgcggtatgaaggcgagaaacttaattcatgctcgcatcgaacagaacatacgtgcgaaaatctgcggacttcgagctagtgaagcaggtcagggctgcaaagacgccctccagttgcttatcgaacactcttgggaaaggggtgaaaggctggacatgcaggccctcaagcagagctctacggagcttctcttcggcggtcacgagactacagcctctgccgcaacttcacttatcacatatttgggcctttaccctcatgtacttcaaaaggtgcgggaggagctgaagagcaaaggcctgttatgcaaatccaaccaagacaacaaactagatatggaaatcctcgaacagcttaaatatattggctgtgtgattaaggagacactgcgtttaaacccaccagttccgggaggctttagggtggctcttaaaactttcgagcttaacggctaccagataccaaagggctggaatgtgatttacagtatatgtgacacccacgatgttgcggagatctttacaaataaggaagagttcaatcctgaccgctttatgctgccccacccagaggacgccagcaggttttccttcatccctttcggtgggggtttgcggagctgtgtggggaaagagtttgccaagattctgttgaagatctttaccgtcgaactcgcccgacattgcgactggcagctgctcaacggaccccctactatgaaaacctctcctactgtgtatccagtggataatctgcccgctcggttcacacactttcacggtgagatatag

SEQ ID NO: 15595 - DNA, 1287 bp, Artificial Sequence
  derived and/or modified sequence
atgaaaagaaggaaatacgggtttatatacaagacccatctgttcgggcgacccacagtcagggtaatgggtgcagataacgtgcggcgtatccttttaggcgaacaccggttggtctccgtgcactggccagcatccgtgagaaccatcctgggcagtggctgcctgtccaacctccatgactctagtcataagcaaaggaagaaagtgatcatgagggctttttccagggaagctctggagtgctacgttcccgttattacagaagaggtcggctccagcctcgaacagtggctctcctgtggcgaacgcggactgcttgtgtaccccgaggtaaaaagactgatgtttcggatcgcgatgcgaatactgctcggatgcgagccacagttggctggcgatggcgactctgagcagcaacttgtggaggccttcgaggagatgacacgaaatcttttctccctcccaattgatgtcccattttccgggctttacaggggaatgaaggcacgtaacctgattcacgcccgaatcgagcagaatattcgtgcaaagatctgcggactgcgtgcttcagaggcgggtcagggatgtaaagacgctctgcagttacttatcgagcattcttgggagcgaggggaacggttggatatgcaagctctgaagcagtcttcaacagaactcttattcggtggtcacgaaacaactgcttccgctgcaactagtctgataacctatctggggctgtacccccacgtgttgcagaaagtacgggaagaactgaaatccaagggcctcttatgcaaatccaaccaagacaataagctagacatggagatattggagcagctgaaatatatcgggtgcgtgattaaggagactttaagactgaatccaccagttcctgggggatttagagttgccctaaaaacatttgagctgaatggataccagatccccaaagggtggaatgtcatctattctatttgcgacactcacgacgtggccgagatattcaccaacaaggaggaattcaacccagatcggttcatgcttccccacccagaagatgcctccaggttctcgttcatccccttcggcggaggactccggagctgcgttggaaaagaatttgcgaagattctcttgaagatatttacagtcgagctggccagacactgcgactggcagctactcaacgggccacctaccatgaagacttcccccactgtgtatcccgtggacaatttgccagccaggttcacccacttccatggcgaaatatag

SEQ ID NO: 15596 - DNA, 1494 bp, Artificial Sequence
  derived and/or modified sequence
atgggcctccccgcattactggcatcggccctgtgtacatttgttctgcccttactactgttccttgccgctatcaagttgtgggacctctattgtgtctccggacgggacaggagctgtgctctccctctgccgccaggtacgatggggtttccctttttcggagaaacactgcagatggtgctgcaaagacgaaaatttctgcaaatgaagagaagaaaatatggcttcatttataaaacccacctcttcggaaggcctaccgtccgtgttatgggtgccgataatgtgcgcaggatccttttgggagagcacaggctcgtatccgtacattggccagcatctgtcagaactattctggggtctggatgcttgtccaacctccatgattctagccataagcagagaaaaaaggtgatcatgcgtgctttctccagggaagccctggagtgctacgtacctgttatcacagaagaggtcgggtcgagcctggaacagtggctgtcctgcggggagaggggtctgctggtgtatccggaggtgaagcgcctcatgttccgaatagccatgcgaattctgctagggtgcgagccccagctggccggtgacggtgactccgaacagcagcttgtcgaggcatttgaggaaatgacccgtaatctgttttccctccctatcgacgtgcccttttccggcttgtatcggggaatgaaagctcgcaatctaatccacgccaggatcgagcagaatatcagggcaaagatctgcgggcttcgcgcatccgaagctggacaggggtgtaaagacgccctacaactgctcatagagcatagctgggaacgtggggaacgcttggacatgcaggctctgaaacagtcttccaccgagcttctgtttggaggtcatgagactactgcttctgcagcgacatctctcataacctatctcgggctctatccccacgtgctgcagaaggtgagagaggagctgaagagcaagggcttactgtgcaagagcaatcaagacaataagctcgacatggaaattctggagcaactaaagtacatcgggtgcgtgatcaaggagacgctgcggttgaatcctcccgtgcctggcggtttccgtgttgcactgaaaacttttgagctcaacgggtatcagattcctaaaggatggaacgttatctattcaatctgcgatacacatgacgtagctgagatctttactaataaggaggaattcaaccctgaccggtttatgttgccacacccagaggacgcctcacgattttcattcatccccttcggcggtgggctgcgttcctgcgtgggcaaggaatttgctaagatccttttgaaaattttcacggtggagttggccaggcattgtgactggcagcttctgaacggcccaccaacaatgaagacttccccaactgtttacccggttgataacctaccagctagatttactcattttcatggggagatctag

SEQ ID NO: 15597 - DNA, 2125 bp, Artificial Sequence
  derived and/or modified sequence
agcgctggcggcggcggcaggtggcgcgggaggtcgcggcgcgccatggggctcccggcgctgctggccagtgcgctctgcaccttcgtgctgccgctgctgctcttcctggctgcgatcaagctctgggacctgtactgcgtgagcggccgcgaccgcagttgtgccctcccattgccccccgggactatgggcttccccttctttggggaaaccttgcagatggtactgcagcggaggaagttcctgcagatgaagcgcaggaaatacggcttcatctacaagacgcatctgttcgggcggcccaccgtacgggtgatgggcgcggacaatgtgcggcgcatcttgctcggagagcaccggctggtgtcggtccactggccagcgtcggtgcgcaccattctgggatctggctgcctctctaacctgcacgactcctcgcacaagcagcgcaagaaggtgattatgcgggccttcagccgcgaggcactcgaatgctacgtgccggtgatcaccgaggaagtgggcagcagcctggagcagtggctgagctgcggcgagcgcggcctcctggtctaccccgaggtgaagcgcctcatgttccgaatcgccatgcgcatcctactgggctgcgaaccccaactggcgggcgacggggactccgagcagcagcttgtggaggccttcgaggaaatgacccgcaatctcttctcgctgcccatcgacgtgcccttcagcgggctgtaccggggcatgaaggcgcggaacctcattcacgcgcgcatcgagcagaacattcgcgccaagatctgcgggctgcgggcatccgaggcgggccagggctgcaaagacgcgctgcagctgttgatcgagcactcgtgggagaggggagagcggctggacatgcaggcactaaagcaatcttcaaccgaactcctctttggaggacacgaaaccacggccagtgcagccacatctctgatcacttacctggggctctacccacatgttctccagaaagtgcgagaagagctgaagagtaagggtttactttgcaagagcaatcaagacaacaagttggacatggaaattttggaacaacttaaatacatcgggtgtgttattaaggagacccttcgactgaatcccccagttccaggagggtttcgggttgctctgaagacttttgaattaaatggataccagattcccaagggctggaatgttatctacagtatctgtgatactcatgatgtggcagagatcttcaccaacaaggaagaatttaatcctgaccgattcatgctgcctcacccagaggatgcatccaggttcagcttcattccatttggaggaggccttaggagctgtgtaggcaaagaatttgcaaaaattcttctcaaaatatttacagtggagctggccaggcattgtgactggcagcttctaaatggacctcctacaatgaaaaccagtcccaccgtgtatcctgtggacaatctccctgcaagattcacccatttccatggggaaatctgatgagcttgaatgttcaaacctgagacttattggaagtgtacatatgagtttttaaggagtgttgtgttgactttatatttaatttctaaatgtatattataatatttatgtgttttgactatactaccacaatctttaaatattaaaataatgaatttgtatcatttccaaataaagtaaaatttgaaggtacttttctggtattttaagattcctgttgggtaaaactcaccagtttagtattttcttagtgtatttaaccagattttacaatgcctacctggacttatttgtcatctttgcatctgttttctgtgagaagaaatcttagctgttttttatgttaacagttattagaaaatatatgtctgtgtgtgttattccagacgtatctctgtaaattcttctacagtcacttagattccctatttggaaaattgatccaagttaatttaatttttttttggtttgctgtactttagggaaagatgaacctgaaaaggtaacactgagaactgtcactctaacctctccagcttatctaacatgtcataaacataataaatctgtgttgtccaatagtgcc

SEQ ID NO: 15598 - DNA, 2245 bp, Artificial Sequence
  derived and/or modified sequence
cggcacctggaaatggaaagccagtgaaggctgctttgggccggggcagcgggtgggaccgggcgggagggattccaaagagaccgccgggaaggctagagcttggaattccggctcctcggagtcctggccctcccccaccgccgcctcggagctcagcacaccttggatgggggaggcgggcagctcctagccccgcaccccaggaggcgcgctcggagggaagccgccaccgcgccgcctctgcctcggcgcggaacaaacggttaaagattttgggcagcgcctcgcggggggaggagccaggggcccaatccgcaattaaagatgaactttgggtgaactaattgtctgaccaagcggaggaagttcctgcagatgaagcgcaggaaatacggcttcatctacaagacgcatctgttcgggcggcccaccgtacgggtgatgggcgcggacaatgtgcggcgcatcttgctcggagagcaccggctggtgtcggtccactggccagcgtcggtgcgcaccattctgggatctggctgcctctctaacctgcacgactcctcgcacaagcagcgcaagaaggtgattatgcgggccttcagccgcgaggcactcgaatgctacgtgccggtgatcaccgaggaagtgggcagcagcctggagcagtggctgagctgcggcgagcgcggcctcctggtctaccccgaggtgaagcgcctcatgttccgaatcgccatgcgcatcctactgggctgcgaaccccaactggcgggcgacggggactccgagcagcagcttgtggaggccttcgaggaaatgacccgcaatctcttctcgctgcccatcgacgtgcccttcagcgggctgtaccggggcatgaaggcgcggaacctcattcacgcgcgcatcgagcagaacattcgcgccaagatctgcgggctgcgggcatccgaggcgggccagggctgcaaagacgcgctgcagctgttgatcgagcactcgtgggagaggggagagcggctggacatgcaggcactaaagcaatcttcaaccgaactcctctttggaggacacgaaaccacggccagtgcagccacatctctgatcacttacctggggctctacccacatgttctccagaaagtgcgagaagagctgaagagtaagggtttactttgcaagagcaatcaagacaacaagttggacatggaaattttggaacaacttaaatacatcgggtgtgttattaaggagacccttcgactgaatcccccagttccaggagggtttcgggttgctctgaagacttttgaattaaatggataccagattcccaagggctggaatgttatctacagtatctgtgatactcatgatgtggcagagatcttcaccaacaaggaagaatttaatcctgaccgattcatgctgcctcacccagaggatgcatccaggttcagcttcattccatttggaggaggccttaggagctgtgtaggcaaagaatttgcaaaaattcttctcaaaatatttacagtggagctggccaggcattgtgactggcagcttctaaatggacctcctacaatgaaaaccagtcccaccgtgtatcctgtggacaatctccctgcaagattcacccatttccatggggaaatctgatgagcttgaatgttcaaacctgagacttattggaagtgtacatatgagtttttaaggagtgttgtgttgactttatatttaatttctaaatgtatattataatatttatgtgttttgactatactaccacaatctttaaatattaaaataatgaatttgtatcatttccaaataaagtaaaatttgaaggtacttttctggtattttaagattcctgttgggtaaaactcaccagtttagtattttcttagtgtatttaaccagattttacaatgcctacctggacttatttgtcatctttgcatctgttttctgtgagaagaaatcttagctgttttttatgttaacagttattagaaaatatatgtctgtgtgtgttattccagacgtatctctgtaaattcttctacagtcacttagattccctatttggaaaattgatccaagttaatttaatttttttttggtttgctgtactttagggaaagatgaacctgaaaaggtaacactgagaactgtcactctaacctctccagcttatctaacatgtcataaacataataaatctgtgttgtccaat

SEQ ID NO: 15599 - DNA, 1287 bp, Artificial Sequence
  derived and/or modified sequence
atgaagagaagaaagtacggcttcatctacaagacccacctgttcggcagacccaccgtgagagtgatgggcgccgacaacgtgagaagaatcctgctgggcgagcacagactggtgagcgtgcactggcccgccagcgtgagaaccatcctgggcagcggctgcctgagcaacctgcacgacagcagccacaagcagagaaagaaggtgatcatgagagccttcagcagagaggccctggagtgctacgtgcccgtgatcaccgaggaggtgggcagcagcctggagcagtggctgagctgcggcgagagaggcctgctggtgtaccccgaggtgaagagactgatgttcagaatcgccatgagaatcctgctgggctgcgagccccagctggccggcgacggcgacagcgagcagcagctggtggaggccttcgaggagatgaccagaaacctgttcagcctgcccatcgacgtgcccttcagcggcctgtacagaggcatgaaggccagaaacctgatccacgccagaatcgagcagaacatcagagccaagatctgcggcctgagagccagcgaggccggccagggctgcaaggacgccctgcagctgctgatcgagcacagctgggagagaggcgagagactggacatgcaggccctgaagcagagcagcaccgagctgctgttcggcggccacgagaccaccgccagcgccgccaccagcctgatcacctacctgggcctgtacccccacgtgctgcagaaggtgagagaggagctgaagagcaagggcctgctgtgcaagagcaaccaggacaacaagctggacatggagatcctggagcagctgaagtacatcggctgcgtgatcaaggagaccctgagactgaacccccccgtgcccggcggcttcagagtggccctgaagaccttcgagctgaacggctaccagatccccaagggctggaacgtgatctacagcatctgcgacacccacgacgtggccgagatcttcaccaacaaggaggagttcaaccccgacagattcatgctgccccaccccgaggacgccagcagattcagcttcatccccttcggcggcggcctgagaagctgcgtgggcaaggagttcgccaagatcctgctgaagatcttcaccgtggagctggccagacactgcgactggcagctgctgaacggcccccccaccatgaagaccagccccaccgtgtaccccgtggacaacctgcccgccagattcacccacttccacggcgagatctag

SEQ ID NO: 15600 - DNA, 1494 bp, Artificial Sequence
  derived and/or modified sequence
atgggcctgcccgccctgctggccagcgccctgtgcaccttcgtgctgcccctgctgctgttcctggccgccatcaagctgtgggacctgtactgcgtgagcggcagagacagaagctgcgccctgcccctgccccccggcaccatgggcttccccttcttcggcgagaccctgcagatggtgctgcagagaagaaagttcctgcagatgaagagaagaaagtacggcttcatctacaagacccacctgttcggcagacccaccgtgagagtgatgggcgccgacaacgtgagaagaatcctgctgggcgagcacagactggtgagcgtgcactggcccgccagcgtgagaaccatcctgggcagcggctgcctgagcaacctgcacgacagcagccacaagcagagaaagaaggtgatcatgagagccttcagcagagaggccctggagtgctacgtgcccgtgatcaccgaggaggtgggcagcagcctggagcagtggctgagctgcggcgagagaggcctgctggtgtaccccgaggtgaagagactgatgttcagaatcgccatgagaatcctgctgggctgcgagccccagctggccggcgacggcgacagcgagcagcagctggtggaggccttcgaggagatgaccagaaacctgttcagcctgcccatcgacgtgcccttcagcggcctgtacagaggcatgaaggccagaaacctgatccacgccagaatcgagcagaacatcagagccaagatctgcggcctgagagccagcgaggccggccagggctgcaaggacgccctgcagctgctgatcgagcacagctgggagagaggcgagagactggacatgcaggccctgaagcagagcagcaccgagctgctgttcggcggccacgagaccaccgccagcgccgccaccagcctgatcacctacctgggcctgtacccccacgtgctgcagaaggtgagagaggagctgaagagcaagggcctgctgtgcaagagcaaccaggacaacaagctggacatggagatcctggagcagctgaagtacatcggctgcgtgatcaaggagaccctgagactgaacccccccgtgcccggcggcttcagagtggccctgaagaccttcgagctgaacggctaccagatccccaagggctggaacgtgatctacagcatctgcgacacccacgacgtggccgagatcttcaccaacaaggaggagttcaaccccgacagattcatgctgccccaccccgaggacgccagcagattcagcttcatccccttcggcggcggcctgagaagctgcgtgggcaaggagttcgccaagatcctgctgaagatcttcaccgtggagctggccagacactgcgactggcagctgctgaacggcccccccaccatgaagaccagccccaccgtgtaccccgtggacaacctgcccgccagattcacccacttccacggcgagatctag

SEQ ID NO: 15601 - protein, 531 aa, Artificial Sequence
  derived and/or modified sequence
MAALGCARLRWALRGAGRGLCPHGARAKAAIPAALPSDKATGAPGAGPGVRRRQRSLEEIPRLGQLRFFFQLFVQGYALQLHQLQVLYKAKYGPMWMSYLGPQMHVNLASAPLLEQVMRQEGKYPVRNDMELWKEHRDQHDLTYGPFTTEGHHWYQLRQALNQRLLKPAEAALYTDAFNEVIDDFMTRLDQLRAESASGNQVSDMAQLFYYFALEAICYILFEKRIGCLQRSIPEDTVTFVRSIGLMFQNSLYATFLPKWTRPVLPFWKRYLDGWNAIFSFGKKLIDEKLEDMEAQLQAAGPDGIQVSGYLHFLLASGQLSPREAMGSLPELLMAGVDTTSNTLTWALYHLSKDPEIQEALHEEVVGVVPAGQVPQHKDFAHMPLLKAVLKETLRLYPVVPTNSRIIEKEIEVDGFLFPKNTQFVFCHYVVSRDPTAFSEPESFQPHRWLRNSQPATPRIQHPFGSVPFGYGVRACLGRRIAELEMQLLLARLIQKYKVVLAPETGELKSVARIVLVPNKKVGLQFLQRQC

SEQ ID NO: 15602 - DNA, 1596 bp, Artificial Sequence
  derived and/or modified sequence
atggctgctcttggttgtgctaggctgaggtgggctctgcgaggggctggccggggcctctgccctcacggtgccagagctaaggccgccatcccagccgctctgccatccgacaaagctaccggggctccgggggctggccccggagtgagaaggcggcagaggtcccttgaagagataccacggctcggacagctgaggttcttcttccagctgttcgtccaggggtacgcactgcaactgcatcagctgcaggtcctctataaggcaaagtacgggcccatgtggatgtcatatctgggccctcagatgcatgtgaacctggcatctgctcccttgcttgaacaagtgatgagacaggaaggaaagtatccggtcaggaatgacatggagctgtggaaggaacacagagaccagcacgacctgacttatggccccttcacaacagaaggccaccattggtatcaactccgtcaggccctgaatcagaggctcctgaaacctgctgaggctgcgctgtatactgatgccttcaacgaggtgatagatgatttcatgacacgcctcgatcaactgcgcgcggaaagcgctagcggaaaccaggtttcggatatggcccaactcttttattatttcgccctcgaggcaatctgctacattctgttcgagaaacgcatcgggtgtctccagaggtccatacctgaagacacagtgaccttcgtcaggtctatcggcctgatgtttcagaactcactctatgctactttcctgccaaaatggacaaggccggtgttaccgttctggaaaagatatctggatggttggaacgctatttttagctttggcaagaagctgatcgacgaaaagctggaggacatggaggcacagctgcaggccgccggcccggacggaatccaggtgagcggttaccttcactttctgttggcatccggacagctcagcccgagagaagcaatggggagtttgccagagcttctcatggccggcgtggatacaacctcaaatacactgacctgggccttgtatcacctgtctaaagatcctgagattcaggaagcactacatgaagaagttgtgggtgtcgttcccgcgggccaagtcccacagcacaaggactttgctcatatgcctttgctgaaagctgttctgaaagaaactctgagattgtatcccgttgtcccaacaaattccaggattattgaaaaagagattgaggtcgatggatttctctttcctaagaacactcagttcgtgttttgccattatgttgtgagtcgcgaccctactgcgtttagcgagccagagagctttcagccacaccgttggctccgcaatagtcaacctgcaaccccacggatacagcatccgtttgggagcgttcctttcggctatggtgtgcgcgcttgcctgggccgtcgtattgccgagctagagatgcagttgctgctcgctaggctcattcagaagtataaggtggtgctggcccctgagactggagaactgaagagtgtggctaggattgttctggtgccaaacaagaaggtcgggcttcagttcctgcagcgacagtgttag

SEQ ID NO: 15603 - DNA, 1596 bp, Artificial Sequence
  derived and/or modified sequence
atggccgccctgggctgtgcccggctgcgctgggccctgcggggggccggccggggcctgtgcccccatggagcccgggccaaggccgccatcccagctgccctgcccagcgacaaggccactggagcccctggggccggccctggggtgagaagacggcagaggagcctggaggagatcccccggctgggccagctgcgcttcttcttccagctgtttgtgcagggctacgccctgcagctgcaccagctgcaggtgctgtacaaggccaagtatggccccatgtggatgagctacctgggcccccagatgcacgtgaacctggccagcgcccccctgctggagcaggtgatgaggcaggagggcaagtaccctgtgagaaatgacatggagctgtggaaggagcaccgggaccagcacgacctgacctacggccccttcaccacagagggccaccactggtaccagctgcggcaggccctgaaccagaggctgctgaagccagctgaggccgccctgtacacagatgccttcaatgaggtgattgatgacttcatgacccggctggaccagctgcgggcagagagcgccagcggcaaccaggtgtctgacatggcccagctgttctactactttgccctggaggccatctgctacatcctgtttgagaagagaattggctgcctgcagaggagcatcccagaagatactgtgacctttgtgcgcagcatcggcctgatgttccagaacagcctgtatgccaccttcctgcccaagtggaccaggcctgtgctgcccttctggaagcgctacctggatggctggaatgccatcttctcctttgggaagaagctgattgatgagaagctggaggacatggaggcccagctgcaggccgccggcccagatggcatccaggtgtctggctacctgcacttcctgctggccagcggccagctgagcccccgggaggccatgggcagcctgcctgagctgctgatggccggcgtggacaccaccagcaacaccctgacctgggccctgtaccacctgagcaaggaccctgagatccaggaggccctgcacgaggaggtggtgggcgtggtgcctgctggccaggtgccccagcacaaggactttgcccacatgcccctgctgaaggctgtgctgaaggagaccctgcggctgtaccctgtggtgcccaccaacagccgcatcatcgagaaggagattgaggtggatggcttcctgttccccaagaacacccagtttgtgttctgccactacgtggtgtcccgggaccccacagccttcagcgagcctgagagcttccagccccaccgctggctgaggaacagccagcctgccaccccccgcatccagcaccccttcggctctgtgcccttcggctatggagtgcgggcctgcctgggcagaagaattgctgagctggagatgcagctgctgctggcccggctcatccagaagtacaaggtggtgctggcccctgagactggagagctgaagtctgtggcccgcatcgtgctggtgcccaacaagaaggtgggcctgcagttcctgcagaggcagtgctag

SEQ ID NO: 15604 - DNA, 1596 bp, Artificial Sequence
  derived and/or modified sequence
atggccgccctgggctgcgcccggctgcggtgggccctgcggggcgcaggccgcggcctttgtccccatggagctagggccaaagctgctattccagctgcccttccaagtgacaaggccacaggcgcacccggcgccggtcctggagtcagacggagacaacgctcccttgaagagattccccgcttgggccaattgcgatttttcttccagcttttcgttcaagggtacgcgttacaacttcaccaactccaagtgctgtacaaggccaagtacggacctatgtggatgtcttatctgggaccacagatgcacgtaaatctagcgagcgcacccctactggaacaggtgatgaggcaagagggtaagtaccctgtaagaaatgacatggaactatggaaggagcaccgtgaccagcacgatcttacttacggaccatttactactgaaggacatcactggtatcagctcaggcaggccctaaatcagaggttgctcaaaccagctgaggcggccctgtatacggacgcattcaacgaagtcatcgacgatttcatgaccagattagatcaactcagagcagagtccgcctctggaaaccaggtgtctgatatggcccaattgttttactattttgcgcttgaagccatctgttatatactgtttgagaagaggatagggtgcctgcagagatccatccccgaggatacagtcacgttcgttagaagtataggtttgatgtttcaaaattcactctacgccaccttcctgcctaagtggacccggcccgtgctgcctttctggaaacggtacctggatggctggaatgccattttctcgttcggtaagaaactaatcgatgaaaagctcgaggatatggaggctcagctgcaagctgcaggaccggatggcattcaagtgtctgggtatttgcattttctgttggctagcggccagctgtccccacgggaggcaatgggttcccttcccgagttactgatggccggggtagatacaacgagcaacaccctgacatgggccctgtaccacctctccaaagacccggagattcaggaagcactgcatgaggaagtggtaggggtagtccctgctggacaggtgccgcagcataaagactttgctcacatgcctctcctaaaagcagtgttgaaagaaactctgcgcctgtacccagtggtccctactaattccaggattatagaaaaggaaattgaggttgatggcttcctgtttcccaaaaatactcagttcgtgttctgccactacgtggtgagtcgagatccaacggccttctccgaaccagagagcttccagccacaccggtggctgaggaattcgcagcctgccacgcctagaattcaacacccatttggatcagttccgttcggctacggagtgagagcatgcctaggacgtcggattgccgaactggaaatgcagctgcttctggccaggcttattcaaaagtataaggtcgtgttagcgcccgagactggagagctcaagtccgtggcaaggatcgtgctggtgcctaacaagaaggtggggctgcaattcctgcagcggcagtgttag

SEQ ID NO: 15605 - DNA, 1596 bp, Artificial Sequence
  derived and/or modified sequence
atggccgcactgggctgcgcaagactgcgctgggcccttagaggtgcagggcgtgggctctgcccacacggcgcaagggctaaggctgccatccctgccgcactgccgagcgataaggcgactggcgcacccggtgccggacccggtgtacgccgtagacagaggtcattggaggagatcccacgcctagggcagcttagattcttttttcagctctttgtccagggatacgcactgcagctgcatcaacttcaagtcttgtataaggctaagtatggtccaatgtggatgtcttatcttgggcctcaaatgcatgtcaatctggcatctgcgcctctgctagagcaggtgatgcgacaggaggggaaatatccggtgcgcaacgatatggagctgtggaaagagcatagagatcagcacgacctgacctacggcccatttacaacggaaggtcaccactggtaccaactcaggcaggccctgaatcaacggcttctgaaaccagccgaggctgccttatacacggacgccttcaatgaggttatagatgacttcatgactcggctggaccaattacgcgcagagagtgcttcaggcaaccaggtctcagatatggcacaacttttttactacttcgcgttagaagcaatctgctacattctattcgagaaacgcatcgggtgtctgcagagatctattccagaggacaccgttacttttgtacgctcgattggactcatgttccaaaactctctgtacgcaacttttctgcctaagtggactcgtccagtgctgcctttctggaaaagatacctggatgggtggaatgccatctttagtttcggaaagaagcttatcgacgagaaattggaggatatggaagcacaattgcaagccgcaggaccagacgggatacaggtctctgggtatttacacttcttgctggcttccggtcaacttagtcccagagaagccatgggctcactcccggagctgctgatggccggagtggatactacatcgaataccctgacttgggctctttaccatctgtcaaaagaccctgagattcaggaagccctccacgaagaggtcgtcggggttgtcccggctggccaggtgcctcaacacaaggattttgcccacatgcccctgctgaaagccgtcctcaaggaaaccctcagattatatcctgtggttcctacaaattccagaattatcgagaaagagattgaagtggatggctttctgttcccaaaaaatacccagtttgtcttttgccactacgtagtgtctcgtgacccaacggccttctcggaacccgaaagctttcagcctcacagatggctgcgcaatagtcagcctgcgacccctaggattcagcatccgttcgggagtgtgccattcgggtacggtgtgagagcctgtctgggccgacgaattgcggaactggagatgcagttgctgctggcaaggctgatccagaagtacaaggttgtgctggctcctgagaccggtgagttgaaatcagtggcccgaatagtgttagtaccaaacaagaaggtcggccttcagtttctgcagcgtcaatgctag

SEQ ID NO: 15606 - DNA, 2286 bp, Artificial Sequence
  derived and/or modified sequence
gccgagggcagcttagccacggccggttcccgttccctccaggacgcgagggtcgccttgggtggggaaccgcgaccgggcgaggacctatcccggtgtggggcttcccgatttcgaaagaatctcgctgcacccccgcccagagttcagaccaagcgaaaagttatttgagaggcctcgggggcgcggggtgaggagtcgtggcggaggccttggtcggggcgccgtggatatccccgagtcaccgcgtccctctcctgcagctcccgcgtcgctgggaggagcgagggagcgagcgggaaggggtctagctggcctttgctcggccctccccagcgcccggctttgaacccgccctgcactgctgtctgggcgggtccggggactcagcactcgacccaaaggtgcaggcgcgcgagcacaacccatggctgcgctgggctgcgcgaggctgaggtgggcgctgcgaggggccggccgtggcctctgcccccacggggccagagccaaggccgcgatccctgccgccctcccctcggacaaggccaccggagctcccggagccgggcctggtgtccggcggcggcaacggagcttagaggagattccacgtctaggacagctgcgcttcttctttcagctgttcgttcaaggctatgccctgcaactgcaccagttacaggtgctttacaaggccaagtacggtccaatgtggatgtcctacttagggcctcagatgcacgtgaacctggccagtgccccgctcttggagcaagtgatgcggcaagagggcaagtacccagtacggaacgacatggagctatggaaggagcaccgggaccagcacgacctgacctatgggccgttcaccacggaaggacaccactggtaccagctgcgccaggctctgaaccagcggttgctgaagccagcggaagcagcgctctatacggatgctttcaatgaggtgattgatgactttatgactcgactggaccagctgcgggcagagagtgcttcggggaaccaggtgtcggacatggctcaactcttctactactttgccttggaagctatttgctacatcctgttcgagaaacgcattggctgcctgcagcgatccatccccgaggacaccgtgaccttcgtcagatccatcgggttaatgttccagaactcactctatgccaccttcctccccaagtggactcgccccgtgctgcctttctggaagcgatacctggatggttggaatgccatcttttcctttgggaagaagctgattgatgagaagctcgaagatatggaggcccaactgcaggcagcagggccagatggcatccaggtgtctggctacctgcacttcttactggccagtggacagctcagtcctcgggaggccatgggcagcctgcctgagctgctcatggctggagtggacacgacatccaacacgctgacatgggccctgtaccacctctcaaaggaccctgagatccaggaggccttgcacgaggaagtggtgggtgtggtgccagccgggcaagtgccccagcacaaggactttgcccacatgccgttgctcaaagctgtgcttaaggagactctgcgtctctaccctgtggtccccacaaactcccggatcatagaaaaggaaattgaagttgatggcttcctcttccccaagaacacccagtttgtgttctgccactatgtggtgtcccgggaccccactgccttctctgagcctgaaagcttccagccccaccgctggctgagaaacagccagcctgctacccccaggatccagcacccatttggctctgtgccctttggctatggggtccgggcctgcctgggccgcaggattgcagagctggagatgcagctactcctcgcaaggctgatccagaagtacaaggtggtcctggccccggagacgggggagttgaagagtgtggcccgcattgtcctggttcccaataagaaagtgggcctgcagttcctgcagagacagtgctgagctgagtctccgccttgctggggcttgtcctagaggctccagctctggcacagtggttcctggctgctgccatgtctcagatgaggagggagagaaggaggccgccagactcgagaggtgggaggaactccttgcacacaccctgagcttttgccacttctatcatttttgagcaactccctctcagctaaaaggccacccctttatcgcattgctgtccttgggtagaatataaaataaagggacttttatttcttattgga

SEQ ID NO: 15607 - DNA, 1596 bp, Artificial Sequence
  derived and/or modified sequence
atggccgccctgggctgcgccagactgagatgggccctgagaggcgccggcagaggcctgtgcccccacggcgccagagccaaggccgccatccccgccgccctgcccagcgacaaggccaccggcgcccccggcgccggccccggcgtgagaagaagacagagaagcctggaggagatccccagactgggccagctgagattcttcttccagctgttcgtgcagggctacgccctgcagctgcaccagctgcaggtgctgtacaaggccaagtacggccccatgtggatgagctacctgggcccccagatgcacgtgaacctggccagcgcccccctgctggagcaggtgatgagacaggagggcaagtaccccgtgagaaacgacatggagctgtggaaggagcacagagaccagcacgacctgacctacggccccttcaccaccgagggccaccactggtaccagctgagacaggccctgaaccagagactgctgaagcccgccgaggccgccctgtacaccgacgccttcaacgaggtgatcgacgacttcatgaccagactggaccagctgagagccgagagcgccagcggcaaccaggtgagcgacatggcccagctgttctactacttcgccctggaggccatctgctacatcctgttcgagaagagaatcggctgcctgcagagaagcatccccgaggacaccgtgaccttcgtgagaagcatcggcctgatgttccagaacagcctgtacgccaccttcctgcccaagtggaccagacccgtgctgcccttctggaagagatacctggacggctggaacgccatcttcagcttcggcaagaagctgatcgacgagaagctggaggacatggaggcccagctgcaggccgccggccccgacggcatccaggtgagcggctacctgcacttcctgctggccagcggccagctgagccccagagaggccatgggcagcctgcccgagctgctgatggccggcgtggacaccaccagcaacaccctgacctgggccctgtaccacctgagcaaggaccccgagatccaggaggccctgcacgaggaggtggtgggcgtggtgcccgccggccaggtgccccagcacaaggacttcgcccacatgcccctgctgaaggccgtgctgaaggagaccctgagactgtaccccgtggtgcccaccaacagcagaatcatcgagaaggagatcgaggtggacggcttcctgttccccaagaacacccagttcgtgttctgccactacgtggtgagcagagaccccaccgccttcagcgagcccgagagcttccagccccacagatggctgagaaacagccagcccgccacccccagaatccagcaccccttcggcagcgtgcccttcggctacggcgtgagagcctgcctgggcagaagaatcgccgagctggagatgcagctgctgctggccagactgatccagaagtacaaggtggtgctggcccccgagaccggcgagctgaagagcgtggccagaatcgtgctggtgcccaacaagaaggtgggcctgcagttcctgcagagacagtgctag

SEQ ID NO: 15608 - protein, 508 aa, Artificial Sequence
  derived and/or modified sequence
MTQTLKYASRVFHRVRWAPELGASLGYREYHSARRSLADIPGPSTPSFLAELFCKGGLSRLHELQVQGAAHFGPVWLASFGTVRTVYVAAPALVEELLRQEGPRPERCSFSPWTEHRRCRQRACGLLTAEGEEWQRLRSLLAPLLLRPQAAARYAGTLNNVVCDLVRRLRRQRGRGTGPPALVRDVAGEFYKFGLEGIAAVLLGSRLGCLEAQVPPDTETFIRAVGSVFVSTLLTMAMPHWLRHLVPGPWGRLCRDWDQMFAFAQRHVERREAEAAMRNGGQPEKDLESGAHLTHFLFREELPAQSILGNVTELLLAGVDTVSNTLSWALYELSRHPEVQTALHSEITAALSPGSSAYPSATVLSQLPLLKAVVKEVLRLYPVVPGNSRVPDKDIHVGDYIIPKNTLVTLCHYATSRDPAQFPEPNSFRPARWLGEGPTPHPFASLPFGFGKRSCMGRRLAELELQMALAQILTHFEVQPEPGAAPVRPKTRTVLVPERSINLQFLDR

SEQ ID NO: 15609 - DNA, 1527 bp, Artificial Sequence
  derived and/or modified sequence
atgacccaaaccctgaaatatgcttcacgggttttccaccgggtgcgatgggccccagaactgggcgccagcctgggttacagagagtatcacagtgctcgccgaagtttggcagatattccgggcccatcaacaccctcctttctcgcggaactcttctgcaaaggcggattatcacgattacacgagctgcaagtgcagggagccgcgcacttcgggcccgtgtggttagcctcattcggcactgttagaacagtgtacgtggcagctccggcactcgttgaggagctcttgcgccaggaagggccaagaccggaaaggtgttcttttagcccctggacagagcaccggaggtgcagacagcgagcttgcgggctcctgaccgcagagggggaagaatggcagagactcagaagtttactcgctcccttgctgctcagaccacaggctgccgcgaggtacgcaggtacgctcaataacgtggtctgtgatctcgtgcgccggctcagacggcagaggggccggggtacgggacctcctgctctagtgagagacgtcgccggagaattttacaagttcggcttagaaggtatcgccgcggtgttattaggatcccgcctgggctgcctggaggcccaggtgcccccagacaccgagactttcatcagagctgtgggatccgtgtttgtctccaccttgctcactatggctatgccccattggctccgccacctcgtaccaggcccctggggtcgcctctgccgagactgggaccagatgtttgcttttgcacaacgacacgtggaaaggcgggaagctgaagctgcaatgcgcaacggtgggcagcctgagaaggatcttgaatcaggggctcatctgacccacttcctgtttagggaggaattgccagcacaatccatactgggaaatgtgacagaactgttgcttgccggcgtggataccgtaagcaatactctttcctgggccctgtacgagcttagccggcatcccgaggttcaaactgctctccattccgagattacagcagccttatcccctgggtccagtgcatatccttcagccacagtcctttcacagctccctctgctgaaggctgtcgtcaaggaggtattgcggctttaccccgtggtccctggcaattctagggtcccagacaaggatatccacgtgggcgattatatcattccgaaaaataccctggtgaccctgtgtcattatgccacatcgcgggacccggctcagtttccagagccgaattcattccgccccgccaggtggctgggtgagggcccaacgccccatccattcgcctccctgccgttcggcttcgggaaaaggagctgcatgggtagaaggcttgccgagctcgaactccagatggcgctggctcagattctcactcattttgaggtacagcctgagccaggagcagcccccgttcgccccaaaactagaacagtgctggtccccgagagatcaatcaacctgcaattcttggataggtag

SEQ ID NO: 15610 - DNA, 1527 bp, Artificial Sequence
  derived and/or modified sequence
atgacccagaccctgaagtatgccagcagggtcttccaccgggtgcgctgggcccctgagctgggcgccagcctgggctaccgggagtaccacagcgcccggcgcagcctggccgacatccctggccccagcacccccagcttcctggccgagctgttctgcaagggcggcctgagccggctgcacgagctgcaggtgcagggcgccgcccacttcggccctgtgtggctggccagctttggcaccgtgaggacagtgtatgtggccgccccagccctggtggaggagctgctgcggcaggagggccccaggcctgagcgctgcagcttcagcccctggacagagcaccggcgctgccggcagagggcctgtggcctgctgacagctgagggggaggagtggcagaggctgcggagcctgctggcccccctgctgctgcggccccaggccgccgcccgctatgccggcaccctgaacaacgtggtgtgtgacctggtgcggcggctgcggcggcagaggggccggggcactggacctccagccctggtgagagatgtggccggggagttctacaagtttggcctggagggcattgctgctgtgctgctgggcagccggctgggctgcctggaggcccaggtgcccccagacacagagaccttcatccgggctgtgggctctgtgtttgtgtccaccctgctgaccatggccatgccccactggctgcggcacctggtgcccggcccctggggccgcctgtgccgggactgggaccagatgtttgcctttgcccagagacatgtggagcggcgggaggccgaggccgccatgagaaatggaggccagcctgagaaggacctggagagcggggcccacctgacccacttcctgttccgggaggagctgcctgcccagagcatcctgggcaatgtgacagagctgctgctggccggcgtggacacagtgagcaacaccctgtcctgggccctgtatgagctgagccgccaccctgaggtgcagacagccctgcacagcgagatcacagctgccctgagccctggcagcagcgcctaccccagcgccaccgtgctgagccagctgcccctgctgaaggctgtggtgaaggaggtgctgcggctgtaccctgtggtgcccggcaacagccgggtgcctgacaaggacatccacgtgggggactacatcatccccaagaacaccctggtgaccctgtgccactacgccaccagccgggaccctgcccagtttcctgagcccaacagcttccggcctgcccgctggctgggggagggccccaccccccacccctttgccagcctgcccttcggctttgggaagaggagctgcatgggccggcggctggccgagctggagctgcagatggccctggcccagatcctgacccactttgaggtgcagcctgagcccggggccgcccctgtgcggcccaagaccaggacagtgctggtgcctgagaggagcatcaacctgcagttcctggacagatag

SEQ ID NO: 15611 - DNA, 1527 bp, Artificial Sequence
  derived and/or modified sequence
atgacccagaccctgaagtacgccagccgggtgttccaccgggtgcgatgggctccagaattgggcgcctccctggggtaccgcgagtaccactctgcacgcaggagcctagcggacattcctggtccatcaacaccttctttcctcgctgaactgttttgcaagggcggactgtcgcggctgcacgaactacaggtccagggcgccgcacacttcggaccagtttggcttgcatcattcgggaccgtccggaccgtatatgtagctgcacccgccctggtggaggagttgctcagacaggagggtcctagacctgagaggtgctcattttccccgtggactgagcaccgccgctgtagacagcgtgcctgcgggttgcttacagccgagggggaggagtggcagcggctgcggtctctattggcccccctgctcctgcggccacaagctgctgccaggtacgcaggaactttgaacaatgtcgtatgtgacctggtcaggagacttagacgacagcgggggcggggaacaggaccacccgctttggtgcgggacgtggccggtgagttctataagttcggtttagagggtattgctgccgtgcttctcggcagccggctgggatgcctggaggcacaggtccctccagacacggagacctttattagagctgttggaagtgttttcgtgagcacactgctgacaatggcaatgccacattggttacgccacctcgtgcccggaccttgggggaggctctgtcgagattgggaccaaatgtttgcatttgctcagcgccatgtggaacgtagagaggcggaggcagcgatgcgcaatggaggccagccagaaaaggatctagaatctggggctcacctcacgcactttctgtttagagaggagctgccagcacagtcaatcttgggcaacgtcactgaactgctcctggctggagtggacacagtctctaatacactgtcctgggctctttacgagctgtcgcgacacccagaggtgcaaacagcattgcattctgagatcacagccgctctgtctccagggagctccgcctacccttctgctaccgttttgagccaacttcctctgctcaaggccgtggtcaaagaggtcctgaggctgtaccctgttgtccccggtaattcaagagtccctgacaaggacattcatgtgggcgattatattattcctaaaaataccttagtcacactctgtcactatgcaactagtagagatccagcgcagtttccagagccaaattctttcaggcctgcacggtggcttggtgaaggaccaactccccatccatttgcatcactcccatttgggtttgggaagaggtcatgcatgggacgaaggctggccgaactcgagctccaaatggcgctggcgcagatccttacgcatttcgaggtgcagcctgagcccggagcagcacctgtaagacctaaaaccaggacagtactcgtgccagaaagaagtattaatctgcagtttttggatcgatag

SEQ ID NO: 15612 - DNA, 1527 bp, Artificial Sequence
  derived and/or modified sequence
atgactcagactttgaaatatgcgagccgggtatttcacagagtgcgctgggctcccgaactcggagccagcctcgggtaccgggagtaccatagcgcccgaagatctctggcagacataccaggtccctcaaccccttcgttcctggcagagcttttctgtaaagggggacttagcaggctgcacgaactgcaggtgcagggggcagctcactttggacctgtttggcttgctagcttcggaacagttagaactgtgtacgtggccgctcccgcattggtagaggagctgctccggcaggaaggcccaagacctgagagatgctccttctccccatggacagagcacagaagatgcagacagcgggcttgtggtcttctcactgcggaaggggaggaatggcaacgccttagatctctgctggcgccactactcttgcggcctcaggcggcagcgaggtatgcaggcacattgaacaacgtggtgtgtgatctggtgaggagactgagaaggcagcgcggtaggggcaccggaccacccgctcttgtccgggacgtggctggcgagttctacaagtttgggctggagggaatcgccgctgtgctgctgggaagcagattaggttgcttggaagcccaggtcccaccagacaccgaaacatttattcgcgctgtcggatccgtgtttgtatccactctcctgacaatggcaatgcctcattggcttcggcatctcgtcccaggtccttggggacggctgtgtagagactgggatcaaatgtttgcatttgcgcagagacacgtcgagcggagggaagcagaagccgctatgcggaacgggggtcaacccgagaaagaccttgagtcaggcgcacatctcactcactttctgttccgtgaagagttgccggcacagagtatcttaggtaatgtaacagagctgctgcttgcaggagttgataccgttagcaatacactcagctgggctctgtatgagctctcacggcacccagaggtgcagactgctttgcacagtgagattactgctgccctgtcaccagggagttccgcctatccatctgctacagtgctgagccagttgccccttcttaaggccgtggtaaaagaggtgctccggttgtatcctgtcgttcccggaaacagccgggtgccagacaaagatattcacgtcggagattacatcatcccaaaaaatacactcgtcacgttatgtcattacgccacctcccgagatcccgcacaatttccagaacccaacagctttaggcccgcacgctggcttggagaaggacctacaccacatccctttgcgtcactaccttttgggtttgggaaaaggtcatgcatgggacggagactggccgaactcgagctgcagatggctttggcacagatcctgacccacttcgaggtgcaacccgagcccggagcagctccagtgcgccctaaaaccagaacggttctggttcctgaaaggtcgatcaatctgcagtttctggatagatag

SEQ ID NO: 15613 - DNA, 2540 bp, Artificial Sequence
  derived and/or modified sequence
ttgcaacatgagacccaagggagttgtgaagtcagccccagccccgcctactgttcctgggtgctaatccccagcacagaccactcaggaggagggattggctgaggagcttggagagggggcgtcatcacctcacccaaaggttaaataggggttgagatatgatgctcaggagaagcgctttctttcgcgagcaccctgaaccagaccatgacccagaccctcaagtacgcctccagagtgttccatcgcgtccgctgggcgcccgagttgggcgcctccctaggctaccgagagtaccactcagcacgccggagcttggcagacatcccaggcccctctacgcccagctttctggccgaacttttctgcaagggggggctgtcgaggctacacgagctgcaggtgcagggcgccgcgcacttcgggccggtgtggctagccagctttgggacagtgcgcaccgtgtacgtggctgcccctgcactcgtcgaggagctgctgcgacaggagggaccccggcccgagcgctgcagcttctcgccctggacggagcaccgccgctgccgccagcgggcttgcggactgctcactgcggaaggcgaagaatggcaaaggctccgcagtctcctggccccgctcctcctccggcctcaagcggccgcccgctacgccggaaccctgaacaacgtagtctgcgaccttgtgcggcgtctgaggcgccagcggggacgtggcacggggccgcccgccctggttcgggacgtggcgggggaattttacaagttcggactggaaggcatcgccgcggttctgctcggctcgcgcttgggctgcctggaggctcaagtgccacccgacacggagaccttcatccgcgctgtgggctcggtgtttgtgtccacgctgttgaccatggcgatgccccactggctgcgccaccttgtgcctgggccctggggccgcctctgccgagactgggaccagatgtttgcatttgctcagaggcacgtggagcggcgagaggcagaggcagccatgaggaacggaggacagcccgagaaggacctggagtctggggcgcacctgacccacttcctgttccgggaagagttgcctgcccagtccatcctgggaaatgtgacagagttgctattggcgggagtggacacggtgtccaacacgctctcttgggctctgtatgagctctcccggcaccccgaagtccagacagcactccactcagagatcacagctgccctgagccctggctccagtgcctacccctcagccactgttctgtcccagctgcccctgctgaaggcggtggtcaaggaagtgctaagactgtaccctgtggtacctggaaattctcgtgtcccagacaaagacattcatgtgggtgactatattatccccaaaaatacgctggtcactctgtgtcactatgccacttcaagggaccctgcccagttcccagagccaaattcttttcgtccagctcgctggctgggggagggtcccaccccccacccatttgcatctcttccctttggctttggcaagcgcagctgtatggggagacgcctggcagagcttgaattgcaaatggctttggcccagatcctaacacattttgaggtgcagcctgagccaggtgcggccccagttagacccaagacccggactgtcctggtacctgaaaggagcatcaacctacagtttttggacagatagtcccatggaaagagactgtcatcatcaccctttcattcatcatagggataagattttttgtaggcacaagaccaaggtatacatcttcccctaatgcctatctgaccaaactggatagaaccaccatagtgaagtgtgaggcggccctgaccaatgtgtgaagtatgcacttggcctgactcaggaagccaggtgagaaaaccatggtctctctgcttgcttggcccttctgatcatgtatgcatcccccaaggatgaaatcagattttaactaataatgctggatggcctgaggaaagattcaactgcctctctttttgggctttcatagtgttcattgatgctgctggctaagcatttatcaaagcataagctcagtaactgtgcatctggtctgtacctggttggtccttcgtctttgcatgtaagctctttgagaggaagggtgaagccttatttgttttttatgtcccctgccagggcctgtctctgactaggtgtcaccatacacattcttagattgaatctgaaccatgtggcagaagggataagcagcttacttagtaggctctgtctacccccttccttctttgtcttgcccctaggaaggtgaatctgccctagcctggtttacggtttcttataactctcctttgctctctggccactattaagtgggtttgccccatcacttagttctcaggcagagacatctttgggcctgtccctgcccaggcctctggctttttatattgaaaatttttaaatattcacaaattttagaataaatcaaatattccatt

SEQ ID NO: 15614 - DNA, 1527 bp, Artificial Sequence
  derived and/or modified sequence
atgacccagaccctgaagtacgccagcagagtgttccacagagtgagatgggcccccgagctgggcgccagcctgggctacagagagtaccacagcgccagaagaagcctggccgacatccccggccccagcacccccagcttcctggccgagctgttctgcaagggcggcctgagcagactgcacgagctgcaggtgcagggcgccgcccacttcggccccgtgtggctggccagcttcggcaccgtgagaaccgtgtacgtggccgcccccgccctggtggaggagctgctgagacaggagggccccagacccgagagatgcagcttcagcccctggaccgagcacagaagatgcagacagagagcctgcggcctgctgaccgccgagggcgaggagtggcagagactgagaagcctgctggcccccctgctgctgagaccccaggccgccgccagatacgccggcaccctgaacaacgtggtgtgcgacctggtgagaagactgagaagacagagaggcagaggcaccggcccccccgccctggtgagagacgtggccggcgagttctacaagttcggcctggagggcatcgccgccgtgctgctgggcagcagactgggctgcctggaggcccaggtgccccccgacaccgagaccttcatcagagccgtgggcagcgtgttcgtgagcaccctgctgaccatggccatgccccactggctgagacacctggtgcccggcccctggggcagactgtgcagagactgggaccagatgttcgccttcgcccagagacacgtggagagaagagaggccgaggccgccatgagaaacggcggccagcccgagaaggacctggagagcggcgcccacctgacccacttcctgttcagagaggagctgcccgcccagagcatcctgggcaacgtgaccgagctgctgctggccggcgtggacaccgtgagcaacaccctgagctgggccctgtacgagctgagcagacaccccgaggtgcagaccgccctgcacagcgagatcaccgccgccctgagccccggcagcagcgcctaccccagcgccaccgtgctgagccagctgcccctgctgaaggccgtggtgaaggaggtgctgagactgtaccccgtggtgcccggcaacagcagagtgcccgacaaggacatccacgtgggcgactacatcatccccaagaacaccctggtgaccctgtgccactacgccaccagcagagaccccgcccagttccccgagcccaacagcttcagacccgccagatggctgggcgagggccccaccccccaccccttcgccagcctgcccttcggcttcggcaagagaagctgcatgggcagaagactggccgagctggagctgcagatggccctggcccagatcctgacccacttcgaggtgcagcccgagcccggcgccgcccccgtgagacccaagaccagaaccgtgctggtgcccgagagaagcatcaacctgcagttcctggacagatag

SEQ ID NO: 15615 - protein, 509 aa, Artificial Sequence
  derived and/or modified sequence
MAAAAGMLLLGLLQAGGSVLGQAMEKVTGGNLLSMLLIACAFTLSLVYLIRLAAGHLVQLPAGVKSPPYIFSPIPFLGHAIAFGKSPIEFLENAYEKYGPVFSFTMVGKTFTYLLGSDAAALLFNSKNEDLNAEDVYSRLTTPVFGKGVAYDVPNPVFLEQKKMLKSGLNIAHFKQHVSIIEKETKEYFESWGESGEKNVFEALSELIILTASHCLHGKEIRSQLNEKVAQLYADLDGGFSHAAWLLPGWLPLPSFRRRDRAHREIKDIFYKAIQKRRQSQEKIDDILQTLLDATYKDGRPLTDDEVAGMLIGLLLAGQHTSSTTSAWMGFFLARDKTLQKKCYLEQKTVCGENLPPLTYDQLKDLNLLDRCIKETLRLRPPIMIMMRMARTPQTVAGYTIPPGHQVCVSPTVNQRLKDSWVERLDFNPDRYLQDNPASGEKFAYVPFGAGRHRCIGENFAYVQIKTIWSTMLRLYEFDLIDGYFPTVNYTTMIHTPENPVIRYKRRSK

SEQ ID NO: 15616 - protein, 404 aa, Artificial Sequence
  derived and/or modified sequence
MVGKTFTYLLGSDAAALLFNSKNEDLNAEDVYSRLTTPVFGKGVAYDVPNPVFLEQKKMLKSGLNIAHFKQHVSIIEKETKEYFESWGESGEKNVFEALSELIILTASHCLHGKEIRSQLNEKVAQLYADLDGGFSHAAWLLPGWLPLPSFRRRDRAHREIKDIFYKAIQKRRQSQEKIDDILQTLLDATYKDGRPLTDDEVAGMLIGLLLAGQHTSSTTSAWMGFFLARDKTLQKKCYLEQKTVCGENLPPLTYDQLKDLNLLDRCIKETLRLRPPIMIMMRMARTPQTVAGYTIPPGHQVCVSPTVNQRLKDSWVERLDFNPDRYLQDNPASGEKFAYVPFGAGRHRCIGENFAYVQIKTIWSTMLRLYEFDLIDGYFPTVNYTTMIHTPENPVIRYKRRSK

SEQ ID NO: 15617 - protein, 449 aa, Artificial Sequence
  derived and/or modified sequence
MKHEKSPPYIFSPIPFLGHAIAFGKSPIEFLENAYEKYGPVFSFTMVGKTFTYLLGSDAAALLFNSKNEDLNAEDVYSRLTTPVFGKGVAYDVPNPVFLEQKKMLKSGLNIAHFKQHVSIIEKETKEYFESWGESGEKNVFEALSELIILTASHCLHGKEIRSQLNEKVAQLYADLDGGFSHAAWLLPGWLPLPSFRRRDRAHREIKDIFYKAIQKRRQSQEKIDDILQTLLDATYKDGRPLTDDEVAGMLIGLLLAGQHTSSTTSAWMGFFLARDKTLQKKCYLEQKTVCGENLPPLTYDQLKDLNLLDRCIKETLRLRPPIMIMMRMARTPQTVAGYTIPPGHQVCVSPTVNQRLKDSWVERLDFNPDRYLQDNPASGEKFAYVPFGAGRHRCIGENFAYVQIKTIWSTMLRLYEFDLIDGYFPTVNYTTMIHTPENPVIRYKRRSK

SEQ ID NO: 15618 - DNA, 1530 bp, Artificial Sequence
  derived and/or modified sequence
atggccgctgccgcaggaatgttacttctgggattgttgcaggcaggaggctctgtgttgggtcaggcaatggaaaaggttacaggtgggaacctgctgtccatgttactgatcgcctgcgccttcactctctccctggtttacttaatccgccttgcggctggtcacctggtacagctgccagcaggagtcaaaagccccccttacatcttctcacccatacccttcctggggcacgcgatcgcttttgggaagtctccaatcgaattcctggagaatgcctatgaaaaatacggacctgttttctctttcaccatggtaggcaaaaccttcacgtatttgctgggcagcgatgcggccgccttgctttttaatagcaagaatgaagatctgaacgccgaagacgtatacagtcggctgaccaccccagtcttcggtaagggagtggcttatgatgtgcccaatcccgttttcttagaacagaaaaagatgttgaaatcgggtttgaatatagcacactttaaacagcacgtctctatcatcgaaaaagagaccaaggaatatttcgaatcatggggggagagcggagagaagaacgttttcgaggcactttctgaactaatcatactgactgccagccattgtctgcatggcaaagaaatcaggtcccagctgaacgaaaaggtagctcaactctatgcagacttggatgggggcttctcccacgctgcttggctgctgcctgggtggctgccactgccctctttccgccgaagagacagggcccatagagagattaaagacatcttttacaaagcgatccaaaaaaggcgtcaatctcaggaaaagatagatgacatactgcagaccttgctggacgccacatacaaggatggccgcccccttactgacgacgaagtcgccggtatgctgattggactcctccttgccggacagcacacttccagtactaccagcgcctggatgggcttctttctggccagagacaagacactccagaagaagtgttacctcgaacaaaaaacagtgtgcggcgagaatcttcctcccctgacgtacgaccagctcaaagacctgaatcttctggaccggtgcatcaaggaaaccctacgcctccggccacccattatgatcatgatgcggatggccagaactcctcagaccgtggcgggatacaccatcccccccggacatcaggtatgcgtaagtcctaccgtgaatcagaggctgaaggacagctgggtcgagagactcgatttcaatccagatagatatttgcaggataatcctgctagtggcgagaaatttgcttacgtcccctttggagccggaaggcaccggtgtatcggagaaaattttgcctacgtccagataaaaacgatttggagtacaatgctcagactgtacgagttcgatttgatcgatgggtatttccctacggtgaattataccacaatgatccacactccagaaaaccctgttattcgttataagagacggtccaaatag

SEQ ID NO: 15619 - DNA, 1350 bp, Artificial Sequence
  derived and/or modified sequence
atgaaacatgaaaaatctccaccttacattttctcccccatccctttcctggggcacgcgatagccttcggaaagtcacctatcgagtttcttgagaacgcatacgagaagtacggaccagtgttcagttttacgatggttggcaagactttcacctatctattaggaagtgacgccgccgcattactgttcaactccaagaacgaagacctgaatgcggaagatgtgtattcccggctgaccacgcccgtcttcggcaagggtgtcgcttacgatgtgcctaaccccgtcttcctggaacagaagaaaatgcttaaatccggtcttaatattgcccactttaaacagcacgtctctataatcgaaaaagagaccaaagaatattttgagtcttggggggagagcggggaaaagaacgtctttgaggccctatccgagctgatcattctgaccgcctcacactgcttacatgggaaagaaatccggtcacagctgaatgagaaggtggcccagctatatgccgaccttgacgggggattttctcatgctgcttggctcctgcctgggtggctgcccttacccagctttaggcgcagagacagggctcacagggagatcaaagatatcttttacaaggccatccagaagaggcgacagtctcaggaaaagatcgatgatatcttgcagaccttacttgatgccacatacaaggacggccggccgctcacggatgacgaagtggcgggtatgctgatcggactcctgctcgccgggcaacatacctcgtcaacaacatccgcctggatggggttcttccttgcgcgggacaagaccctgcagaagaagtgctacctggagcagaaaacagtttgcggcgagaacctgcccccccttacttacgaccaactcaaagatctcaatcttctcgaccggtgtatcaaggaaactctgcgcctgagacctcctattatgattatgatgcgaatggcgagaacacctcagacagtggcgggctataccatcccgcctggtcatcaggtatgcgtgagcccgacagtgaaccaacgactaaaggactcttgggtggaacgcctggactttaaccccgaccggtatctacaggacaatccggccagtggcgaaaaattcgcctacgtcccctttggcgccggacggcataggtgcattggcgaaaatttcgcctatgttcagataaagacaatttggtcaactatgctgagactatatgagttcgacttaattgacgggtatttccctaccgtcaattacactaccatgatccatactcctgaaaatcctgtgattaggtataagaggaggagcaagtag

SEQ ID NO: 15620 - DNA, 1530 bp, Artificial Sequence
  derived and/or modified sequence
atggctgctgctgctggcatgctgctgctgggcctgctgcaggccggcggctctgtgctgggccaggccatggagaaggtgactggaggcaacctgctgtccatgctgctgattgcctgtgccttcaccctgagcctggtgtacctgatccggctggccgccggccacctggtgcagctgcctgctggggtgaagagccccccctacatcttcagccccatccccttcctgggccacgccatcgccttcggcaagagccccatcgagttcctggagaatgcctatgagaagtatggccctgtgttctccttcaccatggtgggcaagaccttcacctacctgctgggcagtgatgctgctgccctgctcttcaacagcaagaatgaagacctgaatgcagaagatgtgtacagccggctgaccacccctgtgtttggaaaaggagtggcctatgatgtgcccaaccctgtgttcctggagcagaagaagatgctgaagagcggcctgaacatcgcccacttcaagcagcacgtgtccatcatcgagaaggagaccaaggagtactttgagagctggggcgagagcggggagaagaatgtgtttgaggccctgtctgagctgatcatcctgacagccagccactgcctgcacggcaaggagatccgcagccagctgaatgagaaggtggcccagctgtatgctgacctggatggcggcttcagccatgctgcctggctgctgcccggctggctgcccctgcccagcttcagaagaagagaccgggcccaccgggagatcaaggacatcttctacaaggccatccagaagaggcggcagagccaggagaagattgatgacatcctgcagaccctgctggatgccacctacaaggatggccggcccctgacagatgatgaggtggccggcatgctgattggcctgctgctggccggccagcacaccagcagcaccaccagcgcctggatgggcttcttcctggcccgggacaagaccctgcagaagaagtgctacctggagcagaagacagtgtgtggggagaacctgccccccctgacctatgaccagctgaaggacctgaacctgctggaccgctgcatcaaggagaccctgcggctgcggccccccatcatgatcatgatgaggatggcccggaccccccagacagtggccggctacaccatccccccaggccaccaggtgtgtgtgagccccaccgtgaaccagaggctgaaggacagctgggtggagcggctggacttcaacccagaccgctacctgcaggacaacccagccagcggggagaagtttgcctacgtgccctttggagctggccgccaccgctgcatcggggagaactttgcctacgtgcagatcaagaccatctggagcaccatgctgcggctgtatgaatttgacctgattgatggctacttccccaccgtgaactacaccaccatgatccacaccccagagaaccctgtgatccgctacaagaggaggagcaagtag

SEQ ID NO: 15621 - DNA, 1350 bp, Artificial Sequence
  derived and/or modified sequence
atgaagcatgagaagagccccccctacatcttcagccccatccccttcctgggccacgccatcgccttcggcaagagccccatcgagttcctggagaatgcctatgagaagtatggccctgtgttctccttcaccatggtgggcaagaccttcacctacctgctgggcagtgatgctgctgccctgctcttcaacagcaagaatgaagacctgaatgcagaagatgtgtacagccggctgaccacccctgtgtttggaaaaggagtggcctatgatgtgcccaaccctgtgttcctggagcagaagaagatgctgaagagcggcctgaacatcgcccacttcaagcagcacgtgtccatcatcgagaaggagaccaaggagtactttgagagctggggcgagagcggggagaagaatgtgtttgaggccctgtctgagctgatcatcctgacagccagccactgcctgcacggcaaggagatccgcagccagctgaatgagaaggtggcccagctgtatgctgacctggatggcggcttcagccatgctgcctggctgctgcccggctggctgcccctgcccagcttcagaagaagagaccgggcccaccgggagatcaaggacatcttctacaaggccatccagaagaggcggcagagccaggagaagattgatgacatcctgcagaccctgctggatgccacctacaaggatggccggcccctgacagatgatgaggtggccggcatgctgattggcctgctgctggccggccagcacaccagcagcaccaccagcgcctggatgggcttcttcctggcccgggacaagaccctgcagaagaagtgctacctggagcagaagacagtgtgtggggagaacctgccccccctgacctatgaccagctgaaggacctgaacctgctggaccgctgcatcaaggagaccctgcggctgcggccccccatcatgatcatgatgaggatggcccggaccccccagacagtggccggctacaccatccccccaggccaccaggtgtgtgtgagccccaccgtgaaccagaggctgaaggacagctgggtggagcggctggacttcaacccagaccgctacctgcaggacaacccagccagcggggagaagtttgcctacgtgccctttggagctggccgccaccgctgcatcggggagaactttgcctacgtgcagatcaagaccatctggagcaccatgctgcggctgtatgaatttgacctgattgatggctacttccccaccgtgaactacaccaccatgatccacaccccagagaaccctgtgatccgctacaagaggaggagcaagtag

SEQ ID NO: 15622 - DNA, 1530 bp, Artificial Sequence
  derived and/or modified sequence
atggccgccgccgccggcatgctgctgctgggcctgctgcaggccggtggatcagttctgggccaggccatggagaaggtcacaggaggcaatctgttaagcatgttactgatcgcctgcgcatttacactgtccctggtataccttattcggctggctgctggtcacttggttcagcttcccgcaggcgtgaagagccctccttacatcttctctcctatcccgtttctggggcacgcaattgccttcggcaaaagtcctatcgaatttctcgagaacgcttacgagaagtatggtcccgtcttcagctttactatggtgggaaaaacttttacctatctgcttggcagcgatgccgccgctctcctgtttaattctaaaaatgaagatctcaacgccgaagatgtttatagtcgattaacaaccccagtttttggaaagggcgtcgcttacgatgtccctaatcctgtgtttctggaacagaaaaaaatgttgaagtctggcctcaatattgcccattttaagcaacacgtgtctattatcgagaaggaaactaaagaatactttgagtcctggggggaaagcggagagaaaaatgtctttgaagcgcttagcgagctaatcattttgacagcctctcactgcctccatgggaaggagattcgctctcaattaaacgagaaagtggcccaactttatgctgacctggacggggggttctcacacgccgcttggctgttacctggatggttacctctgccaagcttcagacgccgcgatcgggcccacagggaaatcaaggacatattttataaggccatccagaagcgacggcagtcccaggagaaaattgatgacatactccagactctgctggatgctacttataaggacggccgcccgctgacagacgatgaggtggcaggcatgttaattggactgttgctggccgggcagcacaccagcagcacaacttctgcctggatggggttctttctggctcgagataagaccctccagaaaaagtgctacctcgagcagaaaacagtttgcggggagaaccttccccccctcacctatgaccagctaaaagacctcaatctgctcgacaggtgcataaaggaaaccctccgcctgcggccacccattatgattatgatgagaatggctaggactccacagactgtcgcaggctatacaataccccctgggcatcaggtatgcgtgtctccgaccgtgaaccaacgcctgaaagactcgtgggtcgagcgtctggacttcaatcctgaccgctatctgcaagataaccccgcctccggtgagaagtttgcctacgtcccatttggcgcaggccggcatcgttgtattggggaaaattttgcctacgtgcaaatcaaaacaatttggtcaacaatgttgcgactgtacgagtttgacttgatagacggatatttccccactgttaattataccacgatgatccatactcctgaaaacccagtcatccgctacaagcgacgctcaaagtag

SEQ ID NO: 15623 - DNA, 1350 bp, Artificial Sequence
  derived and/or modified sequence
atgaagcacgagaagagccccccctacatcttcagccccatccccttcctcggccatgctattgccttcgggaaaagccccatagaatttttggaaaacgcatatgaaaagtacggaccggttttttcgtttactatggtcggcaagacctttacatacctattgggtagcgacgctgctgctctgttgttcaattctaagaatgaggatctaaatgctgaggatgtctacagtagactcaccacccctgtgtttggaaagggtgtagcctacgacgtcccaaatccagtattcttggagcagaaaaagatgctgaaatcaggtcttaatatcgcacactttaaacagcatgtgtccattatcgaaaaagaaaccaaggagtattttgagtcttggggagagagcggcgagaagaatgtatttgaggcgctgtctgagctgataattctgaccgcatctcattgtctccatggcaaagagattcggtcccagctgaacgaaaaggtcgcccagctatatgccgacctggacgggggcttctctcatgcagcatggctccttcctgggtggttgccattgcccagctttaggagaagggaccgggcccatagagagattaaagatatattctataaggcaatccagaaaagaaggcagagccaggaaaaaatcgacgacattctgcaaacacttctcgatgccacctataaagatgggagacccctgaccgatgatgaggtagccgggatgctcatcggactgctcttggctggacagcatacgtctagcacaacttcggcgtggatggggttctttctggctagagacaagactttgcagaaaaaatgttacctggagcagaagaccgtctgcggtgagaacctcccgcccctcacttatgatcagctaaaagacttgaacctgctggatagatgcataaaagaaacgctcagactgaggccacctattatgatcatgatgaggatggcgcggacccctcagactgttgcaggttatactattccaccaggacaccaggtgtgcgtctctccaaccgtgaaccagagacttaaagatagttgggtggaaaggcttgacttcaatccagacaggtatctgcaggacaaccctgcctctggcgagaagttcgcctatgttccttttggcgccgggcgtcaccgctgcatcggagagaacttcgcttacgtgcagataaagactatttggtctactatgctgaggttatacgagtttgacctaattgatgggtatttccccaccgtcaactataccacaatgattcatacccctgaaaaccctgtcattaggtataagagaaggagtaaatag

SEQ ID NO: 15624 - DNA, 1530 bp, Artificial Sequence
  derived and/or modified sequence
atggccgctgccgctggaatgctcctgctcgggttactgcaggccggaggctccgtgctggggcaggcaatggaaaaagttaccgggggaaacctactgagtatgttgctgatcgcatgcgccttcaccctgtcactcgtttacttgattcggttggccgcaggacacttggtacagctgccagccggagttaaatctccaccctatattttctcccctattccatttttaggccatgcaattgcctttgggaagtcccccattgagtttttggaaaatgcctacgagaaatatggaccagtgttttcctttactatggtaggtaaaacctttacgtatctattggggagtgatgcggcagccctcctattcaatagtaagaatgaggatctgaatgcagaggacgtgtacagtagactgacgacccccgtctttggtaagggggtggcctacgacgttcccaaccctgtgttcctcgagcaaaagaagatgctgaaatctggccttaatattgctcattttaaacagcatgtgagcataatcgaaaaggaaacaaaggagtattttgagtcctggggggaatcaggagagaaaaacgtatttgaggcgcttagcgagctaatcatactaaccgctagccattgcctccatgggaaggagatccggagccagctcaatgagaaggttgcccagctgtatgccgacctggatggaggattctctcacgctgcgtggttgctgcctggatggctccctctaccaagtttccgtagacgcgaccgggcacacagggagatcaaggatattttctacaaagcaatacagaaacggagacagtcccaagagaaaatcgatgatattctgcagaccctgcttgacgctacatacaaagatgggcgaccacttacagatgacgaggtagccggtatgctgatcggcttactacttgcgggtcagcataccagcagtacaacaagtgcttggatggggttcttcctggccagagataagactctgcagaaaaagtgctatctggaacaaaagacagtttgcggggaaaacctgccccctctgacctacgaccagctcaaggacttaaacctgctggataggtgtattaaagaaaccctgcgcctacgtcctccaataatgataatgatgaggatggccagaaccccccagacagtagccggatacacaattccaccaggtcaccaggtgtgtgttagtccgactgtcaaccagagactgaaagactcttgggtcgaaagactggactttaatccagatagataccttcaggacaatccagctagcggcgaaaagttcgcttatgtgccttttggagcgggaaggcaccggtgtattggcgaaaatttcgcttatgtgcagatcaagacaatctggtctaccatgctccgactgtatgagtttgatctcatcgacggttacttccctactgtcaactataccacgatgattcatacacccgagaaccccgtcattcggtataagcggcgaagtaagtag

SEQ ID NO: 15625 - DNA, 1350 bp, Artificial Sequence
  derived and/or modified sequence
atgaagcatgagaaaagcccaccatatattttttcccctatcccttttctgggccacgctatcgccttcggcaagagtcctattgagttcctcgagaacgcttacgagaagtacggaccagtgttctcctttactatggttgggaagaccttcacatatttgctgggttccgacgcagcagcacttctgtttaattcaaaaaacgaggatcttaacgctgaagacgtctattctcgcctcactactcccgtgttcgggaagggagtggcctacgatgtacccaaccctgtgtttctcgagcaaaaaaaaatgctcaaaagtggtctgaacattgcccacttcaaacagcacgtttcaatcattgagaaagaaactaaggagtactttgaaagttggggcgagagtggtgagaagaatgtgtttgaagcgctcagcgaactaatcattcttactgcctcgcattgcttgcacggcaaggaaatcaggagccagctcaacgagaaagttgcccagctctacgcagatctcgatggagggttcagtcatgccgcatggctcttgcctggttggctcccactcccaagcttccgcaggcgcgatagagcccaccgggagatcaaggacatcttctataaggccattcagaagcgacgccagtctcaggaaaagatagacgatatccttcaaactcttttggatgccacgtataaggacgggagacctctgacagacgatgaagtggccggaatgttaatcggactacttctggccggtcagcacacatccagtactacttccgcttggatgggtttttttctggctcgagacaagaccctgcagaagaagtgctacctcgagcagaaaaccgtgtgtggcgagaacctccctcctctgacctatgatcagctgaaggacttaaacctgctggaccgatgcattaaggagacgttgaggcttcgtccccctatcatgatcatgatgcggatggctaggactccccagactgtggccggatatactatcccaccagggcaccaagtgtgtgtctctcccaccgtgaatcagcgtctgaaggactcgtgggtcgagcgcctggattttaatcccgatcggtatctccaagacaatccagcttcaggggagaagtttgcatacgtaccatttggcgctgggaggcacaggtgcatcggagagaatttcgcctacgtccaaattaagacaatttggagtaccatgttaaggttgtatgagttcgacttgatcgacggctatttcccaaccgtcaattacactacaatgattcacacccccgagaacccagtgatacgttacaagagacgctccaagtag

SEQ ID NO: 15626 - DNA, 1530 bp, Artificial Sequence
  derived and/or modified sequence
atggccgccgctgccggaatgctgcttctcggactgctgcaggcaggaggaagcgtattgggccaggccatggaaaaggtcactggcggcaaccttcttagtatgttgctgattgcatgtgcatttaccctttctcttgtctaccttatccggctcgccgccgggcatctggttcagttacctgcaggggtgaaaagccccccatatatattttctccgattcccttcttaggccacgctattgccttcggcaaatccccgatagaattccttgagaacgcctacgagaaatatggcccggtgttttccttcaccatggtgggaaagacctttacatacctgctgggttctgatgccgccgccctcctgttcaactcaaaaaacgaagacctgaatgctgaggacgtgtattcccgtctcactaccccagtatttggaaagggcgtcgcttatgacgtcccaaatcccgtcttcctggagcaaaagaaaatgctgaagtcggggcttaatatagcgcattttaaacagcatgtttcaattattgaaaaggagacaaaggaatactttgagtcttggggggaaagcggagagaagaacgtgtttgaggccttgagtgagttaataatcctgaccgcctcccactgcctacatggcaaagaaattagatctcaactgaacgagaaggtcgcccagctgtacgcagacctggatggcggattctctcacgctgcctggctgctcccaggttggctgccgctccccagctttagaaggcgggacagggcacaccgggaaataaaggacatcttttacaaggcaatccaaaagagacgacaaagccaagaaaaaattgacgatattttgcaaacccttcttgatgccacatataaagatgggcggcctttaaccgacgacgaagtggcggggatgctcattggtctgctcctggccggacagcacacttcttccacgacatcagcatggatgggcttcttcttggcacgcgacaagaccctacaaaagaaatgttacctggagcagaaaacagtttgtggtgagaacctgcccccgctaacttacgaccaattgaaggacttgaacctgctggaccgttgcattaaagaaacgctgagacttcgtccgcctattatgatcatgatgcgtatggctcgcactccacagacagtggcgggctatactattccaccagggcatcaagtatgtgttagcccaactgtgaaccagcgcctaaaggacagctgggtagaaagacttgattttaaccccgatagatatctccaggacaacccagcctctggggagaagttcgcgtacgtcccattcggcgctggcagacaccgatgcatcggggaaaatttcgcatacgtgcagataaaaaccatctggtccacaatgttaagactgtacgagttcgacctgattgatggctacttccctacagtaaactataccaccatgattcatacgccagagaaccccgttattcggtataagcggaggagtaaatag

SEQ ID NO: 15627 - DNA, 1530 bp, Artificial Sequence
  derived and/or modified sequence
atggcagcagctgctggaatgctgcttctaggattgctccaggccggaggaagtgtgctcggtcaggccatggagaaagtgactggtggaaatctcctctccatgctccttattgcctgtgcattcaccctgagtctcgtctacctgatcaggctagccgcaggacatctcgttcagttgccagccggagtcaagtctccgccatacattttctcacctattccttttctgggacacgcaatagcctttggtaagtctcccatcgagtttttagagaacgcgtacgaaaaatacggcccagtctttagcttcactatggtgggtaaaacatttacatacttgttggggtccgacgccgcagcactgcttttcaatagcaagaacgaggatttaaatgctgaagacgtgtatagccgccttacaacccctgtctttggaaaaggagtggcttacgatgtaccaaatcccgtatttctggagcaaaagaagatgcttaagtctggactaaatattgcgcactttaaacaacacgtctctatcatcgagaaagaaacaaaggaatacttcgaatcctggggggaaagcggagagaagaatgtgttcgaagcactatccgagcttatcattctcaccgcgtctcactgccttcacggcaaagaaataagatctcaattgaacgagaaggtggcccagctctacgcagacttagatggcgggttcagccacgcagcgtggctgctgcctggttggcttccattgcctagcttccgacggagagaccgcgctcacagagaaattaaggatattttctataaagcaattcaaaaaaggagacaatcacaggagaagattgacgatatactacagacattgctagatgctacctataaggatggacgcccgcttaccgacgacgaggtggctggcatgttgataggcctattgcttgctggtcaacataccagctccaccacttcagcctggatgggatttttcctggcacgtgacaagactctgcagaagaagtgctacctggaacagaaaacagtgtgtggcgagaacctaccacctctcacctatgatcagcttaaagatttaaacttactggatagatgcatcaaggaaacactcagactccgaccgcctatcatgattatgatgcgcatggctagaactccccaaactgtggccggctataccattccaccagggcatcaagtatgtgttagcccaactgtgaaccagcgcctaaaggacagctgggtagaaagacttgattttaaccccgatagatatctccaggacaacccagcctctggggagaagttcgcgtacgtcccattcggcgctggcagacaccgatgcatcggggaaaatttcgcatacgtgcagataaaaaccatctggtccacaatgttaagactgtacgagttcgacctgattgatggctacttccctacagtaaactataccaccatgattcatacgccagagaaccccgttattagatataagcgccgttccaaatag

SEQ ID NO: 15628 - DNA, 3210 bp, Artificial Sequence
  derived and/or modified sequence
ttctgtgacgcacggggtggcgcgcgtgggacccgaggggtggggctgggtttagtaggagacctggggcaaggccccctgtggacgaccatctgccagcttctctcgttccgtcgattgggaggagcggtggcgacctcggccttcagtgtttccgacggagtgaatggcggcggcggctgggatgctgctgctgggcttgctgcaggcgggtgggtcggtgctgggccaggcgatggagaaggtgacaggcggcaacctcttgtccatgctgctgatcgcctgcgccttcaccctcagcctggtctacctgatccgtctggccgccggccacctggtccagctgcccgcaggggtgaaaagtcctccatacattttctccccaattccattccttgggcatgccatagcatttgggaaaagtccaattgaatttctagaaaatgcatatgagaagtatggacctgtatttagttttaccatggtaggcaagacatttacttaccttctggggagtgatgctgctgcactgctttttaatagtaaaaatgaagacctgaatgcagaagatgtctacagtcgcctgacaacacctgtgtttgggaagggagttgcatacgatgtgcctaatccagttttcttggagcagaagaaaatgttaaaaagtggccttaacatagcccactttaaacagcatgtttctataattgaaaaagaaacaaaggaatactttgagagttggggagaaagtggagaaaaaaatgtgtttgaagctctttctgagctcataattttaacagctagccattgtttgcatggaaaggaaatcagaagtcaactcaatgaaaaggtagcacagctgtatgcagatttggatggaggtttcagccatgcagcctggctcttaccaggttggctgcctttgcctagtttcagacgcagggacagagctcatcgggaaatcaaggatattttctataaggcaatccagaaacgcagacagtctcaagaaaaaattgatgacattctccaaactttactagatgctacatacaaggatgggcgtcctttgactgatgatgaagtagcagggatgcttattggattactcttggcagggcagcatacatcctcaactactagtgcttggatgggcttctttttggccagagacaaaacacttcaaaaaaaatgttatttagaacagaaaacagtctgtggagagaatctgcctcctttaacttatgaccagctcaaggatctaaatttacttgatcgctgtataaaagaaacattaagacttagacctcctataatgatcatgatgagaatggccagaactcctcagactgtggcagggtataccattcctccaggacatcaggtgtgtgtttctcccactgtcaatcaaagacttaaagactcatgggtagaacgcctggactttaatcctgatcgctacttacaggataacccagcatcaggggaaaagtttgcctatgtgccatttggagctgggcgtcatcgttgtattggggaaaattttgcctatgttcaaattaagacaatttggtccactatgcttcgtttatatgaatttgatctcattgatggatactttcccactgtgaattatacaactatgattcacacccctgaaaacccagttatccgttacaaacgaagatcaaaatgaaaaaggttgcaaggaacgaatatatgtgattatcactgtaagccacaaaggcattcgaagagaatgaagtgtacaaaacaactcttgtagtttactgtttttttaagtgtgtaattctaaaagccagtttatgatttaggattttgttaactgaatggttctatcaaatataatagcatttgaaacattttctaatagttatgatacttatacatgtgctttcaggaagttccttggtgaaacaattgttgaggggggatctaggtaattggcagattctaaataatataatttccagatagtaattttaagagtactcatcgctcttgccaaataagttcagggtattcaaatcttggactagtcctgcaaggtataaagaataaaaatcccagtgagatacttggaaaccacagtttattattatttatctgggcaattattgtgtgtgtgaggatggaagggtagggaataatcgaacatctaaagccttgaataagagaatactaattgttttggtatgatgatactcagaaatggagatattataggaaaaagaaatcctttggaattttaactaaaatcactgcatatgggaaattaagagatccaggaccatatttgataagagttcctaaaaataatgtaattattaatgctaaagactgctcatgtatcttgatctaattactaaataattacatatttatttacctgataaatatgtatctagttctacaaggtcacatttatgtggaagtccaaagtcaagtccttaggggataattttgttttggctcagttgttccctgcttcctttttttttttttttttttgagatggagtctcgctctgttgcccaggctggagtgcagtggtgcgatctcagctcactgcatcctctgcctcccgggttcaagcaattctctgcctcagcctcccaagtagttgggattacaggcacctgccaccatgcctggctaattttttgtatttttagtagagacgggggtttcactatgttggctaggctggtcttgaactcctgacctcgtgatccacccgccttggcctcccaaagtgctgggattacaggcatgagccaccgcacctggccttccctgcttcctctctagaatccaattagggatgtttgttactactcatattgattaaaacagttaacaaacttttttctttttaaaatgtgagatcagtgaactctggttttaagataatctgaaacaaggtccttgggagtaataaaattggtcacattctgtaaagcacattctgtttaggaatcaacttatctcaaattgtaactcggggcctaactatatgagatggctgaaaaaataccacatcgtctgttttcactaggtgatgccaaaatattttgctttatgtatattacagttctttttaaaacactggaagactcatgttaaactctaattgtgaaggcagaatctctgctaatttttcagattaaaattctctttgaaaaaata

SEQ ID NO: 15629 - DNA, 1729 bp, Artificial Sequence
  derived and/or modified sequence
acagagcgcgccgtcgccgctcgagctcgccctgagatccctccgctcagcgccttcaacgccgtgtcccggcaccccgcacccgggcacacaaaaaacgggtcgcccgcgattctcagggattgatcgcctcttcagaaaagtcctccatacattttctccccaattccattccttgggcatgccatagcatttgggaaaagtccaattgaatttctagaaaatgcatatgagaagtatggacctgtatttagttttaccatggtaggcaagacatttacttaccttctggggagtgatgctgctgcactgctttttaatagtaaaaatgaagacctgaatgcagaagatgtctacagtcgcctgacaacacctgtgtttgggaagggagttgcatacgatgtgcctaatccagttttcttggagcagaagaaaatgttaaaaagtggccttaacatagcccactttaaacagcatgtttctataattgaaaaagaaacaaaggaatactttgagagttggggagaaagtggagaaaaaaatgtgtttgaagctctttctgagctcataattttaacagctagccattgtttgcatggaaaggaaatcagaagtcaactcaatgaaaaggtagcacagctgtatgcagatttggatggaggtttcagccatgcagcctggctcttaccaggttggctgcctttgcctagtttcagacgcagggacagagctcatcgggaaatcaaggatattttctataaggcaatccagaaacgcagacagtctcaagaaaaaattgatgacattctccaaactttactagatgctacatacaaggatgggcgtcctttgactgatgatgaagtagcagggatgcttattggattactcttggcagggcagcatacatcctcaactactagtgcttggatgggcttctttttggccagagacaaaacacttcaaaaaaaatgttatttagaacagaaaacagtctgtggagagaatctgcctcctttaacttatgaccagctcaaggatctaaatttacttgatcgctgtataaaagaaacattaagacttagacctcctataatgatcatgatgagaatggccagaactcctcagactgtggcagggtataccattcctccaggacatcaggtgtgtgtttctcccactgtcaatcaaagacttaaagactcatgggtagaacgcctggactttaatcctgatcgctacttacaggataacccagcatcaggggaaaagtttgcctatgtgccatttggagctgggcgtcatcgttgtattggggaaaattttgcctatgttcaaattaagacaatttggtccactatgcttcgtttatatgaatttgatctcattgatggatactttcccactgtgaattatacaactatgattcacacccctgaaaacccagttatccgttacaaacgaagatcaaaatgaaaaaggttgcaaggaacgaatatatgtgattatcactgtaagccacaaaggcattcgaagagaatgaagtgtacaaaacaactcttgtagtttactgtttttttaagtgtgtaattctaaaagccagtttatgatttaggattttgttaactgaatggttctatcaaatataatagcatttgaaacattttctaatagttatgatacttatacatgtgctttcaggaagttccttggtgaaacaattgttgag

SEQ ID NO: 15630 - DNA, 2856 bp, Artificial Sequence
  derived and/or modified sequence
atgaaacacgaaaaaagtcctccatacattttctccccaattccattccttgggcatgccatagcatttgggaaaagtccaattgaatttctagaaaatgcatatgagaagtatggacctgtatttagttttaccatggtaggcaagacatttacttaccttctggggagtgatgctgctgcactgctttttaatagtaaaaatgaagacctgaatgcagaagatgtctacagtcgcctgacaacacctgtgtttgggaagggagttgcatacgatgtgcctaatccagttttcttggagcagaagaaaatgttaaaaagtggccttaacatagcccactttaaacagcatgtttctataattgaaaaagaaacaaaggaatactttgagagttggggagaaagtggagaaaaaaatgtgtttgaagctctttctgagctcataattttaacagctagccattgtttgcatggaaaggaaatcagaagtcaactcaatgaaaaggtagcacagctgtatgcagatttggatggaggtttcagccatgcagcctggctcttaccaggttggctgcctttgcctagtttcagacgcagggacagagctcatcgggaaatcaaggatattttctataaggcaatccagaaacgcagacagtctcaagaaaaaattgatgacattctccaaactttactagatgctacatacaaggatgggcgtcctttgactgatgatgaagtagcagggatgcttattggattactcttggcagggcagcatacatcctcaactactagtgcttggatgggcttctttttggccagagacaaaacacttcaaaaaaaatgttatttagaacagaaaacagtctgtggagagaatctgcctcctttaacttatgaccagctcaaggatctaaatttacttgatcgctgtataaaagaaacattaagacttagacctcctataatgatcatgatgagaatggccagaactcctcagactgtggcagggtataccattcctccaggacatcaggtgtgtgtttctcccactgtcaatcaaagacttaaagactcatgggtagaacgcctggactttaatcctgatcgctacttacaggataacccagcatcaggggaaaagtttgcctatgtgccatttggagctgggcgtcatcgttgtattggggaaaattttgcctatgttcaaattaagacaatttggtccactatgcttcgtttatatgaatttgatctcattgatggatactttcccactgtgaattatacaactatgattcacacccctgaaaacccagttatccgttacaaacgaagatcaaaatgaaaaaggttgcaaggaacgaatatatgtgattatcactgtaagccacaaaggcattcgaagagaatgaagtgtacaaaacaactcttgtagtttactgtttttttaagtgtgtaattctaaaagccagtttatgatttaggattttgttaactgaatggttctatcaaatataatagcatttgaaacattttctaatagttatgatacttatacatgtgctttcaggaagttccttggtgaaacaattgttgaggggggatctaggtaattggcagattctaaataatataatttccagatagtaattttaagagtactcatcgctcttgccaaataagttcagggtattcaaatcttggactagtcctgcaaggtataaagaataaaaatcccagtgagatacttggaaaccacagtttattattatttatctgggcaattattgtgtgtgtgaggatggaagggtagggaataatcgaacatctaaagccttgaataagagaatactaattgttttggtatgatgatactcagaaatggagatattataggaaaaagaaatcctttggaattttaactaaaatcactgcatatgggaaattaagagatccaggaccatatttgataagagttcctaaaaataatgtaattattaatgctaaagactgctcatgtatcttgatctaattactaaataattacatatttatttacctgataaatatgtatctagttctacaaggtcacatttatgtggaagtccaaagtcaagtccttaggggataattttgttttggctcagttgttccctgcttcctttttttttttttttttttgagatggagtctcgctctgttgcccaggctggagtgcagtggtgcgatctcagctcactgcatcctctgcctcccgggttcaagcaattctctgcctcagcctcccaagtagttgggattacaggcacctgccaccatgcctggctaattttttgtatttttagtagagacgggggtttcactatgttggctaggctggtcttgaactcctgacctcgtgatccacccgccttggcctcccaaagtgctgggattacaggcatgagccaccgcacctggccttccctgcttcctctctagaatccaattagggatgtttgttactactcatattgattaaaacagttaacaaacttttttctttttaaaatgtgagatcagtgaactctggttttaagataatctgaaacaaggtccttgggagtaataaaattggtcacattctgtaaagcacattctgtttaggaatcaacttatctcaaattgtaactcggggcctaactatatgagatggctgaaaaaataccacatcgtctgttttcactaggtgatgccaaaatattttgctttatgtatattacagttctttttaaaacactggaagactcatgttaaactctaattgtgaaggcagaatctctgctaatttttcagattaaaattctctttg

SEQ ID NO: 15631 - DNA, 1530 bp, Artificial Sequence
  derived and/or modified sequence
atggccgccgccgccggcatgctgctgctgggcctgctgcaggccggcggcagcgtgctgggccaggccatggagaaggtgaccggcggcaacctgctgagcatgctgctgatcgcctgcgccttcaccctgagcctggtgtacctgatcagactggccgccggccacctggtgcagctgcccgccggcgtgaagagccccccctacatcttcagccccatccccttcctgggccacgccatcgccttcggcaagagccccatcgagttcctggagaacgcctacgagaagtacggccccgtgttcagcttcaccatggtgggcaagaccttcacctacctgctgggcagcgacgccgccgccctgctgttcaacagcaagaacgaggacctgaacgccgaggacgtgtacagcagactgaccacccccgtgttcggcaagggcgtggcctacgacgtgcccaaccccgtgttcctggagcagaagaagatgctgaagagcggcctgaacatcgcccacttcaagcagcacgtgagcatcatcgagaaggagaccaaggagtacttcgagagctggggcgagagcggcgagaagaacgtgttcgaggccctgagcgagctgatcatcctgaccgccagccactgcctgcacggcaaggagatcagaagccagctgaacgagaaggtggcccagctgtacgccgacctggacggcggcttcagccacgccgcctggctgctgcccggctggctgcccctgcccagcttcagaagaagagacagagcccacagagagatcaaggacatcttctacaaggccatccagaagagaagacagagccaggagaagatcgacgacatcctgcagaccctgctggacgccacctacaaggacggcagacccctgaccgacgacgaggtggccggcatgctgatcggcctgctgctggccggccagcacaccagcagcaccaccagcgcctggatgggcttcttcctggccagagacaagaccctgcagaagaagtgctacctggagcagaagaccgtgtgcggcgagaacctgccccccctgacctacgaccagctgaaggacctgaacctgctggacagatgcatcaaggagaccctgagactgagaccccccatcatgatcatgatgagaatggccagaaccccccagaccgtggccggctacaccatcccccccggccaccaggtgtgcgtgagccccaccgtgaaccagagactgaaggacagctgggtggagagactggacttcaaccccgacagatacctgcaggacaaccccgccagcggcgagaagttcgcctacgtgcccttcggcgccggcagacacagatgcatcggcgagaacttcgcctacgtgcagatcaagaccatctggagcaccatgctgagactgtacgagttcgacctgatcgacggctacttccccaccgtgaactacaccaccatgatccacacccccgagaaccccgtgatcagatacaagagaagaagcaagtag

SEQ ID NO: 15632 - DNA, 1350 bp, Artificial Sequence
  derived and/or modified sequence
atgaagcacgagaagagccccccctacatcttcagccccatccccttcctgggccacgccatcgccttcggcaagagccccatcgagttcctggagaacgcctacgagaagtacggccccgtgttcagcttcaccatggtgggcaagaccttcacctacctgctgggcagcgacgccgccgccctgctgttcaacagcaagaacgaggacctgaacgccgaggacgtgtacagcagactgaccacccccgtgttcggcaagggcgtggcctacgacgtgcccaaccccgtgttcctggagcagaagaagatgctgaagagcggcctgaacatcgcccacttcaagcagcacgtgagcatcatcgagaaggagaccaaggagtacttcgagagctggggcgagagcggcgagaagaacgtgttcgaggccctgagcgagctgatcatcctgaccgccagccactgcctgcacggcaaggagatcagaagccagctgaacgagaaggtggcccagctgtacgccgacctggacggcggcttcagccacgccgcctggctgctgcccggctggctgcccctgcccagcttcagaagaagagacagagcccacagagagatcaaggacatcttctacaaggccatccagaagagaagacagagccaggagaagatcgacgacatcctgcagaccctgctggacgccacctacaaggacggcagacccctgaccgacgacgaggtggccggcatgctgatcggcctgctgctggccggccagcacaccagcagcaccaccagcgcctggatgggcttcttcctggccagagacaagaccctgcagaagaagtgctacctggagcagaagaccgtgtgcggcgagaacctgccccccctgacctacgaccagctgaaggacctgaacctgctggacagatgcatcaaggagaccctgagactgagaccccccatcatgatcatgatgagaatggccagaaccccccagaccgtggccggctacaccatcccccccggccaccaggtgtgcgtgagccccaccgtgaaccagagactgaaggacagctgggtggagagactggacttcaaccccgacagatacctgcaggacaaccccgccagcggcgagaagttcgcctacgtgcccttcggcgccggcagacacagatgcatcggcgagaacttcgcctacgtgcagatcaagaccatctggagcaccatgctgagactgtacgagttcgacctgatcgacggctacttccccaccgtgaactacaccaccatgatccacacccccgagaaccccgtgatcagatacaagagaagaagcaagtag

SEQ ID NO: 15633 - protein, 138 aa, Artificial Sequence
  derived and/or modified sequence
MLEKWRETEEARGLLTRTQPTASGPPCSHAHSQLLLDRLKGNLARRGGVGRASLETVLWRPGETAFYPQHWGEQASIPAFACRPSSFPLKAYPAAPALRNALLSYQLWERQDRLASGRRGRHCLPSGPGPHRYPQLQD

SEQ ID NO: 15634 - protein, 244 aa, Artificial Sequence
  derived and/or modified sequence
MREAAFMYSTAVAIFLVILVAALQGSAPRESPLPYHIPLDPEGSLELSWNVSYTQEAIHFQLLVRRLKAGVLFGMSDRGELENADLVVLWTDGDTAYFADGTVHLVYGILEEPFRSLEAINGSGLQMGLQRVQLLKPNIPEPELPSDACTMEVQAPNIQIPSQETTYWCYIKELPKGFSRHHIIKYEPIVTKGNEALVHHMEVFQCAPEMDSVPHFSGPCDSKMKPDRLNYCRHVLAAWALGAK

SEQ ID NO: 15635 - protein, 617 aa, Artificial Sequence
  derived and/or modified sequence
MPALSRWASLPGPSMREAAFMYSTAVAIFLVILVAALQGSAPRESPLPYHIPLDPEGSLELSWNVSYTQEAIHFQLLVRRLKAGVLFGMSDRGELENADLVVLWTDGDTAYFADAWSDQKGQIHLDPQQDYQLLQVQRTPEGLTLLFKRPFGTCDPKDYLIEDGTVHLVYGILEEPFRSLEAINGSGLQMGLQRVQLLKPNIPEPELPSDACTMEVQAPNIQIPSQETTYWCYIKELPKGFSRHHIIKYEPIVTKGNEALVHHMEVFQCAPEMDSVPHFSGPCDSKMKPDRLNYCRHVLAAWALGAKAFYYPEEAGLAFGGPGSSRYLRLEVHYHNPLVIEGRNDSSGIRLYYTAKLRRFNAGIMELGLVYTPVMAIPPRETAFILTGYCTDKCTQLALPPSGIHIFASQLHTHLTGRKVVTVLVRDGREWEIVNQDNHYSPHFQEIRMLKKVVSVHPGDVLITSCTYNTEDRELATVGGFGILEEMCVNYVHYYPQTQLELCKSAVDAGFLQKYFHLINRFNNEDVCTCPQASVSQQFTSVPWNSFNRDVLKALYSFAPISMHCNKSSAVRFQGEWNLQPLPKVISTLEEPTPQCPTSQGRSPAGPTVVSIGGGKG

SEQ ID NO: 15636 - DNA, 417 bp, Artificial Sequence
  derived and/or modified sequence
atgctggagaagtggagagagaccgaggaggccagaggcctgctgaccagaacccagcccaccgccagcggccccccctgcagccacgcccacagccagctgctgctggacagactgaagggcaacctggccagaagaggcggcgtgggcagagccagcctggagaccgtgctgtggagacccggcgagaccgccttctacccccagcactggggcgagcaggccagcatccccgccttcgcctgcagacccagcagcttccccctgaaggcctaccccgccgcccccgccctgagaaacgccctgctgagctaccagctgtgggagagacaggacagactggccagcggcagaagaggcagacactgcctgcccagcggccccggcccccacagatacccccagctgcaggactag

SEQ ID NO: 15637 - DNA, 417 bp, Artificial Sequence
  derived and/or modified sequence
atgttagagaaatggagagagaccgaggaagccaggggactgcttacacggactcagcctaccgcctcaggccccccctgttcccatgcccattctcagctgctgctggatcggctcaagggcaatctggcaaggagggggggggtagggcgcgcgtccctcgaaacagttctttggcggcccggcgagacagctttctacccacagcattggggcgaacaggcctccatcccagcctttgcctgtagaccttcatcttttcccctgaaagcataccctgccgcacccgccctgcgaaacgccctgctttcataccaattgtgggagagacaagaccgacttgcctcagggcggcgtggtaggcactgcctgcctagcgggccaggcccgcaccgatatccccagctacaggattag

SEQ ID NO: 15638 - DNA, 417 bp, Artificial Sequence
  derived and/or modified sequence
atgctggagaagtggagggagacagaggaggcccggggcctgctgaccaggacccagcccacagccagcggccccccctgcagccacgcccacagccagctgctgctggaccggctgaagggcaacctggccaggagaggaggagtgggccgggccagcctggagaccgtgctgtggaggcctggagaaacagccttctacccccagcactggggcgagcaggccagcatcccagcctttgcctgccggcccagcagcttccccctgaaggcctacccagctgccccagccctgagaaatgccctgctgagctaccagctgtgggagcggcaggaccggctggccagcggccggcggggccgccactgcctgcccagcggccctggcccccaccgctacccccagctgcaggactag

SEQ ID NO: 15639 - DNA, 735 bp, Artificial Sequence
  derived and/or modified sequence
atgcgggaggccgccttcatgtattccactgctgttgctatcttcttagtcatcctggttgcggcactacagggatccgccccaagggaatctcctttgccttaccatattccgctagaccctgagggtagtctggaattgtcatggaacgtgagttacactcaggaggctatccatttccaactacttgtgaggcgacttaaggctggtgtgctgttcggtatgtctgacaggggcgagctagaaaacgccgacctggtagtgctgtggaccgatggcgacactgcctacttcgctgacggcacagttcatctggtgtacggcatcctcgaagagcctttcagatcacttgaggctattaacgggtccggcctccagatgggactgcagagggttcagctgctgaaacccaacattccggagccagaactgcccagcgatgcctgtacaatggaagtgcaggcacctaatatccagattccctcccaggaaaccacatactggtgttatatcaaggagctccccaaaggcttctcacgccaccacatcatcaaatatgaacctattgtcaccaaggggaacgaggccctcgtccaccatatggaggtgtttcagtgtgcacccgagatggattctgtgcctcattttagtggtccgtgcgactctaaaatgaaacctgacaggcttaattactgtagacatgtgctggctgcctgggccctgggggccaagtag

SEQ ID NO: 15640 - DNA, 1854 bp, Artificial Sequence
  derived and/or modified sequence
atgcccgctctgtctcggtgggcttcacttccggggccatcaatgcgcgaggctgcatttatgtattccacagcagtcgctatattcctggttatcctcgtggcagctctccaaggtagcgcaccccgcgaaagccccctcccttatcatatcccactggaccccgagggttccctagagctgagctggaatgtctcctacacacaggaagcaatccactttcagctacttgttcggcggcttaaggccggggtgctgttcggcatgtccgataggggggagctggagaatgctgacctggtagtgctctggacagatggagatactgcttactttgcagacgcctggagcgatcagaagggtcaaatccacctggatccccagcaggattaccagctgctccaagtgcagagaactcccgagggactgactttgctgttcaaaagaccatttggtacttgcgaccctaaggactacctgatagaagatggcactgttcacctggtgtatggtatcctcgaggaacctttcagatcgcttgaagctatcaatggctctggcctgcagatgggtcttcagcgagtgcaattgctgaagccgaatatacccgagcctgagcttccaagtgatgcatgtaccatggaggtccaagcgcccaacatccagataccatcccaggaaaccacttactggtgctacattaaggagctcccaaaagggttctctcggcatcatattattaaatatgaacccatagtgactaaaggcaacgaagccctggtacaccatatggaggtgtttcaatgtgcacccgaaatggattcagtcccccattttagtggaccatgcgatagcaaaatgaagcctgacaggctcaactactgtaggcatgtcctggccgcatgggcgctaggagcaaaggctttttactacccagaggaagcggggctggcattcggaggtccgggctcttctcgttacttgcgattggaggtgcattaccacaatccactggtcattgaaggaagaaacgactcctctggtataaggctctattatacggctaaactcagaagattcaacgcaggaattatggagctggggctagtttacactccagtcatggcaatccctccacgagaaactgcttttatccttactggttattgcaccgataaatgcacacaattggccttacccccctctggaattcatatctttgcatcccagttacacactcatctgacaggcagaaaggtggtgacggtgctcgtcagagatggcagagagtgggagattgttaatcaggataaccattatagtccgcattttcaggaaataaggatgttgaagaaggtggtgagtgtacacccaggagacgttctgatcacctcatgtacctataacacagaggatcgagagcttgctaccgtcggggggttcggaatcctggaggagatgtgcgtgaactatgtgcattactacccacagactcagctcgagctctgcaaatctgctgtcgacgccggatttctccagaaatactttcacctgataaatagatttaataacgaagacgtctgtacttgcccccaggcatctgtgagccagcagtttacttctgttccttggaattccttcaatcgcgacgttcttaaagcgctgtactcattcgcaccaattagcatgcactgtaataagagttccgcagttcgcttccagggggaatggaatttgcaacctctgcctaaggtgatatcaaccctggaagaacccactccccaatgtcccacttcgcaggggaggtctcctgctggacccacggttgtgagtatcggcgggggaaaaggctag

SEQ ID NO: 15641 - DNA, 735 bp, Artificial Sequence
  derived and/or modified sequence
atgagggaggccgccttcatgtacagcacagctgtggccatcttcctggtgatcctggtggccgccctgcagggcagcgccccccgggagagccccctgccctaccacatccccctggaccctgagggcagcctggagctgtcctggaatgtgtcctacacccaggaggccatccacttccagctgctggtgcggcggctgaaggccggcgtgctgtttggcatgtctgacagaggagagctggagaatgctgacctggtggtgctgtggacagatggagacacagcctactttgctgatggcaccgtgcacctggtgtatggcatcctggaggagcccttccgcagcctggaggccatcaatggaagtggcctgcagatgggcctgcagagggtgcagctgctgaagcccaacatccctgagcctgagctgcccagtgatgcctgcaccatggaggtgcaggcccccaacatccagatccccagccaggagaccacctactggtgctacatcaaggagctgcccaagggcttcagccgccaccacatcatcaagtatgagcccatcgtgaccaagggaaatgaggccctggtgcaccacatggaggtgttccagtgtgcccctgagatggacagcgtgccccacttcagcggcccctgtgacagcaagatgaagccagaccggctgaactactgccgccacgtgctggccgcctgggccctgggcgccaagtag

SEQ ID NO: 15642 - DNA, 1854 bp, Artificial Sequence
  derived and/or modified sequence
atgcctgccctgagccgctgggccagcctgcccggccccagcatgagggaggccgccttcatgtacagcacagctgtggccatcttcctggtgatcctggtggccgccctgcagggcagcgccccccgggagagccccctgccctaccacatccccctggaccctgagggcagcctggagctgtcctggaatgtgtcctacacccaggaggccatccacttccagctgctggtgcggcggctgaaggccggcgtgctgtttggcatgtctgacagaggagagctggagaatgctgacctggtggtgctgtggacagatggagacacagcctactttgctgatgcctggagcgaccagaagggccagatccacctggacccccagcaggactaccagctgctgcaggtgcagaggaccccagagggcctgaccctgctcttcaagaggcccttcggcacctgtgaccccaaggactacctgattgaagatggcaccgtgcacctggtgtatggcatcctggaggagcccttccgcagcctggaggccatcaatggcagcggcctgcagatgggcctgcagagggtgcagctgctgaagcccaacatccctgagcctgagctgcccagtgatgcctgcaccatggaggtgcaggcccccaacatccagatccccagccaggagaccacctactggtgctacatcaaggagctgcccaagggcttcagccgccaccacatcatcaagtatgagcccatcgtgaccaagggaaatgaggccctggtgcaccacatggaggtgttccagtgtgcccctgagatggattctgtgccccacttcagcggcccctgtgacagcaagatgaagccagaccggctgaactactgcagacatgtgctggccgcctgggccctgggcgccaaggccttctactacccagaggaggccggcctggcctttggaggccctggcagcagccgctacctgcggctggaggtgcactaccacaaccccctggtgattgagggcagaaatgacagcagcggcatccggctgtactacacagccaagctgcggcgcttcaatgccggcatcatggagctgggcctggtgtacacccctgtgatggccatccccccccgggagacagccttcatcctgaccggctactgcacagacaagtgcacccagctggccctgccccccagcggcatccacatctttgccagccagctgcacacccacctgaccggcaggaaggtggtgacagtgctggtgagagatggccgggagtgggagatcgtgaaccaggacaaccactacagcccccacttccaggagatccgcatgctgaagaaggtggtgtctgtgcaccctggagatgtgctgatcaccagctgcacctacaacacagaagatcgggagctggccaccgtgggcggcttcggcatcctggaggagatgtgtgtgaactacgtgcactactacccccagacccagctggagctgtgcaagtctgctgtggatgctggcttcctgcagaagtacttccacctgatcaaccgcttcaacaatgaagatgtgtgcacctgcccccaggcctctgtgtcccagcagttcacctctgtgccctggaacagcttcaacagagatgtgctgaaggccctgtacagctttgcccccatctccatgcactgcaacaagagcagcgctgtgcgcttccagggcgagtggaacctgcagcccctgcccaaggtgatcagcaccctggaggagcccaccccccagtgccccaccagccagggccgcagccctgctggccccaccgtggtgtccatcggcggcggcaagggctag

SEQ ID NO: 15643 - DNA, 735 bp, Artificial Sequence
  derived and/or modified sequence
atgcgggaggccgccttcatgtacagcaccgccgtggccatcttcctggttatcctcgtggctgccctacagggcagcgcacctagggaaagccctctcccttatcacatcccgttggatcctgagggctccctggagttatcatggaacgtgagctatacccaggaggccattcatttccagctcctcgtacggagactgaaagcaggcgttctgtttggaatgagcgatcggggagagttagaaaacgcagatctcgtggtgctgtggacagatggcgatacagcttactttgcagatggcaccgtgcatctcgtgtatggcatactggaagagccattcagaagtctggaggccatcaacggctctggccttcagatggggctgcagagagtccagctattgaaacctaacatcccagagccagagctgccatctgacgcttgtacaatggaagtgcaggcccctaatatacagatccctagccaggaaaccacttactggtgttacattaaggagctgcctaaagggttttcccgccatcatatcatcaagtatgagccgatcgtgacgaaagggaatgaggccctagtgcatcatatggaggtgtttcagtgcgcccctgagatggattcagtgccacacttcagtgggccctgcgattctaaaatgaaacccgaccggttgaactactgtcgtcacgtgctggcggcttgggcactgggtgccaagtag

SEQ ID NO: 15644 - DNA, 1854 bp, Artificial Sequence
  derived and/or modified sequence
atgcccgccctgagccggtgggccagcctgcccggccccagcatgcgcgaagctgcgttcatgtatagcacagccgtggccatctttctagttattctcgtcgccgcccttcagggctctgcgccccgggagagccctcttccatatcacattccactggatcccgagggatctctggagctcagttggaatgtctcgtacacccaggaggccatccactttcagctcttagtgcgacggttaaaggctggcgtcctatttggaatgtcagacaggggcgagttggagaatgctgatctcgttgttctttggactgatggagatacagcatactttgccgatgcttggtccgatcagaagggccagatccacctggatccgcagcaagattaccagctgcttcaggtccagcggactccagaggggcttaccttgttgtttaaacggccctttggtacttgcgatccgaaggattatctgatcgaggatggaactgttcatctcgtctatggcattctggaggagccgttcaggagtttggaagcaattaacgggagcggcctgcagatgggcctgcaaagagtccagctgctgaagcccaatatccccgagcccgagctgccgtccgacgcctgcactatggaagtacaagctcctaatattcaaattcccagtcaggagactacatactggtgctatattaaggagctgcctaagggattttctagacaccacatcataaaatacgagcctatcgtaaccaaggggaatgaagcacttgtgcaccatatggaagtgtttcagtgcgcaccggagatggactctgtgccccattttagtgggccctgtgatagtaaaatgaaaccagatcgcctaaattactgcagacacgtccttgccgcctgggctttgggcgctaaggcattttattatcccgaggaggctggtctcgcattcggagggcctggtagtagccggtacctccgattagaggtgcactaccacaatcctctggtcatcgaaggccgaaatgactcctcgggcatccgcctctactatactgccaaactgcgccgatttaacgctgggattatggagctcgggctcgtgtacacaccagtcatggctatcccacctcgcgagaccgcattcattctcaccgggtattgcaccgacaaatgtacacagttggctctacccccgtccggtatccacatctttgcatcccagttgcatacccatcttacaggtcgcaaagtcgtgaccgttctcgtcagagacggacgggagtgggagattgtcaaccaagataatcactatagtccccatttccaggagatacgcatgctgaagaaagtcgtatcagtacacccaggagatgtcttaataactagctgtacatacaacaccgaggatagggagctggctacagtggggggattcggtatactcgaagagatgtgcgtaaactatgttcactattacccacagactcagttggagttatgcaaaagcgccgtagatgccggcttcctgcagaagtattttcatctgattaataggtttaacaatgaagacgtgtgcacctgtcctcaggcatctgtcagtcagcagtttactagcgtgccgtggaactctttcaatagagacgtccttaaagctctctattccttcgcgccgatctctatgcactgcaataagtccagtgccgttaggttccagggcgagtggaacctccagcccctgcccaaagttatttctactcttgaggagcctacgcctcagtgtcccacttctcaaggcagatcccctgcaggaccgacagtcgtatccattggtggcgggaaaggttag

SEQ ID NO: 15645 - DNA, 735 bp, Artificial Sequence
  derived and/or modified sequence
atgcgggaggccgcttttatgtatagcacagctgttgctatttttctggtcatccttgtggccgcattgcaagggagtgcgccaagagagagtccgctcccctaccatataccccttgacccagagggcagcctcgagctgagttggaacgtaagttacacccaggaggccatccactttcagctgttagtgcggagactaaaggctggcgtgctattcggcatgtctgatcggggtgaactagaaaatgctgacttagtcgtgctgtggaccgacggagacacagcctactttgccgatgggaccgtccatctggtctacggcattctcgaagagccatttcggtctctggaagctatcaatggttcaggtcttcagatgggtctccaacgcgtgcagctgctgaagccaaatatacctgagcccgaactacccagcgacgcgtgtacaatggaggttcaggccccaaatattcagatcccgtcccaggagaccacttactggtgttacattaaagagctgccaaagggattctcccgacatcatattattaaatatgaaccgatcgtaacaaaggggaatgaagccctcgttcaccatatggaagtttttcaatgtgcccctgaaatggacagtgttccacacttcagtggaccatgtgacagcaagatgaaacctgaccggctgaattattgtagacatgtcctggccgcttgggctctcggggcaaaatag

SEQ ID NO: 15646 - DNA, 1854 bp, Artificial Sequence
  derived and/or modified sequence
atgcccgcactatcccggtgggccagcctcccaggaccctctatgcgtgaggctgcatttatgtacagcacggcagtcgccattttcctggtgatcctagtggccgcactgcagggtagcgcaccacgcgaatcccccctgccttaccacatcccactcgaccccgaaggctcccttgagttgtcctggaatgtcagttatactcaggaggccattcacttccagctgttggtccgcagattgaaagccggagtgctcttcggtatgtcagaccgaggggagcttgaaaatgctgatcttgtggtgctatggactgacggagacaccgcatacttcgccgacgcctggtccgatcagaaggggcaaatccatctggacccccagcaggattatcagctgttacaggtccagcgcaccccggaaggcctgaccctgctttttaaaaggccttttgggacttgtgaccctaaggattaccttatcgaagatggaaccgtgcatttggtgtacggaatactcgaagaaccgtttcgttcacttgaggctatcaacggcagcggattgcagatggggttacagcgtgtgcaattattaaaacccaacatacctgagccagagttgccttcagatgcttgtactatggaggtgcaggcccctaatatccagatcccaagccaagaaaccacatattggtgctatatcaaggaactgcctaagggattctctcgccaccacattatcaagtatgaacctattgtgactaagggcaacgaagctctagttcatcatatggaagtattccagtgtgctcctgagatggacagtgtaccgcatttctcaggaccgtgcgactcgaagatgaagccagatcgtctcaattattgcaggcacgtcctggcagcttgggctctaggcgctaaggcgttttactatcctgaggaggccggtcttgcctttgggggacctggctcctctcggtatctgaggctggaagtgcactatcacaaccccctcgtcatcgagggtcgaaacgactcgtccggtatccggctgtattacactgctaagctgcgaaggttcaatgccggtatcatggaactgggtttagtctatacccctgtgatggctattcctccccgtgaaaccgcatttatcctgactggatattgcactgataagtgcacgcagcttgcgctgcccccatctggcattcatatcttcgcctcacagctgcacacacacctcactggccgaaaggtagtgaccgtactggtgcgagacgggagagagtgggagatcgtgaaccaggataatcactactcccctcacttccaagagattagaatgttaaaaaaagtggtttccgtgcacccaggggacgtcctgatcacatcctgcacctataacacggaagatcgcgagctcgctactgtgggtggattcgggatcctcgaggagatgtgcgtcaactatgtacactactacccccagacacagctcgagctatgcaaaagcgcagtggacgcgggatttctgcaaaagtatttccacttgattaatcgatttaacaatgaagatgtgtgtacatgtcctcaggcctctgtctcacaacagttcactagtgtgccctggaacagctttaacagggatgtgctcaaggctctgtatagctttgctccaatctccatgcactgcaacaagtcatcggcagtgcggttccaaggagagtggaacttgcagccactgccgaaggtgatctctacgcttgaagagccgaccccccagtgtcctacctctcaggggcgatcccccgctggccctacagtagtcagtatcggcggaggtaaggggtag

SEQ ID NO: 15647 - DNA, 735 bp, Artificial Sequence
  derived and/or modified sequence
atgagagaggccgccttcatgtacagcaccgccgtggccatcttcctggtgatcctggtggccgccctgcagggcagcgcccccagagagagccccctgccctaccacatccccctggaccccgagggcagcctggagctgagctggaacgtgagctacacccaggaggccatccacttccagctgctggtgagaagactgaaggccggcgtgctgttcggcatgagcgacagaggcgagctggagaacgccgacctggtggtgctgtggaccgacggcgacaccgcctacttcgccgacggcaccgtgcacctggtgtacggcatcctggaggagcccttcagaagcctggaggccatcaacggcagcggcctgcagatgggcctgcagagagtgcagctgctgaagcccaacatccccgagcccgagctgcccagcgacgcctgcaccatggaggtgcaggcccccaacatccagatccccagccaggagaccacctactggtgctacatcaaggagctgcccaagggcttcagcagacaccacatcatcaagtacgagcccatcgtgaccaagggcaacgaggccctggtgcaccacatggaggtgttccagtgcgcccccgagatggacagcgtgccccacttcagcggcccctgcgacagcaagatgaagcccgacagactgaactactgcagacacgtgctggccgcctgggccctgggcgccaagtag

SEQ ID NO: 15648 - DNA, 1854 bp, Artificial Sequence
  derived and/or modified sequence
atgcccgccctgagcagatgggccagcctgcccggccccagcatgagagaggccgccttcatgtacagcaccgccgtggccatcttcctggtgatcctggtggccgccctgcagggcagcgcccccagagagagccccctgccctaccacatccccctggaccccgagggcagcctggagctgagctggaacgtgagctacacccaggaggccatccacttccagctgctggtgagaagactgaaggccggcgtgctgttcggcatgagcgacagaggcgagctggagaacgccgacctggtggtgctgtggaccgacggcgacaccgcctacttcgccgacgcctggagcgaccagaagggccagatccacctggacccccagcaggactaccagctgctgcaggtgcagagaacccccgagggcctgaccctgctgttcaagagacccttcggcacctgcgaccccaaggactacctgatcgaggacggcaccgtgcacctggtgtacggcatcctggaggagcccttcagaagcctggaggccatcaacggcagcggcctgcagatgggcctgcagagagtgcagctgctgaagcccaacatccccgagcccgagctgcccagcgacgcctgcaccatggaggtgcaggcccccaacatccagatccccagccaggagaccacctactggtgctacatcaaggagctgcccaagggcttcagcagacaccacatcatcaagtacgagcccatcgtgaccaagggcaacgaggccctggtgcaccacatggaggtgttccagtgcgcccccgagatggacagcgtgccccacttcagcggcccctgcgacagcaagatgaagcccgacagactgaactactgcagacacgtgctggccgcctgggccctgggcgccaaggccttctactaccccgaggaggccggcctggccttcggcggccccggcagcagcagatacctgagactggaggtgcactaccacaaccccctggtgatcgagggcagaaacgacagcagcggcatcagactgtactacaccgccaagctgagaagattcaacgccggcatcatggagctgggcctggtgtacacccccgtgatggccatcccccccagagagaccgccttcatcctgaccggctactgcaccgacaagtgcacccagctggccctgccccccagcggcatccacatcttcgccagccagctgcacacccacctgaccggcagaaaggtggtgaccgtgctggtgagagacggcagagagtgggagatcgtgaaccaggacaaccactacagcccccacttccaggagatcagaatgctgaagaaggtggtgagcgtgcaccccggcgacgtgctgatcaccagctgcacctacaacaccgaggacagagagctggccaccgtgggcggcttcggcatcctggaggagatgtgcgtgaactacgtgcactactacccccagacccagctggagctgtgcaagagcgccgtggacgccggcttcctgcagaagtacttccacctgatcaacagattcaacaacgaggacgtgtgcacctgcccccaggccagcgtgagccagcagttcaccagcgtgccctggaacagcttcaacagagacgtgctgaaggccctgtacagcttcgcccccatcagcatgcactgcaacaagagcagcgccgtgagattccagggcgagtggaacctgcagcccctgcccaaggtgatcagcaccctggaggagcccaccccccagtgccccaccagccagggcagaagccccgccggccccaccgtggtgagcatcggcggcggcaagggctag

SEQ ID NO: 15649 - DNA, 2613 bp, Artificial Sequence
  derived and/or modified sequence
accccagccatgcccgccctcagtcgctgggccagcctgcccggccccagcatgcgggaggcagccttcatgtacagcacagcagtggccatcttcctggtcatcctggtggccgcactgcagggctcggctccccgtgagagccccctcccctatcacatccccctggacccggaggggtccctggagctctcatggaatgtcagctacacccaggaggccatccatttccagctcctggtgcggaggctcaaggctggcgtcctgtttgggatgtccgaccgtggcgagcttgagaacgcagatctcgtggtgctctggaccgatggggacactgcctattttgcggacggcactgtccacttggtctacgggatcctggaggagccgttccggtcactggaggccatcaacggctcgggcctgcagatggggctgcagagggtgcagctcctgaagcccaatatccccgaaccggagttgccctcagacgcgtgcaccatggaggtccaagctcccaatatccagatccccagccaggagaccacgtactggtgctacattaaggagcttccaaagggcttctctcggcaccacattatcaagtacgagcccatcgtcaccaagggcaatgaggcccttgtccaccacatggaagtcttccagtgcgcccccgagatggacagcgtcccccacttcagcgggccctgcgactccaagatgaaacccgaccgcctcaactactgccgccacgtgctggccgcctgggccctgggtgccaaggcattttactacccagaggaagccggccttgccttcgggggtccagggtcctccagatatctccgcctggaagttcactaccacaacccactggtgatagaaggacgaaacgactcctcaggcatccgcttgtactacacagccaagctgcggcgcttcaacgcggggatcatggagctgggactggtgtacacgccagtgatggccattccaccacgggagaccgccttcatcctcactggctactgcacggacaagtgcacccagctggcactgcctccctccgggatccacatcttcgcctctcagctccacacacacctgactgggagaaaggtggtcacagtgctggtccgggacggccgggagtgggagatcgtgaaccaggacaatcactacagccctcacttccaggagatccgcatgttgaagaaggtcgtgtcggtccatccgggagatgtgctcatcacctcctgcacgtacaacacagaagaccgggagctggccacagtggggggcttcgggatcctggaggagatgtgtgtcaactacgtgcactactacccccagacgcagctggagctctgcaagagcgctgtggacgccggcttcctgcagaagtacttccacctcatcaacaggttcaacaacgaggatgtctgcacctgccctcaggcgtccgtgtctcagcagttcacctctgttccctggaactccttcaaccgcgacgtactgaaggccctgtacagcttcgcgcccatctccatgcactgcaacaagtcctcagccgtccgcttccagggtgaatggaacctgcagcccctgcccaaggtcatctccacactggaagagcccaccccacagtgccccaccagccagggccgaagccctgctggccccaccgttgtcagcattggtgggggcaaaggctgaggggggacctactcctccccctcctccatgctgtccctgtgggctcacaccggcactgtgcactctactctgcgacgatccccatggaacagccctgcacgcccaggatgaaggggccagaccacgcccctgcctgagaccacggtccaatccagccttcttcccccagggtcccctgcatggctgagagggtgtgggtgccctgttgacctaccctggaccgagtggaccacgacctcgtccatttaaacccggctgactcagtgcagggacagcctgcacagtggtccagggtccagccctccgccagccctgttccgcctcactgggtgtggcctggcttctgggacaggcaccatgctgggccggggtgtggaatcaccgggaacgcccccgcccccgccccgctgctcccggtgtgcagcgggtgcgggtgccgcttaaacatttccctgctgagtggctcgtgtttcacagtgggcggcttccctgcgacggaggcaggaccaggcatttagctagttagagactcgcctgggaaattgctccattcctgagtaaacagatattttcgcccacctaaagggaagccctgacaacaactatcaccaaaagacgaggcggcaaagatccagcggggcttctgggcgccggttccacgtggggtggaattattagcaccagcttgcttctctgccggtggggccagcgctgaacagaccggggtggagtcagggctgtgctttccgcgtggttctgccacttagggagtgtgccttgggcgggccatttcacattcctgaccctcacttttctcatctgtaaaaccaggctgatgccgtgcgggctaatgagccaataaagctcacacttgggctggcacccactggaggtggg

SEQ ID NO: 15650 - DNA, 2763 bp, Artificial Sequence
  derived and/or modified sequence
ctcaccccagccatgcccgccctcagtcgctgggccagcctgcccggccccagcatgcgggaggcagccttcatgtacagcacagcagtggccatcttcctggtcatcctggtggccgcactgcagggctcggctccccgtgagagccccctcccctatcacatccccctggacccggaggggtccctggagctctcatggaatgtcagctacacccaggaggccatccatttccagctcctggtgcggaggctcaaggctggcgtcctgtttgggatgtccgaccgtggcgagcttgagaacgcagatctcgtggtgctctggaccgatggggacactgcctattttgcggacgcctggagtgaccagaaggggcagatccacctggatccccagcaggactaccagctgctgcaggtgcagaggaccccagaaggcctgaccctgcttttcaagaggccctttggcacctgcgaccccaaggattacctcattgaagacggcactgtccacttggtctacgggatcctggaggagccgttccggtcactggaggccatcaacggctcgggcctgcagatggggctgcagagggtgcagctcctgaagcccaatatccccgaaccggagttgccctcagacgcgtgcaccatggaggtccaagctcccaatatccagatccccagccaggagaccacgtactggtgctacattaaggagcttccaaagggcttctctcggcaccacattatcaagtacgagcccatcgtcaccaagggcaatgaggcccttgtccaccacatggaagtcttccagtgcgcccccgagatggacagcgtcccccacttcagcgggccctgcgactccaagatgaaacccgaccgcctcaactactgccgccacgtgctggccgcctgggccctgggtgccaaggcattttactacccagaggaagccggccttgccttcgggggtccagggtcctccagatatctccgcctggaagttcactaccacaacccactggtgatagaaggacgaaacgactcctcaggcatccgcttgtactacacagccaagctgcggcgcttcaacgcggggatcatggagctgggactggtgtacacgccagtgatggccattccaccacgggagaccgccttcatcctcactggctactgcacggacaagtgcacccagctggcactgcctccctccgggatccacatcttcgcctctcagctccacacacacctgactgggagaaaggtggtcacagtgctggtccgggacggccgggagtgggagatcgtgaaccaggacaatcactacagccctcacttccaggagatccgcatgttgaagaaggtcgtgtcggtccatccgggagatgtgctcatcacctcctgcacgtacaacacagaagaccgggagctggccacagtggggggcttcgggatcctggaggagatgtgtgtcaactacgtgcactactacccccagacgcagctggagctctgcaagagcgctgtggacgccggcttcctgcagaagtacttccacctcatcaacaggttcaacaacgaggatgtctgcacctgccctcaggcgtccgtgtctcagcagttcacctctgttccctggaactccttcaaccgcgacgtactgaaggccctgtacagcttcgcgcccatctccatgcactgcaacaagtcctcagccgtccgcttccagggtgaatggaacctgcagcccctgcccaaggtcatctccacactggaagagcccaccccacagtgccccaccagccagggccgaagccctgctggccccaccgttgtcagcattggtgggggcaaaggctgaggggggacctactcctccccctcctccatgctgtccctgtgggctcacaccggcactgtgcactctactctgcgacgatccccatggaacagccctgcacgcccaggatgaaggggccagaccacgcccctgcctgagaccacggtccaatccagccttcttcccccagggtcccctgcatggctgagagggtgtgggtgccctgttgacctaccctggaccgagtggaccacgacctcgtccatttaaacccggctgactcagtgcagggacagcctgcacagtggtccagggtccagccctccgccagccctgttccgcctcactgggtgtggcctggcttctgggacaggcaccatgctgggccggggtgtggaatcaccgggaacgcccccgcccccgccccgctgctcccggtgtgcagcgggtgcgggtgccgcttaaacatttccctgctgagtggctcgtgtttcacagtgggcggcttccctgcgacggaggcaggaccaggcatttagctagttagagactcgcctgggaaattgctccattcctgagtaaacagatattttcgcccacctaaagggaagccctgacaacaactatcaccaaaagacgaggcggcaaagatccagcggggcttctgggcgccggttccacgtggggtggaattattagcaccagcttgcttctctgccggtggggccagcgctgaacagaccggggtggagtcagggctgtgctttccgcgtggttctgccacttagggagtgtgccttgggcgggccatttcacattcctgaccctcacttttctcatctgtaaaaccaggctgatgccgtgcgggctaatgagccaataaagctcacacttgggctggcacccactggaggtggg

SEQ ID NO: 15651 - protein, 260 aa, Artificial Sequence [sequence omitted]

SEQ ID NO: 15652 - protein, 15 aa, Artificial Sequence
  derived and/or modified sequence
MATPPKRSCPSFSAS

SEQ ID NO: 15653 - DNA, 783 bp, Artificial Sequence
  derived and/or modified sequence
atggcaacaccaccaaagagaagctgtccaagtttttctgcctccagcgaaggaacccgcataaagaagatctccatcgagggcaatatcgccgccgggaaaagcaccttcgtcaatatcctgaagcagctgtgcgaggattgggaggtggtgccggaacccgtggctagatggtgtaacgttcagagcacacaggacgaattcgaggaactgaccatgtctcagaaaaacgggggcaacgtgctgcagatgatgtacgagaagcccgagcgctggtcattcaccttccaaacttacgcttgcctctctcgcattagagcacagctggctagtctgaatggcaagttgaaagacgcagagaagcccgtcttgtttttcgagcgcagtgtgtactctgataggtacatcttcgcttccaacctatatgagagtgaatgcatgaatgagactgaatggaccatttaccaggactggcacgactggatgaacaatcagtttggacagagtttggaattggatggcattatctacctccaggccactccggagacctgtctgcatcggatctacctcagaggtcggaatgaagaacaaggaattccgctcgagtacctggaaaagctccactacaaacacgaatcctggctgctgcatcgcaccctaaagactaatttcgattacctgcaggaagtgcctattctgaccctggatgtcaacgaggacttcaaagataaatacgaatcactggtggagaaagtgaaggagtttcttagcactctgtag

SEQ ID NO: 15654 - DNA, 48 bp, Artificial Sequence
  derived and/or modified sequence
atggccacaccgccaaagcgatcctgtccttccttttctgcgtcttag

SEQ ID NO: 15655 - DNA, 783 bp, Artificial Sequence
  derived and/or modified sequence
atggccaccccacccaagaggagctgccccagcttcagcgccagcagcgagggcacccgcatcaagaagatcagcattgagggcaacattgctgctgggaagagcacctttgtgaacatcctgaagcagctgtgtgaggactgggaggtggtgcctgagcctgtggcccgctggtgcaatgtgcagagcacccaggatgaatttgaggagctgaccatgagccagaagaatggaggaaatgtgctgcagatgatgtatgagaagccagagcgctggagcttcaccttccagacctacgcctgcctgagccgcatccgggcccagctggccagcctgaatggcaagctgaaggatgctgagaagcctgtgctcttctttgagaggtctgtgtacagcgaccgctacatctttgccagcaacctgtatgaaagtgagtgcatgaatgaaacagagtggaccatctaccaggactggcatgactggatgaacaaccagtttggccagagcctggagctggatggcatcatctacctgcaggccaccccagagacctgcctgcaccgcatctacctgcggggcagaaatgaggagcagggcatccccctggagtacctggagaagctgcactacaagcatgagagctggctgctgcacaggaccctgaagaccaactttgactacctgcaggaggtgcccatcctgaccctggatgtgaatgaagacttcaaggacaagtatgagagcctggtggagaaggtgaaggagttcctgagcaccctgtag

SEQ ID NO: 15656 - DNA, 48 bp, Artificial Sequence
  derived and/or modified sequence
atggccaccccacccaagaggagctgccccagcttcagcgccagctag

SEQ ID NO: 15657 - DNA, 783 bp, Artificial Sequence
  derived and/or modified sequence
atggccaccccccccaagcggagctgccccagcttcagcgccagcagcgagggtacaagaatcaagaagatctcaatcgagggaaatattgccgccggcaagagtacatttgtcaatatactcaaacagctgtgcgaagactgggaagttgtgcccgaacctgtggccaggtggtgcaacgtgcagagtacccaggacgagtttgaagaactcacgatgtcccagaaaaacggcggcaatgttctgcagatgatgtacgagaagccagagcggtggagtttcacttttcaaacatacgcctgtctctcccggattcgcgcccagctcgctagccttaatggaaagctgaaagatgccgagaaacctgtcctgtttttcgagcgtagtgtgtactccgaccgatacatattcgccagtaatctgtatgagtctgagtgcatgaacgaaacagagtggaccatttaccaggattggcacgattggatgaacaaccagttcgggcagtcgttggaattggatggcatcatctatctgcaagccactccagaaacatgtcttcaccggatttacttgagaggaagaaacgaggagcagggcatcccactcgagtacctcgagaagctccactataagcacgagtcttggttgctgcatcggacactgaagacgaactttgactacctccaggaagtacccattttgaccttagacgtcaacgaggacttcaaggataagtacgagagtctggtggagaaggtcaaggagtttctgtccactttgtag

SEQ ID NO: 15658 - DNA, 48 bp, Artificial Sequence
  derived and/or modified sequence
atggccaccccccccaagcggagctgccccagcttcagcgccagctag

SEQ ID NO: 15659 - DNA, 783 bp, Artificial Sequence
  derived and/or modified sequence
atggcaacccccccaaagagatcatgtccatcgttctctgcttcctcagaaggaacacgtatcaaaaaaataagcatcgagggaaatatcgctgctggtaaaagcaccttcgtgaacatcctaaagcagctgtgtgaggactgggaggtagtacccgagccagtggcacgttggtgcaatgtgcagtcaacccaagacgaatttgaggagctgactatgtcccagaagaacggcggaaacgtgttgcagatgatgtatgagaaacctgagcggtggagctttacttttcagacctatgcatgcctgagccggatccgcgctcagctggcttcactcaatggtaagctgaaggacgctgagaagcctgtgctatttttcgaacggtctgtgtacagtgaccggtacattttcgcaagcaatctctacgaatctgagtgtatgaatgagactgaatggaccatctaccaagactggcatgactggatgaacaatcagttcggacagtctctcgaattggacggaattatctacctgcaagccacacctgaaacctgtctccacaggatctatctgaggggacgcaatgaggaacagggcattccgcttgagtacctggagaagctacattataaacatgagtcttggctcttgcacaggacactgaaaaccaactttgactaccttcaggaggtaccaattttgactctggatgtgaacgaggactttaaggataagtatgagagtctggtcgagaaggtgaaggaattcctgtccaccctctag

SEQ ID NO: 15660 - DNA, 48 bp, Artificial Sequence
  derived and/or modified sequence
atggctacaccacccaaacggagctgtcccagtttctccgccagctag

SEQ ID NO: 15661 - DNA, 783 bp, Artificial Sequence
  derived and/or modified sequence
atggccaccccccccaagagaagctgccccagcttcagcgccagcagcgagggcaccagaatcaagaagatcagcatcgagggcaacatcgccgccggcaagagcaccttcgtgaacatcctgaagcagctgtgcgaggactgggaggtggtgcccgagcccgtggccagatggtgcaacgtgcagagcacccaggacgagttcgaggagctgaccatgagccagaagaacggcggcaacgtgctgcagatgatgtacgagaagcccgagagatggagcttcaccttccagacctacgcctgcctgagcagaatcagagcccagctggccagcctgaacggcaagctgaaggacgccgagaagcccgtgctgttcttcgagagaagcgtgtacagcgacagatacatcttcgccagcaacctgtacgagagcgagtgcatgaacgagaccgagtggaccatctaccaggactggcacgactggatgaacaaccagttcggccagagcctggagctggacggcatcatctacctgcaggccacccccgagacctgcctgcacagaatctacctgagaggcagaaacgaggagcagggcatccccctggagtacctggagaagctgcactacaagcacgagagctggctgctgcacagaaccctgaagaccaacttcgactacctgcaggaggtgcccatcctgaccctggacgtgaacgaggacttcaaggacaagtacgagagcctggtggagaaggtgaaggagttcctgagcaccctgtag

SEQ ID NO: 15662 - DNA, 48 bp, Artificial Sequence
  derived and/or modified sequence
atggccaccccccccaagagaagctgccccagcttcagcgccagctag

SEQ ID NO: 15663 - DNA, 2716 bp, Artificial Sequence
  derived and/or modified sequence
acccgactccggaacctcttcccgcgccctgcccgggcgcctggctgcttggggtagaggccttccgccacacgcgcggccccgccccggccttcacgtgacctggcgtgcggagcgcgcacgcgggaacccgcgctggaggcgggcgagggccgaggggcagctagggagcgcggcttgaggagggcggggccgccccgcaggcccgccagtgtcctcagctgcctccgcgcgccaaagtcaaaccccgacacccgccggcgggccggtgagctcactagctgacccggcaggtcaggatctggcttagcggcgccgcgagctccagtgcgcgcacccgtggccgcctcccagccctctttgccggacgagctctgggccgccacaagactaaggaatggccaccccgcccaagagaagctgcccgtctttctcagccagctctgaggggacccgcatcaagaaaatctccatcgaagggaacatcgctgcagggaagtcaacatttgtgaatatccttaaacaattgtgtgaagattgggaagtggttcctgaacctgttgccagatggtgcaatgttcaaagtactcaagatgaatttgaggaacttacaatgtctcagaaaaatggtgggaatgttcttcagatgatgtatgagaaacctgaacgatggtcttttaccttccaaacatatgcctgtctcagtcgaataagagctcagcttgcctctctgaatggcaagctcaaagatgcagagaaacctgtattattttttgaacgatctgtgtatagtgacaggtatatttttgcatctaatttgtatgaatctgaatgcatgaatgagacagagtggacaatttatcaagactggcatgactggatgaataaccaatttggccaaagccttgaattggatggaatcatttatcttcaagccactccagagacatgcttacatagaatatatttacggggaagaaatgaagagcaaggcattcctcttgaatatttagagaagcttcattataaacatgaaagctggctcctgcataggacactgaaaaccaacttcgattatcttcaagaggtgcctatcttaacactggatgttaatgaagactttaaagacaaatatgaaagtctggttgaaaaggtcaaagagtttttgagtactttgtgatcttgctgaagactacaggcagccaaatggttccagatacttcagctttgtgtatcttcgtaacttcatattaatataagtttctttagaaaacccaagtttttaatcgtttttgttttaaggaaaaaagatttttaaaatgaatcttatgcaaaactttttgaccagtttcttttcttttgttttttttttaaaaaagacatttaaagacaaagacattatttctcatagcaggaaatgtagaggtagatggttccagtatcagcatagtgactaaactacattataaaagatccagcttccttctgtcattcccctcttttgtcttcctcagcaggttggcttttttccctggtgcctctcacttcgttggtgaccagtttcttaaactgaaagctttaatgttacatagtaaatggtagtgtgtcctgtgtaaattagtgtacctattaaaagttgcaaagtggaattaaaggaatccctagaataaggattctgaagttttattttaaattattatcttcttaacagtttagtcccacctcttacttcctgcctcagtctgctttctctactgtctggattaattaggcagcctgctataaagttaaagtcacacatttctattttgcaaacactgtgattactctttgctttgtagtttgctttgctttgtagggttctgcttttaagtttttctctttttcagacaaattactgataaaaatgatattgctctatatgtaatatatcctgaaagcattattttttgttgaataggaaataaaattaatgaagacagaggctagaaagcatccattaattaatgagacacacttaactacttatctctaaaccatctatgtgaatatttgtaaaaataatgaatggactcatcttagttctgtatataaatatattttctttctagtttgtttagttaaggtgtgcagtgtttttcctgtgtattaaacctttccattttacgttttagaaaattttatgtattttaaaataaggggaagagtcattttcacttttaaactactatttttctttccaagtcatttttgtttttggtttcttattcaaagatgataatttagtggattaaccagtccagacgcactgatctttgcaaaggagacttaatttcaaatctgtaattaccatacataaactgtctcattatacgtatgcatttttttagtttgtttttgtttggtataaattaatttgttaattaaatatttcttaagtataaaccttatgaactacagtggagctacactcattgaaatgtaatttcagttctaaaaagatgtaataatcattttagaattaaaatttattctacttttaaataaattatgaatattaaaggtgaaaattgtataaattactttgattccattttaagtggagacatatttcagtgatttttagtaacctttaaaaatgtataatgacttttaaaatttgtagaattgaaaagacgctaataaaaatttattatttatttgtcatgactcaaaa

SEQ ID NO: 15664 - DNA, 428 bp, Artificial Sequence
  derived and/or modified sequence
gaggacaatcagaggcgatgtggaaacttctgtcttgtaatcacaggagtgaaggtgtcgggcaggctgagttaacagctgaacagaaacctacctacccaacgtgctaacttctatacagcatggtcgtgcatccaaatcaaatggaaagcggtatgggagatctggaaaggcctcctgtgggtggcatctgactacctaaattcccatcccagtttcacttactgactttgacacttggaacaagcagcctctcagtgcctgttttcccactggcaggtcaggatctggcttagcggcgccgcgagctccagtgcgcgcacccgtggccgcctcccagccctctttgccggacgagctctgggccgccacaagactaaggaatggccaccccgcccaagagaagctgcccgtctttctcagccagc

SEQ ID NO: 15665 - protein, 1306 aa, Artificial Sequence
  derived and/or modified sequence
MGAASGRRGPGLLLPLPLLLLLPPQPALALDPGLQPGNFSADEAGAQLFAQSYNSSAEQVLFQSVAASWAHDTNITAENARRQEEAALLSQEFAEAWGQKAKELYEPIWQNFTDPQLRRIIGAVRTLGSANLPLAKRQQYNALLSNMSRIYSTAKVCLPNKTATCWSLDPDLTNILASSRSYAMLLFAWEGWHNAAGIPLKPLYEDFTALSNEAYKQDGFTDTGAYWRSWYNSPTFEDDLEHLYQQLEPLYLNLHAFVRRALHRRYGDRYINLRGPIPAHLLGDMWAQSWENIYDMVVPFPDKPNLDVTSTMLQQGWNATHMFRVAEEFFTSLELSPMPPEFWEGSMLEKPADGREVVCHASAWDFYNRKDFRIKQCTRVTMDQLSTVHHEMGHIQYYLQYKDLPVSLRRGANPGFHEAIGDVLALSVSTPEHLHKIGLLDRVTNDTESDINYLLKMALEKIAFLPFGYLVDQWRWGVFSGRTPPSRYNFDWWYLRTKYQGICPPVTRNETHFDAGAKFHVPNVTPYIRYFVSFVLQFQFHEALCKEAGYEGPLHQCDIYRSTKAGAKLRKVLQAGSSRPWQEVLKDMVGLDALDAQPLLKYFQPVTQWLQEQNQQNGEVLGWPEYQWHPPLPDNYPEGIDLVTDEAEASKFVEEYDRTSQVVWNEYAEANWNYNTNITTETSKILLQKNMQIANHTLKYGTQARKFDVNQLQNTTIKRIIKKVQDLERAALPAQELEEYNKILLDMETTYSVATVCHPNGSCLQLEPDLTNVMATSRKYEDLLWAWEGWRDKAGRAILQFYPKYVELINQAARLNGYVDAGDSWRSMYETPSLEQDLERLFQELQPLYLNLHAYVRRALHRHYGAQHINLEGPIPAHLLGNMWAQTWSNIYDLVVPFPSAPSMDTTEAMLKQGWTPRRMFKEADDFFTSLGLLPVPPEFWNKSMLEKPTDGREVVCHASAWDFYNGKDFRIKQCTTVNLEDLVVAHHEMGHIQYFMQYKDLPVALREGANPGFHEAIGDVLALSVSTPKHLHSLNLLSSEGGSDEHDINFLMKMALDKIAFIPFSYLVDQWRWRVFDGSITKENYNQEWWSLRLKYQGLCPPVPRTQGDFDPGAKFHIPSSVPYIRYFVSFIIQFQFHEALCQAAGHTGPLHKCDIYQSKEAGQRLATAMKLGFSRPWPEAMQLITGQPNMSASAMLSYFKPLLDWLRTENELHGEKLGWPQYNWTPNSARSEGPLPDSGRVSFLGLDLDAQQARVGQWLLLFLGIALLVATLGLSQRLFSIRHRSLHRHSHGPQFGSEVELRHS

SEQ ID NO: 15666 - protein, 1145 aa, Artificial Sequence
  derived and/or modified sequence
MGAASGRRGPGLLLPLPLLLLLPPQPALALDPGLQPGNFSADEAGAQLFAQSYNSSAEQVLFQSVAASWAHDTNITAENARRQEEAALLSQEFAEAWGQKAKELYEPIWQNFTDPQLRRIIGAVRTLGSANLPLAKRQQYNALLSNMSRIYSTAKVCLPNKTATCWSLDPDLTNILASSRSYAMLLFAWEGWHNAAGIPLKPLYEDFTALSNEAYKQDGFTDTGAYWRSWYNSPTFEDDLEHLYQQLEPLYLNLHAFVRRALHRRYGDRYINLRGPIPAHLLGDMWAQSWENIYDMVVPFPDKPNLDVTSTMLQQGWNATHMFRVAEEFFTSLELSPMPPEFWEGSMLEKPADGREVVCHASAWDFYNRKDFRIKQCTRVTMDQLSTVHHEMGHIQYYLQYKDLPVSLRRGANPGFHEAIGDVLALSVSTPEHLHKIGLLDRVTNDTESDINYLLKMALEKIAFLPFGYLVDQWRWGVFSGRTPPSRYNFDWWYLRTKYQGICPPVTRNETHFDAGAKFHVPNVTPYIRYFVSFVLQFQFHEALCKEAGYEGPLHQCDIYRSTKAGAKLRKVLQAGSSRPWQEVLKDMVGLDALDAQPLLKYFQPVTQWLQEQNQQNGEVLGWPEYQWHPPLPDNYPEGIDLVTDEAEASKFVEEYDRTSQVVWNEYAEANWNYNTNITTETSKILLQKNMQIANHTLKYGTQARKFDVNQLQNTTIKRIIKKVQDLERAALPAQELEEYNKILLDMETTYSVATVCHPNGSCLQLEPDLTNVMATSRKYEDLLWAWEGWRDKAGRAILQFYPKYVELINQAARLNGYVDAGDSWRSMYETPSLEQDLERLFQELQPLYLNLHAYVRRALHRHYGAQHINLEGPIPAHLLGNMWAQTWSNIYDLVVPFPSAPSMDTTEAMLKQGWTPRRMFKEADDFFTSLGLLPVPPEFWNKSMLEKPTDGREVVCHASAWDFYNGKDFRIKQCTTVNLEDLVVAHHEMGHIQYFMQYKDLPVALREGANPGFHEAIGDVLALSVSTPKHLHSLNLLSSEGGSDEHDINFLMKMALDKIAFIPFSYLVDQWRWRVFDGSITKENYNQEWWSLRLKYQGLCPPVPRTQGDFDPGAKFHIPSSVPYIRYFVSFIIQFHPFSQHTAA

SEQ ID NO: 15667 - protein, 475 aa, Artificial Sequence
  derived and/or modified sequence
MGAASGRRGPGLLLPLPLLLLLPPQPALALDPGLQPGNFSADEAGAQLFAQSYNSSAEQVLFQSVAASWAHDTNITAENARRQEEAALLSQEFAEAWGQKAKELYEPIWQNFTDPQLRRIIGAVRTLGSANLPLAKRQQYNALLSNMSRIYSTAKVCLPNKTATCWSLDPDLTNILASSRSYAMLLFAWEGWHNAAGIPLKPLYEDFTALSNEAYKQDGFTDTGAYWRSWYNSPTFEDDLEHLYQQLEPLYLNLHAFVRRALHRRYGDRYINLRGPIPAHLLGDMWAQSWENIYDMVVPFPDKPNLDVTSTMLQQGWNATHMFRVAEEFFTSLELSPMPPEFWEGSMLEKPADGREVVCHASAWDFYNRKDFRIKQCTRVTMDQLSTVHHEMGHIQYYLQYKDLPVSLRRGANPGFHEAIGDVLALSVSTPEHLHKIGLLDRVTNDTEPSIRGSVLLLPETKPTLMLELSFMFQM

SEQ ID NO: 15668 - DNA, 3921 bp, Artificial Sequence
  derived and/or modified sequence
atgggggcggccagcgggcggcgcggacccgggctcctgctgccactgccgttgcttctgctgctgcctccccaaccagcgctggccctcgacccaggcctccaacctggcaacttctctgcagatgaagctggtgctcagctcttcgctcagtcatacaactcctctgccgaacaagtgttattccagagcgtggccgcttcctgggcccacgatacaaatatcactgcggagaacgccagacggcaggaagaagcagcgctgctgtcccaagagttcgctgaagcatggggccagaaagccaaagagttatatgagccaatctggcagaactttacagacccccaattgcgcagaatcatcggcgccgtccgaacccttggctccgcaaacctgccgctagctaaaagacagcagtacaatgccctgctatcaaacatgtcccggatctactcaacagcaaaggtgtgtttgcccaataaaaccgccacctgctggtctctcgaccctgacttgactaacatccttgcgagctctcggagttatgccatgcttctgtttgcctgggagggatggcacaacgcagctggcattccactgaagccgctgtacgaagacttcaccgcactgtccaatgaggcttataagcaggacgggttcaccgacaccggggcctactggagaagctggtataattcgccaacattcgaagacgacctggaacatctgtaccaacagctggagccactctatttaaatctccacgcgttcgtccgtcgggccttacatcggaggtatggcgacaggtatataaatctgcgggggcccatcccggcgcacttgctcggggacatgtgggcacagagttgggaaaatatttacgacatggtcgtaccattccccgataagccaaacctggacgtgacaagcaccatgcttcaacaaggatggaacgccacacatatgttccgcgtcgcagaggaattctttacctccctagagctgtcacccatgcccccagagttttgggaaggctcgatgctggagaagccagccgatggcagagaggtagtctgccatgcctcagcctgggatttttacaaccggaaggacttccggatcaaacaatgtacgcgcgtgacaatggatcagctgtccaccgtacaccacgaaatgggccacatacagtattacttgcagtataaagacttgccagtgtctttgcgccgcggagcgaatcccgggttccatgaggcaatcggtgatgtcttagccctgtcagtgtcaacaccagagcatctgcataaaattggcctgttggaccgcgtgactaacgacaccgagagcgacattaattacctacttaagatggcccttgaaaagatagccttcttgccttttggatacttggtggaccagtggagatggggagtgttctccgggaggacaccccccagtcgctataacttcgactggtggtacctccgtaccaagtaccagggcatatgccccccagtgacacgcaatgagacccacttcgatgcaggagccaaattccacgttcccaatgtgaccccttatatccgctatttcgtttcttttgtactccagttccagtttcacgaggctttatgcaaggaagcaggatacgaggggcctctgcatcaatgtgatatctaccgatccaccaaggcgggagcaaagctgcgaaaagtgctgcaggcaggctcctccagaccttggcaggaagtcttaaaagacatggtggggctggacgccctggatgcacagccactcctgaagtattttcagcccgtgactcagtggctgcaggagcaaaaccagcagaacggcgaagtgctgggatggcccgaataccagtggcacccgccattgcccgataattacccagaaggcatagatctcgtgaccgacgaagcagaagcatccaaatttgtggaagaatatgatcgcacctcccaggtcgtgtggaacgagtacgccgaggccaattggaattataataccaatataaccacggagaccagtaaaatcctgctacaaaagaatatgcaaatcgctaaccacacgttgaaatacggcacacaggccaggaaattcgatgtgaatcagctgcaaaacaccaccattaaaaggattataaaaaaggtccaagacctggagcgagcagctttaccagcacaagagctggaagaatataacaagatcctgctggacatggagacaacctacagcgtcgcaaccgtgtgtcatcccaatggttcttgtctgcagctggagcctgatttgactaacgtcatggccacttcccggaagtatgaggacctcctctgggcctgggaaggatggagggataaggccggaagggctatcctgcagttctaccccaagtatgttgaactcatcaaccaagctgcaaggctcaacggatatgttgacgcaggtgactcctggcgcagcatgtatgaaacacccagcctggaacaggatctcgagcgactcttccaggagctccagcccttgtacctcaatttgcacgcttatgtgcgcagagccctgcacaggcattatggagcacagcacattaatctggagggtcctattcccgcccatctgcttggaaacatgtgggctcaaacctggtcaaacatctacgacctggtagttccttttccatctgctcctagcatggacaccacggaagctatgcttaagcagggctggacaccaagacgtatgttcaaggaggccgatgactttttcactagcttaggacttctcccagtccctccggagttctggaataaatcaatgctggaaaagccaacagacggacgagaggtcgtttgtcatgcaagtgcctgggatttttataacggcaaagacttccgtatcaaacagtgtacgactgtcaacctcgaagatctggtcgtcgcccaccacgagatgggacacattcagtactttatgcagtacaaggatctgcccgtggctctgcgggaaggagcaaatccaggcttccacgaggctatcggtgacgttctcgccctgtccgtttctaccccgaaacatttgcacagcttgaatctactgtcatcggagggcggaagtgacgagcatgacatcaattttctcatgaagatggcactcgataagatcgctttcatcccttttagctacttggtggaccaatggaggtggcgcgtgtttgatggttctattacgaaggagaactataatcaggaatggtggtcactcagacttaaataccaaggactgtgcccgcccgtcccgaggacccagggagactttgatccgggcgccaagtttcatattccctcaagcgtcccatatattagatattttgtgagcttcattattcaattccagtttcatgaggcgctgtgtcaggccgcaggccacaccggacccctgcataaatgtgacatctaccagagtaaggaagccggacaaagactggctactgcaatgaaactgggcttcagcagaccatggcccgaagctatgcaactgataaccggccagcctaatatgagtgccagcgctatgctctcctactttaagccgctgctcgactggctcagaactgagaacgagctgcacggagagaaactggggtggccccaatataattggacacctaatagcgcacggtccgaagggccccttccagacagcggacgcgtgtccttcctgggccttgaccttgatgcacagcaggcccgcgtcggtcagtggttgttgctttttctgggcatagccctgctcgtggcgactctggggctgtcccagaggcttttctccatcagacacaggtcacttcacaggcattcccatggaccccaattcgggtcagaggtcgaactaaggcacagctag

SEQ ID NO: 15669 - DNA, 3438 bp, Artificial Sequence
  derived and/or modified sequence
atgggggctgcttctggaagaaggggacccgggctgcttcttcccctgccgctgctgctcttgctccccccacagccagctcttgccctcgaccccggcttacagccgggcaacttctccgccgatgaggcaggggctcagctcttcgcccagtcgtataattcctcagctgagcaggtcctatttcaaagcgtagccgctagctgggctcatgatacaaatatcaccgctgagaatgctcgccgacaggaggaggccgccttgctgagtcaagaatttgcagaggcctggggtcagaaggccaaggaactgtatgagccaatttggcagaacttcacagacccccagcttcggcgaattataggagcggtgcggactctgggttcggcaaatttacccctggcgaagcgccagcaatacaacgcccttttgagtaacatgagccggatctactcgaccgccaaggtttgcctccctaataagaccgctacctgctggagcctggaccctgacctgacaaacattctggcaagctctcgatcgtatgcaatgctcttattcgcgtgggaagggtggcacaacgcggcaggcattcctctgaagccattgtatgaggactttaccgccctgagtaatgaagcttacaaacaggacggcttcactgatacaggtgcctattggcgcagttggtacaactcccccacgtttgaggacgacctggagcacttatatcagcagctggagcccctgtatctcaacttgcacgcgttcgtacgccgtgcacttcaccggaggtacggggacagatacatcaatctccggggtcccatacccgcccacctgctgggagatatgtgggctcaaagttgggaaaatatatacgatatggtggtcccatttcctgataagcctaatctggatgtgacctctacgatgttgcaacaaggttggaacgccacacacatgttcagggtggccgaggagttttttacaagcttggaacttagtcctatgcctccagagttctgggaaggaagtatgttggaaaagccagcagacggtagagaagtagtctgtcatgcttctgcatgggacttttataataggaaggatttccgcatcaagcagtgtacgagagttactatggaccaactcagcaccgtccatcatgagatgggacatatacagtattatttacagtacaaagaccttccagtgtctcttcggcgtggagccaatccaggcttccacgaggcaataggcgatgtgttagccctttctgtgtctactcctgagcatttgcataaaatcggactcttggatagagtcactaatgacacagagagcgacatcaactacctgctcaagatggcactcgagaaaatagcttttctaccgttcggatacttagtggaccagtggcgttggggagtgtttagtgggaggacacccccttcccgttacaattttgattggtggtatctgcgcaccaaataccaaggaatttgcccgcctgtgaccaggaacgaaactcactttgatgccggggccaaattccacgtgccaaatgtgacaccatatattaggtatttcgtgtcctttgtgttgcagtttcagtttcacgaagccctgtgtaaggaagccggctacgaaggacctctccaccagtgtgacatctaccggagtactaaggcaggcgctaaactccgaaaagtgcttcaggctggctcttcaaggccatggcaggaagttttgaaagacatggtgggcttagacgcactggatgctcagccactattgaagtattttcagcctgtgacccagtggctgcaggaacagaatcaacaaaacggcgaagtgctgggctggccagagtaccagtggcacccaccactgccagacaattaccccgagggtatcgatcttgttaccgatgaagctgaggcctcaaaatttgtggaagaatatgatagaacgagtcaggtcgtgtggaacgagtacgccgaggcaaattggaactataatactaatataacaaccgagacatctaaaatcttgctgcaaaaaaacatgcagattgccaatcacaccctgaagtatggcacacaggccaggaagttcgatgtgaaccagctccagaacacaactatcaagcggataattaagaaggtgcaagacttagaacgggctgctctgcctgcgcaggagctggaggagtacaataagatcctcttggacatggagacgacatacagtgttgccactgtgtgccatcccaacggatcatgtctccagctggagccggatttgacgaatgtaatggccaccagtaggaaatacgaggacctgttatgggcatgggagggatggcgggacaaagctggccgcgctatcctccagttttaccccaaatacgtggagctgatcaaccaggccgccaggttgaatgggtatgtggatgccggtgactcatggcggtcaatgtacgaaacccctagccttgagcaggatctcgagaggctctttcaggagctacagcctctgtacctgaacctccacgcttacgtacgaagggcactgcataggcactatggcgcacagcatatcaacctcgaaggacctattcccgctcacctgttggggaacatgtgggcgcaaacctggagcaatatatatgatcttgtggttccattcccatcagccccatcgatggacacaaccgaggcaatgctgaagcaaggctggacacctagacgcatgtttaaggaagccgacgattttttcacgagtctgggactccttcccgttccccctgagttctggaacaagagcatgcttgaaaagcctacagacggtagggaggtggtctgccacgcatctgcctgggatttctataatggtaaagattttcgaatcaaacagtgtaccaccgtgaacctggaagatctggtagtggctcatcacgaaatgggacatatacagtacttcatgcagtataaagacctgcctgtggcactccgcgagggcgcaaaccccggattccatgaagcaatcggcgacgtgcttgctttatccgtctctactcccaagcatctccactccctgaatctcttaagctccgagggcgggagtgacgaacatgacataaactttctaatgaaaatggccctcgacaagatagctttcatccccttttcgtacctggtagatcagtggcggtggcgggtgttcgacgggagcatcacgaaggagaactacaatcaggaatggtggagtttgcgactgaagtaccagggtttatgtccacctgtgccccggactcaaggcgatttcgaccctggcgccaagttccacatcccaagcagtgtcccatatatccggtacttcgtaagcttcatcattcagttccacccattctctcagcataccgcagcttag

SEQ ID NO: 15670 - DNA, 1428 bp, Artificial Sequence
  derived and/or modified sequence
atgggggctgcctccggcagacgcgggcccggcttactgctgccattaccgctcctgctgctgctgcctccccagccagctctagctttagatccggggctccagcccggcaatttcagcgccgacgaagccggagcgcaactgttcgcccagtcttataactccagtgccgaacaagtgttgtttcagtcggtcgcagcaagctgggcacacgacaccaatattaccgcagagaatgcccgcagacaggaagaagctgccctcctatcccaggaattcgctgaggcatgggggcagaaagctaaggaactatatgagcctatttggcagaattttacagacccccaacttaggcggatcattggagctgtcaggaccctgggatcagcgaacctgccactggccaagaggcagcagtataatgcccttctgagcaatatgagtaggatttactccacagcaaaagtatgcctgccgaacaaaacagctacctgctggagcctggacccagatctgacaaacatcctggcttcctccaggagttacgcaatgcttctttttgcctgggagggttggcataacgcggccgggatccccttgaaaccactctatgaagatttcaccgcgcttagcaatgaagcgtataaacaggatggcttcactgacactggtgcttactggcgctcttggtataattctccgacttttgaggacgatctggagcacctctaccaacagttagagcccctttatctgaacctgcacgcatttgttcgccgagccctgcaccggcggtacggcgatcggtacatcaatctgagaggccctatccccgcacacctgctaggggatatgtgggcacagtcatgggaaaatatatacgacatggttgttcccttccctgataaacctaacctcgatgttaccagtactatgctgcagcagggatggaatgctacccatatgttcagagtggctgaggaattcttcacgagtctagaactgagtcccatgccccctgaattttgggagggcagtatgctggagaagccagccgacggtcgcgaggttgtgtgtcatgcatccgcttgggatttctataatcgcaaagatttccggatcaaacagtgtacgagggtgactatggaccaactgtcgaccgtacatcacgaaatgggccacatccagtattatcttcagtacaaagacctgcccgtatccctgcggcggggggctaatcctgggtttcacgaagccattggcgatgtgctggcactttcggttagtactcccgaacacctccacaagatcggattgctcgaccgtgtaaccaatgacaccgagccctctatacgtggaagcgtcctcttgctccccgaaactaaacccacactgatgcttgagctgtcctttatgtttcagatgtag

SEQ ID NO: 15671 - DNA, 3921 bp, Artificial Sequence
  derived and/or modified sequence
atgggcgccgccagcggcagaagaggccctggcctgctgctgcccctgcccctgctgctgctgctgcccccccagcctgccctggccctggaccccggcctgcagcccggcaacttcagcgcagatgaggccggggcccagctgtttgcccagagctacaacagcagcgctgagcaggtgctcttccagagcgtggccgcctcctgggcccatgacaccaacatcacagcagaaaatgcccggcggcaggaggaggccgccctgctgagccaggagtttgctgaggcctggggccagaaggccaaggagctgtatgagcccatctggcagaacttcacagacccccagctgcggcgcatcattggagctgtgaggaccctgggcagcgccaacctgcccctggccaagaggcagcagtacaatgccctgctgagcaacatgagccgcatctacagcacagccaaggtgtgcctgcccaacaagacagccacctgctggagcctggaccctgacctgaccaacatcctggccagcagccgctcctatgccatgctgctgtttgcctgggagggctggcacaatgctgctggcatccccctgaagcccctgtatgaggacttcaccgccctgagcaatgaggcctacaagcaggacggcttcacagacacaggagcctactggaggtcctggtacaacagccccacctttgaagatgacctggagcacctgtaccagcagctggagcccctgtacctgaacctgcacgcctttgtgagaagagccctgcaccggcgctacggggaccgctacatcaacctgcggggccccatcccagcccacctgctgggggacatgtgggcccagagctgggagaacatctatgacatggtggtgcccttcccagacaagcccaacctggatgtgaccagcaccatgctgcagcagggctggaatgccacccacatgttccgggtggccgaggagttcttcaccagcctggagctgagccccatgcctcctgagttctgggagggctccatgctggagaagccagcagatggccgggaggtggtgtgccacgccagcgcctgggacttctacaacaggaaggacttccgcatcaagcagtgcaccagggtgaccatggaccagctgagcacagtgcaccacgagatgggccacatccagtactacctgcagtacaaggacctgcctgtgtccctgcggcggggggccaaccctggcttccacgaggccatcggagatgtgctggccctgtctgtgtccaccccagagcacctgcacaagattggcctgctggacagagtgaccaatgacacagaaagtgacatcaactacctgctgaagatggccctggagaagatcgccttcctgcccttcggctacctggtggaccagtggcgctggggcgtcttcagcggccgcaccccacccagccgctacaactttgactggtggtacctgcggaccaagtaccagggcatctgcccccctgtgaccagaaatgagacccactttgatgctggggccaagttccacgtgcccaacgtgaccccctacatccgctactttgtgtcctttgtgctgcagttccagttccacgaggccctgtgcaaggaggccggctatgagggccccctgcaccagtgtgacatctaccgcagcaccaaggccggggccaagctgaggaaggtgctgcaggccggcagcagccggccctggcaggaggtgctgaaggacatggtgggcctggatgccctggatgcccagcccctgctgaagtacttccagcctgtgacccagtggctgcaggagcagaaccagcagaatggagaggtgctgggctggccagagtaccagtggcacccccccctgcctgacaactacccagagggcatcgacctggtgacagatgaagctgaggccagcaagtttgtggaggagtatgacaggaccagccaggtggtgtggaatgaatatgcagaggccaactggaactacaacaccaacatcaccacagagaccagcaagatcctgctgcagaagaacatgcagatcgccaaccacaccctgaagtatggcacccaggccaggaagtttgatgtgaaccagctgcagaacaccaccatcaagaggatcatcaagaaggtgcaggacctggagcgggccgccctgcctgcccaggagctggaggagtacaacaagatcctgctggacatggagaccacctacagcgtggccaccgtgtgccaccccaacggcagctgcctgcagctggagccagacctgaccaacgtgatggccaccagcaggaaatatgaggacctgctgtgggcctgggagggctggagggacaaggccggccgggccatcctgcagttctaccccaagtatgtggagctgatcaaccaggccgcccggctgaatggctacgtggatgctggggacagctggaggtccatgtatgagacccccagcctggagcaggacctggagcggctcttccaggagctgcagcccctgtacctgaacctgcacgcctacgtgagaagagccctgcaccgccactacggggcccagcacatcaacctggagggccccatcccagcccacctgctgggcaacatgtgggcccagacctggagcaacatctatgacctggtggtgcccttccccagcgcccccagcatggacaccacagaggccatgctgaagcagggctggacccccaggaggatgttcaaggaggctgatgacttcttcaccagcctgggcctgctgcctgtgcccccagagttctggaacaagtccatgctggagaagcccacagatggccgggaggtggtgtgccacgccagcgcctgggacttctacaacgggaaggacttccgcatcaagcagtgcaccaccgtgaacctggaggacctggtggtggcccaccacgagatgggccacatccagtacttcatgcagtacaaggacctgcctgtggccctgcgggagggcgccaaccctggcttccacgaggccatcggagatgtgctggccctgtctgtgtccacccccaagcacctgcacagcctgaacctgctgagcagcgagggcggcagtgatgaacatgacatcaacttcctgatgaagatggccctggacaagatcgccttcatccccttctcctacctggtggaccagtggcgctggagggtgtttgatggcagcatcaccaaggagaactacaaccaggagtggtggagcctgcggctgaagtaccagggcctgtgcccccctgtgcccaggacccagggcgactttgatcctggggccaagttccacatccccagctctgtgccctacatccgctactttgtgtccttcatcatccagttccagttccacgaggccctgtgccaggccgccggccacacaggccccctgcacaagtgtgacatctaccagagcaaggaggccggccagaggctggccacagccatgaagctgggcttcagccggccctggccagaggccatgcagctgatcaccggccagcccaacatgtctgccagcgccatgctgagctacttcaagcccctgctggactggctgaggacagaaaatgagctgcatggagagaagctgggctggccccagtacaactggacccccaacagcgcccggtctgagggccccctgcctgacagcggccgggtgtccttcctgggcctggacctggatgcccagcaggcccgggtgggccagtggctgctgctcttcctgggcatcgccctgctggtggccaccctgggcctgagccagaggctcttcagcatccgccacaggagcctgcaccgccacagccacggcccccagtttggaagtgaggtggagctgcggcacagctag

SEQ ID NO: 15672 - DNA, 3438 bp, Artificial Sequence
  derived and/or modified sequence
atgggcgccgccagcggcagaagaggccctggcctgctgctgcccctgcccctgctgctgctgctgcccccccagcctgccctggccctggaccccggcctgcagcccggcaacttcagcgcagatgaggccggggcccagctgtttgcccagagctacaacagcagcgctgagcaggtgctcttccagagcgtggccgcctcctgggcccatgacaccaacatcacagcagaaaatgcccggcggcaggaggaggccgccctgctgagccaggagtttgctgaggcctggggccagaaggccaaggagctgtatgagcccatctggcagaacttcacagacccccagctgcggcgcatcattggagctgtgaggaccctgggcagcgccaacctgcccctggccaagaggcagcagtacaatgccctgctgagcaacatgagccgcatctacagcacagccaaggtgtgcctgcccaacaagacagccacctgctggagcctggaccctgacctgaccaacatcctggccagcagccgctcctatgccatgctgctgtttgcctgggagggctggcacaatgctgctggcatccccctgaagcccctgtatgaggacttcaccgccctgagcaatgaggcctacaagcaggacggcttcacagacacaggagcctactggaggtcctggtacaacagccccacctttgaagatgacctggagcacctgtaccagcagctggagcccctgtacctgaacctgcacgcctttgtgagaagagccctgcaccggcgctacggggaccgctacatcaacctgcggggccccatcccagcccacctgctgggggacatgtgggcccagagctgggagaacatctatgacatggtggtgcccttcccagacaagcccaacctggatgtgaccagcaccatgctgcagcagggctggaatgccacccacatgttccgggtggccgaggagttcttcaccagcctggagctgagccccatgcctcctgagttctgggagggctccatgctggagaagccagcagatggccgggaggtggtgtgccacgccagcgcctgggacttctacaacaggaaggacttccgcatcaagcagtgcaccagggtgaccatggaccagctgagcacagtgcaccacgagatgggccacatccagtactacctgcagtacaaggacctgcctgtgtccctgcggcggggggccaaccctggcttccacgaggccatcggagatgtgctggccctgtctgtgtccaccccagagcacctgcacaagattggcctgctggacagagtgaccaatgacacagaaagtgacatcaactacctgctgaagatggccctggagaagatcgccttcctgcccttcggctacctggtggaccagtggcgctggggcgtcttcagcggccgcaccccacccagccgctacaactttgactggtggtacctgcggaccaagtaccagggcatctgcccccctgtgaccagaaatgagacccactttgatgctggggccaagttccacgtgcccaacgtgaccccctacatccgctactttgtgtcctttgtgctgcagttccagttccacgaggccctgtgcaaggaggccggctatgagggccccctgcaccagtgtgacatctaccgcagcaccaaggccggggccaagctgaggaaggtgctgcaggccggcagcagccggccctggcaggaggtgctgaaggacatggtgggcctggatgccctggatgcccagcccctgctgaagtacttccagcctgtgacccagtggctgcaggagcagaaccagcagaatggagaggtgctgggctggccagagtaccagtggcacccccccctgcctgacaactacccagagggcatcgacctggtgacagatgaagctgaggccagcaagtttgtggaggagtatgacaggaccagccaggtggtgtggaatgaatatgcagaggccaactggaactacaacaccaacatcaccacagagaccagcaagatcctgctgcagaagaacatgcagatcgccaaccacaccctgaagtatggcacccaggccaggaagtttgatgtgaaccagctgcagaacaccaccatcaagaggatcatcaagaaggtgcaggacctggagcgggccgccctgcctgcccaggagctggaggagtacaacaagatcctgctggacatggagaccacctacagcgtggccaccgtgtgccaccccaacggcagctgcctgcagctggagccagacctgaccaacgtgatggccaccagcaggaaatatgaggacctgctgtgggcctgggagggctggagggacaaggccggccgggccatcctgcagttctaccccaagtatgtggagctgatcaaccaggccgcccggctgaatggctacgtggatgctggggacagctggaggtccatgtatgagacccccagcctggagcaggacctggagcggctcttccaggagctgcagcccctgtacctgaacctgcacgcctacgtgagaagagccctgcaccgccactacggggcccagcacatcaacctggagggccccatcccagcccacctgctgggcaacatgtgggcccagacctggagcaacatctatgacctggtggtgcccttccccagcgcccccagcatggacaccacagaggccatgctgaagcagggctggacccccaggaggatgttcaaggaggctgatgacttcttcaccagcctgggcctgctgcctgtgcccccagagttctggaacaagtccatgctggagaagcccacagatggccgggaggtggtgtgccacgccagcgcctgggacttctacaacgggaaggacttccgcatcaagcagtgcaccaccgtgaacctggaggacctggtggtggcccaccacgagatgggccacatccagtacttcatgcagtacaaggacctgcctgtggccctgcgggagggcgccaaccctggcttccacgaggccatcggagatgtgctggccctgtctgtgtccacccccaagcacctgcacagcctgaacctgctgagcagcgagggcggcagtgatgaacatgacatcaacttcctgatgaagatggccctggacaagatcgccttcatccccttctcctacctggtggaccagtggcgctggagggtgtttgatggcagcatcaccaaggagaactacaaccaggagtggtggagcctgcggctgaagtaccagggcctgtgcccccctgtgcccaggacccagggcgactttgatcctggggccaagttccacatccccagctctgtgccctacatccgctactttgtgtccttcatcatccagttccaccccttcagccagcacacagctgcctag

SEQ ID NO: 15673 - DNA, 1428 bp, Artificial Sequence
  derived and/or modified sequence
atgggcgccgccagcggcagaagaggccctggcctgctgctgcccctgcccctgctgctgctgctgcccccccagcctgccctggccctggaccccggcctgcagcccggcaacttcagcgcagatgaggccggggcccagctgtttgcccagagctacaacagcagcgctgagcaggtgctcttccagagcgtggccgcctcctgggcccatgacaccaacatcacagcagaaaatgcccggcggcaggaggaggccgccctgctgagccaggagtttgctgaggcctggggccagaaggccaaggagctgtatgagcccatctggcagaacttcacagacccccagctgcggcgcatcattggagctgtgaggaccctgggcagcgccaacctgcccctggccaagaggcagcagtacaatgccctgctgagcaacatgagccgcatctacagcacagccaaggtgtgcctgcccaacaagacagccacctgctggagcctggaccctgacctgaccaacatcctggccagcagccgctcctatgccatgctgctgtttgcctgggagggctggcacaatgctgctggcatccccctgaagcccctgtatgaggacttcaccgccctgagcaatgaggcctacaagcaggacggcttcacagacacaggagcctactggaggtcctggtacaacagccccacctttgaagatgacctggagcacctgtaccagcagctggagcccctgtacctgaacctgcacgcctttgtgagaagagccctgcaccggcgctacggggaccgctacatcaacctgcggggccccatcccagcccacctgctgggggacatgtgggcccagagctgggagaacatctatgacatggtggtgcccttcccagacaagcccaacctggatgtgaccagcaccatgctgcagcagggctggaatgccacccacatgttccgggtggccgaggagttcttcaccagcctggagctgagccccatgcctcctgagttctgggagggctccatgctggagaagccagcagatggccgggaggtggtgtgccacgccagcgcctgggacttctacaacaggaaggacttccgcatcaagcagtgcaccagggtgaccatggaccagctgagcacagtgcaccacgagatgggccacatccagtactacctgcagtacaaggacctgcctgtgtccctgcggcggggggccaaccctggcttccacgaggccatcggagatgtgctggccctgtctgtgtccaccccagagcacctgcacaagattggcctgctggacagagtgaccaatgacacagagcccagcatccggggctctgtgctgctgctgcctgagaccaagcccaccctgatgctggagctgtccttcatgttccagatgtag

SEQ ID NO: 15674 - DNA, 3921 bp, Artificial Sequence
  derived and/or modified sequence
atgggcgccgccagcggccggcggggccccggcctgctgctgcccttgccgctgctgcttctcctgccgccacagcccgccctggcgcttgatcctgggcttcagccaggtaacttcagcgccgacgaggctggggcccaactgtttgcgcagagttataactcctctgccgaacaggtcctgtttcaaagcgttgcagccagttgggcccatgatacaaacataactgctgaaaatgcccgtagacaagaggaggcagcgctcctgtcacaggagttcgccgaagcttggggccagaaggcgaaagaactgtacgagcccatctggcagaacttcacggatccccaattaaggcgcattattggggccgtccgcacacttggcagcgcgaatctcccactggccaagagacagcagtataacgctctcttgagcaatatgagtaggatatactccactgcaaaggtgtgcctccccaataaaactgctacctgctggtccctggacccggacctaacaaacatacttgcctcttccaggtcatacgccatgctcctctttgcttgggagggatggcataacgcggcaggcatccctttgaaacccctgtatgaggattttacggcactgtccaatgaagcctataaacaggacggctttactgacacaggcgcatattggcgaagttggtacaatagccccacgttcgaggatgatctggagcatctgtaccaacagctggaaccgctctacctgaacctccatgcgttcgtgcgcagggccctgcaccgtcgctacggagaccgatatatcaatcttcggggacccattcctgctcacctactcggcgacatgtgggcccagtcatgggagaatatctacgacatggtcgtgccgttcccagataaacctaacctagatgtgacctcaacgatgctgcagcagggatggaacgccacccacatgtttagggttgccgaggaattcttcacatctctggaacttagtcccatgcctccagaattttgggaggggagcatgctggaaaaaccagctgacggccgcgaggtcgtttgccatgcctccgcttgggacttctacaatagaaaggatttccggattaagcagtgcacgagggttacgatggatcagctgtccactgtgcaccacgaaatgggacatatccagtattatctgcagtataaggacctacccgtctcattgaggcggggtgctaatccgggcttccatgaagccatcggggacgtgctagcgctctctgtgtctacccccgaacacttgcacaagattggcctccttgatcgagtcactaacgacacagaaagcgatatcaattatctgcttaagatggcactggagaaaatcgcattcctccccttcggctatttggtcgatcagtggaggtggggcgtgttcagcggtagaacacctccttctcggtacaattttgattggtggtaccttaggacaaagtaccagggcatctgtccaccagtgacccgaaatgagacccacttcgatgcaggcgcaaagttccatgttcccaacgtcaccccatatattaggtatttcgtctcctttgtgttgcaattccagtttcatgaggccctatgtaaagaagcgggttatgaaggcccgctgcatcagtgtgatatctatcggtcaactaaagccggagccaaactgcggaaagtgcttcaggccggcagtagcaggccgtggcaggaggtcctgaaagacatggttgggcttgacgccctggacgctcaacctctgctgaagtactttcagccggtgacacaatggctccaagaacagaatcagcagaacggtgaggttctaggatggccagagtatcagtggcatcccccgctacccgataactatcctgaaggtatagatttggtgaccgatgaggctgaagcaagcaagttcgtcgaggagtatgacaggacttctcaggttgtgtggaatgagtatgcagaagcgaattggaattacaataccaacatcaccacagagacaagcaaaatattgctgcaaaagaatatgcaaatagcaaaccataccctgaaatatgggactcaggcaaggaaatttgatgtgaatcaactgcagaacactacaataaaacggattataaaaaaagtccaagacctagagcgagctgcgctgcccgcccaagagctggaggaatacaataagatcctcctggacatggagaccacatacagcgtcgctacggtgtgtcacccaaacggcagttgtctgcaattggagcctgatttaaccaatgtaatggccacttccagaaaatacgaagacctgctgtgggcctgggaggggtggcgagacaaagcaggacgcgccatcttacaattttaccctaagtatgtggaactcatcaaccaggctgccaggctgaatggttatgtggatgcaggagactcttggcgctcgatgtatgagacccctagtcttgagcaagacctcgaacgccttttccaggaactccagcctctgtatctgaacctgcacgcctacgtccgcagggccctccatcgacattatggcgcacagcacattaatctggagggtcctattccggcgcatcttctgggcaacatgtgggcacagacctggtccaatatctacgacctggtggtcccattcccctccgcaccatcgatggatacaactgaggccatgctgaaacaggggtggacacctcggcggatgttcaaggaagccgatgattttttcacgtccctgggactgttacctgtgcctcctgaattttggaacaaaagtatgttagagaagccgaccgacggacgcgaggtcgtgtgccacgccagtgcttgggacttctacaacgggaaggacttccgaattaaacagtgcacaactgtaaacttagaggatttagtggttgcccatcatgagatgggccatattcagtactttatgcagtacaaggacctccctgtcgcacttcgcgagggcgctaacccaggatttcatgaagcgatcggcgacgtcttggccctcagtgtgtccacacccaagcacctccatagcctgaatctgctgagctctgaaggggggtcagatgagcacgatattaatttcttaatgaagatggcacttgacaagattgcttttataccattcagctatctcgtggaccaatggcgatggcgagtctttgatgggagcataaccaaagagaactataatcaggaatggtggagcctacggctcaagtatcagggcctgtgtcctcccgtgccccggacccagggtgatttcgatccgggggcaaagttccacattcccagctcagtgccctatatccgctactttgttagtttcataatccagttccaatttcacgaagccttgtgccaggccgctggccacacaggcccactacataagtgcgacatctatcagagcaaagaagccggacagcggctcgccactgcaatgaagctgggattttcaaggccttggcccgaggctatgcaactgatcacagggcagccaaatatgagcgcctccgccatgctgtcttacttcaaacctctgctcgactggctcaggactgagaatgagctccatggcgaaaagctcggatggccgcagtacaattggactccaaactcagctagaagtgaaggtccgctccctgactctggccgggtgagcttcctggggctcgatctggacgcccagcaggcgcgggtagggcagtggctgttgctgtttctaggcatagctttactggtggctacactgggtttgtctcaaagactcttctctattcggcaccggtcactgcataggcactcacacggcccacagtttgggagcgaagtggaactaaggcactcttag

SEQ ID NO: 15675 - DNA, 3438 bp, Artificial Sequence
  derived and/or modified sequence
atgggcgccgccagcggccggcggggccccggcctgctgctgccccttcctctgttactgctgctgcctccgcagccagccctagcacttgatcctgggctccagccgggcaatttcagcgccgatgaagcaggcgcccaattgtttgcccagtcctataattccagcgcagaacaggtattattccaaagcgtcgctgcttcttgggctcatgacaccaacataactgccgagaacgctaggagacaggaggaggcagcactcctgagccaagagttcgctgaggcatggggccagaaagccaaggaattgtacgaacctatctggcaaaacttcacagacccacaactcagaagaattataggtgccgtgcggactctcggttccgcaaatctgcccctggcaaagcgccagcagtataatgcccttctctctaacatgagtcggatttacagcactgccaaggtttgcttgccaaataaaactgctacatgttggagccttgacccggatctgactaacattttggccagctcgagatcttacgcaatgctgctctttgcctgggaaggctggcacaatgctgccgggattcctttaaagcctttatacgaagacttcactgccctttcaaacgaggcttataagcaggacggcttcacggacacaggcgcgtattggaggtcatggtacaactccccaacctttgaagacgatctggaacacttgtatcagcaactggagcccctctacttgaacctccacgccttcgtgagacgtgcattacaccgaaggtatggggacagatacatcaacctcagaggccctataccggctcacctactgggagacatgtgggctcaatcttgggaaaacatctatgacatggtggttccctttcccgataaaccaaacctagatgtgaccagcaccatgttacagcaagggtggaacgccacacacatgttccgggtcgctgaagaattctttacaagcttagaactatctcccatgccacctgaattctgggagggatcgatgctggagaagcccgctgacggtcgcgaagtggtctgccacgcaagcgcttgggacttctataaccgcaaagatttccgaatcaagcaatgtacccgtgtgactatggatcagctgagcacagtgcaccacgaaatgggtcatattcagtactacctgcaatataaggacttgcctgtgtccttaagacgtggagcaaatcccggcttccatgaggcaattggagacgtccttgccctctccgtcagcacacctgaacacctacacaaaatcggactgctggaccgtgtaacaaacgacacagaatctgacattaattacctgcttaaaatggccctggagaaaatcgccttcctacctttcggctatctggtcgaccagtggaggtggggcgtcttttctgggaggacaccaccatcacgttacaacttcgactggtggtacctcagaacaaagtatcaaggtatttgtcccccagttactcggaacgagactcactttgatgccggcgcaaagtttcatgtgccgaatgtgaccccctatatacggtacttcgtgagctttgttctccaattccaatttcatgaagcgctttgtaaagaagccggctacgagggacccttacaccaatgtgacatttaccggagcaccaaagccggcgccaagctgagaaaggttctgcaggctggatcaagcagaccttggcaggaagtgctgaaagatatggtgggcctcgacgcccttgatgctcagccgctactaaagtacttccaacccgtgacacaatggcttcaggagcagaaccagcaaaacggggaggtgctgggttggcctgagtaccagtggcatcctcccctcccagataattacccagagggaatagatcttgtgacagacgaggcggaagcctcgaagttcgtagaggaatatgaccgaacttcccaggtggtatggaatgagtatgccgaggcaaactggaactacaatactaacatcactacagagactagcaaaattctgcttcagaaaaatatgcaaatcgccaatcacaccctgaagtatggcactcaagcgcggaagttcgatgtgaaccagctccaaaacactacaatcaagcgcatcattaagaaagtgcaggatcttgagagggccgccctgcccgcacaggagctggaggaatataataaaattcttctggacatggagacaacgtactccgtggctacagtgtgtcacccaaatgggtcctgtttacagctcgaacccgatctaactaacgtgatggcaacatcccggaagtatgaagacctcttgtgggcctgggaggggtggcgcgacaaagctggaagagccattttgcagttctatcctaaatacgtcgagctgatcaaccaggctgcgcgcttgaatgggtacgtcgatgccggcgactcctggagaagcatgtacgaaactccgtccctggagcaggatttagaaagactgtttcaggagctgcagcctctgtacttgaacctgcatgcatacgtgcgcagggccctgcaccgtcactacggcgcccagcatatcaacttggaaggccctatcccggcccacttattgggcaatatgtgggcgcagacatggtcaaacatttatgatcttgttgttccctttccaagcgcacctagcatggacaccacggaagccatgctaaaacaaggttggacgccacgccgcatgttcaaagaggccgatgattttttcacctcactcgggctgctgcccgtccctcctgagttctggaacaagtcgatgctggagaagcccacagatggtcgcgaggtagtctgccacgcgtcagcatgggatttttataacggaaaggactttcgtattaagcagtgtacaaccgtgaatctggaagatctagtagtcgcccatcatgaaatgggccacatccagtacttcatgcagtacaaagatctccccgtggcactccgggaaggcgcaaatccaggtttccatgaagcaataggtgacgtgttagccctctccgtgtccacccccaaacatctccattcactaaacttgctcagttccgaaggtgggagtgacgaacacgatatcaacttcctaatgaagatggcacttgataaaatagccttcataccatttagctacctcgtggaccagtggcggtggagggtgtttgatgggagcattaccaaagaaaattataaccaagagtggtggtctttgcgtctgaaatatcaggggttgtgccccccagtgccgcgcacacagggtgactttgaccccggagcgaaatttcacattcccagctccgtgccctacatccggtatttcgtatctttcatcattcagtttcatccattcagtcagcataccgctgcctag

SEQ ID NO: 15676 - DNA, 1428 bp, Artificial Sequence
  derived and/or modified sequence
atgggcgccgccagcggccggcggggccccggcctgctgctgcccttgcctttactcctgcttctgcctcctcagccagccctggccctggatcctggcctgcagccaggaaattttagtgcagatgaggctggggcccagctcttcgcccagtcatacaattcatctgccgagcaggtgttatttcagtccgtggcagcctcttgggctcatgataccaatatcacggcagagaatgccaggaggcaggaagaggccgccttattatcccaagaatttgccgaagcctggggacagaaggccaaggagctgtatgagcctatatggcaaaattttaccgatcctcagctacggcgcattatcggggcagtgcgaacactgggctcagccaacttacctctggctaagaggcagcagtataacgctctcctgagcaacatgagtcggatctactccacagctaaagtgtgcctccccaataagacggccacatgttggtctctagatcccgacctgacaaatatcctggcatcttcccgctcttatgctatgcttctcttcgcctgggagggctggcataacgctgcaggtataccactgaagccgctttacgaggacttcaccgcactgagcaacgaagcctataagcaggatggattcacagacaccggtgcctattggaggtcctggtataactcccctacatttgaagatgatctggagcatctctaccagcaacttgagcccctctacttgaacttgcatgcattcgtgagacgcgcacttcataggagatatggcgaccggtatataaatcttcggggaccgatccctgcccacctcctaggcgacatgtgggctcagagttgggaaaatatatacgacatggtggtgccgttccccgataaacccaatttagatgtaacttcaactatgctacaacagggctggaatgccacccacatgttccgcgtcgccgaagagtttttcacgtctctggaactttcaccaatgccccccgaattctgggagggtagcatgttagaaaagcctgcagacggcagggaagtggtgtgtcacgcctctgcctgggacttttacaacagaaaagacttccgcattaaacaatgcaccagagtgacgatggaccagctgtcaacagtgcaccacgagatgggtcacattcagtattacttgcagtacaaagaccttccagtctcactgcgtcgaggagcgaaccccgggttccacgaggcaattggggacgtactggcattatcagtgtctacaccagagcacttgcacaagataggccttctcgacagagtcaccaatgacactgagccctccattcgtggctcagtcctgcttctccccgaaaccaagcctacccttatgctggagctgagctttatgtttcagatgtag

SEQ ID NO: 15677 - DNA, 4022 bp, Artificial Sequence
  derived and/or modified sequence
gagccgagcaccgcgcaccgcgtcatgggggccgcctcgggccgccgggggccggggctgctgctgccgctgccgctgctgttgctgctgccgccgcagcccgccctggcgttggaccccgggctgcagcccggcaacttttctgctgacgaggccggggcgcagctcttcgcgcagagctacaactccagcgccgaacaggtgctgttccagagcgtggccgccagctgggcgcacgacaccaacatcaccgcggagaatgcaaggcgccaggaggaagcagccctgctcagccaggagtttgcggaggcctggggccagaaggccaaggagctgtatgaaccgatctggcagaacttcacggacccgcagctgcgcaggatcatcggagctgtgcgcaccctgggctctgccaacctgcccctggctaagcggcagcagtacaacgccctgctaagcaacatgagcaggatctactccaccgccaaggtctgcctccccaacaagactgccacctgctggtccctggacccagatctcaccaacatcctggcttcctcgcgaagctacgccatgctcctgtttgcctgggagggctggcacaacgctgcgggcatcccgctgaaaccgctgtacgaggatttcactgccctcagcaatgaagcctacaagcaggacggcttcacagacacgggggcctactggcgctcctggtacaactcccccaccttcgaggacgatctggaacacctctaccaacagctagagcccctctacctgaacctccatgccttcgtccgccgcgcactgcatcgccgatacggagacagatacatcaacctcaggggacccatccctgctcatctgctgggagacatgtgggcccagagctgggaaaacatctacgacatggtggtgcctttcccagacaagcccaacctcgatgtcaccagtactatgctgcagcagggctggaacgccacgcacatgttccgggtggcagaggagttcttcacctccctggagctctcccccatgcctcccgagttctgggaagggtcgatgctggagaagccggccgacgggcgggaagtggtgtgccacgcctcggcttgggacttctacaacaggaaagacttcaggatcaagcagtgcacacgggtcacgatggaccagctctccacagtgcaccatgagatgggccatatacagtactacctgcagtacaaggatctgcccgtctccctgcgtcggggggccaaccccggcttccatgaggccattggggacgtgctggcgctctcggtctccactcctgaacatctgcacaaaatcggcctgctggaccgtgtcaccaatgacacggaaagtgacatcaattacttgctaaaaatggcactggaaaaaattgccttcctgccctttggctacttggtggaccagtggcgctggggggtctttagtgggcgtacccccccttcccgctacaacttcgactggtggtatcttcgaaccaagtatcaggggatctgtcctcctgttacccgaaacgaaacccactttgatgctggagctaagtttcatgttccaaatgtgacaccatacatcaggtactttgtgagttttgtcctgcagttccagttccatgaagccctgtgcaaggaggcaggctatgagggcccactgcaccagtgtgacatctaccggtccaccaaggcaggggccaagctccggaaggtgctgcaggctggctcctccaggccctggcaggaggtgctgaaggacatggtcggcttagatgccctggatgcccagccgctgctcaagtacttccagccagtcacccagtggctgcaggagcagaaccagcagaacggcgaggtcctgggctggcccgagtaccagtggcacccgccgttgcctgacaactacccggagggcatagacctggtgactgatgaggctgaggccagcaagtttgtggaggaatatgaccggacatcccaggtggtgtggaacgagtatgccgaggccaactggaactacaacaccaacatcaccacagagaccagcaagattctgctgcagaagaacatgcaaatagccaaccacaccctgaagtacggcacccaggccaggaagtttgatgtgaaccagttgcagaacaccactatcaagcggatcataaagaaggttcaggacctagaacgggcagcactgcctgcccaggagctggaggagtacaacaagatcctgttggatatggaaaccacctacagcgtggccactgtgtgccacccgaatggcagctgcctgcagctcgagccagatctgacgaatgtgatggccacgtcccggaaatatgaagacctgttatgggcatgggagggctggcgagacaaggcggggagagccatcctccagttttacccgaaatacgtggaactcatcaaccaggctgcccggctcaatggctatgtagatgcaggggactcgtggaggtctatgtacgagacaccatccctggagcaagacctggagcggctcttccaggagctgcagccactctacctcaacctgcatgcctacgtgcgccgggccctgcaccgtcactacggggcccagcacatcaacctggaggggcccattcctgctcacctgctggggaacatgtgggcgcagacctggtccaacatctatgacttggtggtgcccttcccttcagccccctcgatggacaccacagaggctatgctaaagcagggctggacgcccaggaggatgtttaaggaggctgatgatttcttcacctccctggggctgctgcccgtgcctcctgagttctggaacaagtcgatgctggagaagccaaccgacgggcgggaggtggtctgccacgcctcggcctgggacttctacaacggcaaggacttccggatcaagcagtgcaccaccgtgaacttggaggacctggtggtggcccaccacgaaatgggccacatccagtatttcatgcagtacaaagacttacctgtggccttgagggagggtgccaaccccggcttccatgaggccattggggacgtgctagccctctcagtgtctacgcccaagcacctgcacagtctcaacctgctgagcagtgagggtggcagcgacgagcatgacatcaactttctgatgaagatggcccttgacaagatcgcctttatccccttcagctacctcgtcgatcagtggcgctggagggtatttgatggaagcatcaccaaggagaactataaccaggagtggtggagcctcaggctgaagtaccagggcctctgccccccagtgcccaggactcaaggtgactttgacccaggggccaagttccacattccttctagcgtgccttacatcaggtactttgtcagcttcatcatccagttccagttccacgaggcactgtgccaggcagctggccacacgggccccctgcacaagtgtgacatctaccagtccaaggaggccgggcagcgcctggcgaccgccatgaagctgggcttcagtaggccgtggccggaagccatgcagctgatcacgggccagcccaacatgagcgcctcggccatgttgagctacttcaagccgctgctggactggctccgcacggagaacgagctgcatggggagaagctgggctggccgcagtacaactggacgccgaactccgctcgctcagaagggcccctcccagacagcggccgcgtcagcttcctgggcctggacctggatgcgcagcaggcccgcgtgggccagtggctgctgctcttcctgggcatcgccctgctggtagccaccctgggcctcagccagcggctcttcagcatccgccaccgcagcctccaccggcactcccacgggccccagttcggctccgaggtggagctgagacactcctgaggtgacccggctgggtcggccctgcccaagggcctcccaccagagactgggatgggaacactggtgggcagctgagg

SEQ ID NO: 15678 - DNA, 3460 bp, Artificial Sequence
  derived and/or modified sequence
gccgagcaccgcgcaccgcgtcatgggggccgcctcgggccgccgggggccggggctgctgctgccgctgccgctgctgttgctgctgccgccgcagcccgccctggcgttggaccccgggctgcagcccggcaacttttctgctgacgaggccggggcgcagctcttcgcgcagagctacaactccagcgccgaacaggtgctgttccagagcgtggccgccagctgggcgcacgacaccaacatcaccgcggagaatgcaaggcgccaggaggaagcagccctgctcagccaggagtttgcggaggcctggggccagaaggccaaggagctgtatgaaccgatctggcagaacttcacggacccgcagctgcgcaggatcatcggagctgtgcgcaccctgggctctgccaacctgcccctggctaagcggcagcagtacaacgccctgctaagcaacatgagcaggatctactccaccgccaaggtctgcctccccaacaagactgccacctgctggtccctggacccagatctcaccaacatcctggcttcctcgcgaagctacgccatgctcctgtttgcctgggagggctggcacaacgctgcgggcatcccgctgaaaccgctgtacgaggatttcactgccctcagcaatgaagcctacaagcaggacggcttcacagacacgggggcctactggcgctcctggtacaactcccccaccttcgaggacgatctggaacacctctaccaacagctagagcccctctacctgaacctccatgccttcgtccgccgcgcactgcatcgccgatacggagacagatacatcaacctcaggggacccatccctgctcatctgctgggagacatgtgggcccagagctgggaaaacatctacgacatggtggtgcctttcccagacaagcccaacctcgatgtcaccagtactatgctgcagcagggctggaacgccacgcacatgttccgggtggcagaggagttcttcacctccctggagctctcccccatgcctcccgagttctgggaagggtcgatgctggagaagccggccgacgggcgggaagtggtgtgccacgcctcggcttgggacttctacaacaggaaagacttcaggatcaagcagtgcacacgggtcacgatggaccagctctccacagtgcaccatgagatgggccatatacagtactacctgcagtacaaggatctgcccgtctccctgcgtcggggggccaaccccggcttccatgaggccattggggacgtgctggcgctctcggtctccactcctgaacatctgcacaaaatcggcctgctggaccgtgtcaccaatgacacggaaagtgacatcaattacttgctaaaaatggcactggaaaaaattgccttcctgccctttggctacttggtggaccagtggcgctggggggtctttagtgggcgtacccccccttcccgctacaacttcgactggtggtatcttcgaaccaagtatcaggggatctgtcctcctgttacccgaaacgaaacccactttgatgctggagctaagtttcatgttccaaatgtgacaccatacatcaggtactttgtgagttttgtcctgcagttccagttccatgaagccctgtgcaaggaggcaggctatgagggcccactgcaccagtgtgacatctaccggtccaccaaggcaggggccaagctccggaaggtgctgcaggctggctcctccaggccctggcaggaggtgctgaaggacatggtcggcttagatgccctggatgcccagccgctgctcaagtacttccagccagtcacccagtggctgcaggagcagaaccagcagaacggcgaggtcctgggctggcccgagtaccagtggcacccgccgttgcctgacaactacccggagggcatagacctggtgactgatgaggctgaggccagcaagtttgtggaggaatatgaccggacatcccaggtggtgtggaacgagtatgccgaggccaactggaactacaacaccaacatcaccacagagaccagcaagattctgctgcagaagaacatgcaaatagccaaccacaccctgaagtacggcacccaggccaggaagtttgatgtgaaccagttgcagaacaccactatcaagcggatcataaagaaggttcaggacctagaacgggcagcactgcctgcccaggagctggaggagtacaacaagatcctgttggatatggaaaccacctacagcgtggccactgtgtgccacccgaatggcagctgcctgcagctcgagccagatctgacgaatgtgatggccacgtcccggaaatatgaagacctgttatgggcatgggagggctggcgagacaaggcggggagagccatcctccagttttacccgaaatacgtggaactcatcaaccaggctgcccggctcaatggctatgtagatgcaggggactcgtggaggtctatgtacgagacaccatccctggagcaagacctggagcggctcttccaggagctgcagccactctacctcaacctgcatgcctacgtgcgccgggccctgcaccgtcactacggggcccagcacatcaacctggaggggcccattcctgctcacctgctggggaacatgtgggcgcagacctggtccaacatctatgacttggtggtgcccttcccttcagccccctcgatggacaccacagaggctatgctaaagcagggctggacgcccaggaggatgtttaaggaggctgatgatttcttcacctccctggggctgctgcccgtgcctcctgagttctggaacaagtcgatgctggagaagccaaccgacgggcgggaggtggtctgccacgcctcggcctgggacttctacaacggcaaggacttccggatcaagcagtgcaccaccgtgaacttggaggacctggtggtggcccaccacgaaatgggccacatccagtatttcatgcagtacaaagacttacctgtggccttgagggagggtgccaaccccggcttccatgaggccattggggacgtgctagccctctcagtgtctacgcccaagcacctgcacagtctcaacctgctgagcagtgagggtggcagcgacgagcatgacatcaactttctgatgaagatggcccttgacaagatcgcctttatccccttcagctacctcgtcgatcagtggcgctggagggtatttgatggaagcatcaccaaggagaactataaccaggagtggtggagcctcaggctgaagtaccagggcctctgccccccagtgcccaggactcaaggtgactttgacccaggggccaagttccacattccttctagcgtgccttacatcaggtactttgtcagcttcatcatccagttccaccccttctcccagcacacggctgcctga

SEQ ID NO: 15679 - DNA, 1478 bp, Artificial Sequence
  derived and/or modified sequence
agaaggggcagagccgagcaccgcgcaccgcgtcatgggggccgcctcgggccgccgggggccggggctgctgctgccgctgccgctgctgttgctgctgccgccgcagcccgccctggcgttggaccccgggctgcagcccggcaacttttctgctgacgaggccggggcgcagctcttcgcgcagagctacaactccagcgccgaacaggtgctgttccagagcgtggccgccagctgggcgcacgacaccaacatcaccgcggagaatgcaaggcgccaggaggaagcagccctgctcagccaggagtttgcggaggcctggggccagaaggccaaggagctgtatgaaccgatctggcagaacttcacggacccgcagctgcgcaggatcatcggagctgtgcgcaccctgggctctgccaacctgcccctggctaagcggcagcagtacaacgccctgctaagcaacatgagcaggatctactccaccgccaaggtctgcctccccaacaagactgccacctgctggtccctggacccagatctcaccaacatcctggcttcctcgcgaagctacgccatgctcctgtttgcctgggagggctggcacaacgctgcgggcatcccgctgaaaccgctgtacgaggatttcactgccctcagcaatgaagcctacaagcaggacggcttcacagacacgggggcctactggcgctcctggtacaactcccccaccttcgaggacgatctggaacacctctaccaacagctagagcccctctacctgaacctccatgccttcgtccgccgcgcactgcatcgccgatacggagacagatacatcaacctcaggggacccatccctgctcatctgctgggagacatgtgggcccagagctgggaaaacatctacgacatggtggtgcctttcccagacaagcccaacctcgatgtcaccagtactatgctgcagcagggctggaacgccacgcacatgttccgggtggcagaggagttcttcacctccctggagctctcccccatgcctcccgagttctgggaagggtcgatgctggagaagccggccgacgggcgggaagtggtgtgccacgcctcggcttgggacttctacaacaggaaagacttcaggatcaagcagtgcacacgggtcacgatggaccagctctccacagtgcaccatgagatgggccatatacagtactacctgcagtacaaggatctgcccgtctccctgcgtcggggggccaaccccggcttccatgaggccattggggacgtgctggcgctctcggtctccactcctgaacatctgcacaaaatcggcctgctggaccgtgtcaccaatgacacggaaccaagtatcaggggatctgtcctcctgttacccgaaacgaaacccactttgatgctggagctaagtttcatgttccaaatgtgacaccatacatcaggta

SEQ ID NO: 15680 - DNA, 3921 bp, Artificial Sequence
  derived and/or modified sequence
atgggcgctgcatctggaaggaggggtcctgggttgctcctgccattgccgctgctcttactgctgcctccccagccagccttggcgctggacccaggcctgcagccaggtaacttcagcgcagatgaggcgggagctcagctgtttgcacagtcttacaattcatccgctgagcaggtgttgtttcagtctgtagcggcaagctgggcccatgacacaaatattactgccgagaacgccaggaggcaggaggaggccgcactcctgtcccaggaatttgcagaagcttgggggcaaaaggcaaaagagctgtacgagccgatttggcagaatttcacagaccctcagttgcgcaggattatcggtgccgtacgcactcttggaagcgccaacctgccactggcaaagagacaacagtacaatgcccttctgagtaacatgtctcgaatttacagcactgccaaagtgtgtctgccaaacaaaaccgctacatgttggtccctggaccctgatttaaccaacattttagcctccagtcgatcctatgctatgctccttttcgcgtgggagggctggcacaatgccgctggcatccctctcaagcctctgtatgaggatttcactgcgttaagcaacgaagcatacaaacaagatggctttacagacaccggggcttactggaggtcttggtacaactcacctacttttgaggatgaccttgagcatctgtaccagcagctggaacccctctacctgaacctgcatgccttcgtcaggagagctctgcacaggcgatatggggacagatacatcaacctgcggggacccatccccgcacatcttctcggtgatatgtgggctcagtcctgggagaacatttatgacatggttgttccattccctgacaaacctaaccttgacgtcacctctacaatgctccagcagggctggaacgcaacacacatgttcagggtggccgaggagttcttcacatctttggaactgtcccccatgccgcctgaattctgggagggtagcatgcttgagaaacccgctgacggtcgggaggtcgtgtgtcacgccagcgcgtgggatttttacaaccgaaaagatttccgaattaaacagtgcactcgagtgacaatggatcagctgtccactgttcatcatgagatgggtcacatccaatattatctgcagtataaagacctccccgtgagtctccgacggggtgcgaatcccggattccatgaggccattggggacgtgctggcccttagtgtgagtaccccagagcacctgcataaaattggcttactcgaccgggtgacgaacgataccgagtcagatattaactacctcctgaagatggctcttgaaaaaattgccttcctgccatttggatacctggtggatcagtggaggtggggcgttttcagcggcaggacaccacctagccgatataactttgactggtggtacctcagaacaaagtatcagggaatttgcccccctgtgacacgaaatgaaacccattttgatgcgggagcaaagttccatgttccaaacgtgactccctacatcaggtactttgtttccttcgttctgcagttccagtttcacgaagccctgtgtaaagaggctggatatgagggaccacttcaccagtgcgacatctacagaagcacgaaggctggtgccaaactgaggaaagttctacaagcagggtcgtctcggccatggcaagaagttcttaaagacatggtggggctggatgccttggacgcccagcccctgttaaagtattttcagcccgtgactcagtggctgcaggagcagaaccagcaaaacggtgaagttctcggctggccagaataccaatggcaccccccactgcctgataattaccctgaggggatagacctcgttacagatgaagcagaggcttccaagtttgtcgaagagtacgatagaacatcgcaagttgtctggaacgagtacgctgaagctaactggaactacaacaccaatattaccacagagaccagcaaaattttactgcagaagaacatgcagattgcaaaccacactttgaagtacgggactcaggcgagaaagtttgatgtgaaccaacttcaaaatacgacaataaagcgaattatcaaaaaggtacaagatttagaacgcgcagctctccctgcacaagaacttgaggagtacaataagatcctactggatatggagacgacatacagtgtggccactgtctgccatccaaatgggagctgccttcagctggaacctgacctcacaaacgtcatggctaccagtagaaagtacgaggacctgttgtgggcctgggaggggtggcgggacaaagcaggacgtgccatactgcagttttaccccaaatacgtggaactcatcaaccaggcagcacggctcaatgggtatgtagacgctggtgactcttggagatccatgtatgaaactccttccctggaacaggaccttgagagactgttccaagagctgcagccactgtacttgaacctgcacgcctatgtacggagagccctccatcgccactatggtgcacagcatattaacctggaggggcctataccggcacatttgctaggcaacatgtgggctcagacatggagcaacatctacgatctggtggtgcctttcccttccgcgcctagtatggataccaccgaggcaatgttaaagcagggatggacccctaggagaatgttcaaagaggctgatgactttttcactagccttggccttcttcccgtgcccccagagttctggaataaatctatgctggaaaaacctactgatggaagggaggtggtgtgccacgcctccgcttgggatttttataatgggaaggacttccgcatcaaacagtgcactacagtaaaccttgaagacctggtcgtcgcccaccacgaaatgggacatattcagtattttatgcagtacaaagatctgcccgtggctctacgtgaaggagctaacccgggatttcatgaagcgatcggtgatgtgctggccctctccgtgagcaccccgaagcatttgcactctctgaacctgctgtcttcggagggtgggtcagatgaacatgacataaacttcctgatgaagatggccctcgacaagatcgccttcataccatttagctacctcgtggatcagtggagatggcgagttttcgacggatccattacaaaagaaaattacaaccaggagtggtggtccttaagactaaaatatcagggcctatgcccccctgtcccacggacccagggggacttcgacccaggagccaagttccacatccccagctcggttccttacattagatattttgtgtcctttattattcagttccagttccatgaagccctttgtcaggccgctggccacactggacctctgcacaagtgtgacatctatcagagcaaggaagccggacagcggctagctacggccatgaagttagggttctcaagaccctggcccgaggctatgcagctgataacaggacagccaaatatgagcgcaagcgcaatgctgagctactttaaaccgctgttggactggctgcgtaccgaaaacgaattgcatggtgagaaactgggatggccccaatataactggactcctaactctgctcggtcagagggacccttgccggatagcgggagggtgtcgttcctgggcctggacctcgatgcacaacaggcaagagtgggacagtggttactcctcttcctgggaatcgctctgctggtggctacccttggcctgtcccagcggctgttttctataaggcaccgctctttgcacaggcatagtcatggaccccagtttggctctgaggtggagcttaggcactcttag

SEQ ID NO: 15681 - DNA, 3438 bp, Artificial Sequence
  derived and/or modified sequence
atgggcgctgcctccggcagacggggacccggactgttgttaccactgcctctgctcctgctcctgccacctcagcctgcccttgccctggatcccggattgcagcccggaaatttcagcgccgatgaggccggagcgcagctgttcgcccagtcgtacaattccagcgccgagcaggtactatttcagtcagtagctgcctcatgggcacacgataccaacatcaccgcggaaaatgctaggcgccaggaggaggccgctctactttcccaggagttcgccgaggcgtggggacagaaagcaaaggaactgtacgaaccaatatggcaaaacttcaccgacccgcaactgagaagaatcatcggcgcagttaggaccctgggaagtgctaacttacctttagcgaagcggcagcagtataacgccctcctgtccaatatgtcaagaatatacagcaccgccaaagtgtgccttcccaacaagacagcaacctgctggagtttagacccggatctgacaaatatccttgcttcatcccgatcctacgcgatgttactcttcgcttgggagggatggcataatgctgccggaattcccctgaaacctctctacgaggacttcactgccctaagcaatgaagcatataaacaggatggcttcactgataccggcgcttactggaggagctggtacaattcccctaccttcgaggacgatctcgagcatttgtatcagcaattggagcctctttacttaaatctgcatgcttttgtgcggagagccctacacagaagatacggggatcggtatatcaacctgaggggaccgatcccagcccacctcctgggcgatatgtgggcccaatcctgggaaaacatttatgacatggtggtgccttttcccgacaaacctaatctcgacgtcaccagcacaatgctgcagcagggatggaatgcgactcatatgttccgggtggctgaagagttctttacaagtctcgagctcagccctatgccccctgagttctgggaggggtccatgttggaaaagcccgctgacggaagagaggtcgtgtgtcatgcatcggcatgggacttctacaacagaaaagacttccggatcaagcagtgcacaagggtaaccatggaccagttgtcaacggtacaccatgaaatggggcacatccagtactatcttcagtacaaagatttaccggtgagtttgcgcaggggggcaaatcccggatttcacgaagccattggggatgtgcttgcgctatcagtttccacccctgaacacctgcataaaatcggactgctggatagggttaccaacgacacggagtcagacattaattatttgctcaaaatggcattggagaagatagcctttctacccttcggatacctggtggaccaatggcgctggggcgtattttccggccgtacgcccccatctcggtacaacttcgattggtggtacttgcgtactaagtaccagggcatctgccccccagtgacacggaatgagacccacttcgatgcaggagctaagttccacgtcccaaatgttacaccatatattcggtacttcgtatccttcgttctacagttccagttccacgaagcgctgtgcaaggaggctggctacgagggaccacttcatcaatgcgatatatatcgaagtacaaaagccggagccaagcttcgcaaagtcctgcaggccggaagcagtcggccttggcaagaagttctcaaagatatggtgggcctcgatgcactcgacgcccagccattattaaagtacttccagcctgttacccaatggttgcaggagcagaaccagcagaatggggaggttttggggtggcctgagtatcagtggcatcctcctctaccggacaattaccccgagggcattgaccttgtgaccgatgaagccgaggcctcaaagttcgtggaagagtacgaccgaacctcccaggtggtttggaacgagtatgccgaagcgaattggaattacaacactaatattaccacagaaacatccaagatacttctccagaagaatatgcagatcgccaatcacactctgaagtatggcacacaggcccgaaagtttgacgtgaatcaactccaaaacacgacaattaagaggatcatcaagaaggtccaagatctcgaacgggcagccttgcctgctcaagaacttgaggaatacaacaaaattctgcttgatatggaaaccacctatagcgttgccacagtatgccacccaaatggtagttgcctacaactggagccagacttgaccaatgtaatggctactagtagaaaatatgaagacctcctgtgggcttgggaaggctggagggacaaggccggaagggctatcctgcagttctaccctaaatacgttgaattaatcaaccaggccgctcgcttgaatgggtatgtggacgccggagattcctggcggtcaatgtatgaaacaccttctctggaacaggacctcgagcgtctctttcaggagctgcaacccctgtatctgaacttacacgcctacgtgaggcgcgctctgcacagacactacggcgctcagcatattaacttagaaggccctattcctgcccatttgctcggtaacatgtgggctcagacctggagcaatatctacgatttagtcgtgcccttcccttcagcaccatctatggacaccacggaggcaatgctcaagcaaggctggaccccacgcaggatgtttaaggaagctgacgacttctttacgtcacttggactgctgcctgtgcctccagaattctggaacaagtcaatgctggaaaaacccacagatgggcgtgaggtcgtgtgtcacgcctccgcttgggacttttacaacggaaaagacttcaggatcaaacagtgcacaaccgtgaatcttgaggacttggtcgtggcacaccacgaaatgggacacattcagtacttcatgcagtataaggatcttccagttgccctccgagagggcgcaaatccagggtttcatgaggctattggggacgttctcgctctctctgtgtctacacccaagcacctccactctctgaatctgttgtcctcagaggggggttccgatgagcatgacattaattttctcatgaagatggcactggacaagattgcctttatcccattctcctacctggttgaccagtggcgatggagggttttcgacgggagcattaccaaagaaaactacaatcaggagtggtggagcttgcgcttaaagtatcagggtctatgcccccctgtcccgaggactcaaggcgactttgaccctggggcaaagttccatattccctcatccgtaccttacatcagatactttgtgtctttcatcatccagttccatcccttctcccagcacacggctgcatag

SEQ ID NO: 15682 - DNA, 1428 bp, Artificial Sequence
  derived and/or modified sequence
atgggggctgcttctgggaggcggggtccgggtttattactcccgctgcctctgcttttgttactccctccacagccagcactcgctctggatccaggcctgcaacccggtaacttctcagcagatgaggctggtgcacagctgtttgcacagagctacaattcttccgctgagcaggtgctgttccaatccgtggcagcttcctgggcgcacgataccaacataactgctgaaaatgctcggcgacaagaggaagccgcacttctcagccaggaatttgctgaagcatgggggcaaaaggccaaggaactatacgagcctatttggcagaacttcactgacccacagttacgaaggattattggagcagtccggaccctgggcagcgccaacctgcctcttgcaaaacgccaacagtataatgccctcctgtctaatatgtctcggatttactccactgccaaggtatgtctgcctaataaaacagcgacctgttggtccctggacccagatctaaccaacatactggcttcttctaggtcatatgcaatgctgttgtttgcttgggaaggttggcacaatgctgccggaattccactcaagccgctgtacgaggatttcacggccttgagcaatgaggcctataagcaggatggattcacagacacaggcgcttattggagatcctggtacaactcccctactttcgaggacgatctcgaacacctctaccagcagttagaaccgctgtacttaaacttgcatgcattcgtccggcgagcgttgcacaggaggtacggcgaccgctacatcaacctgcgtggcccaattccagcccatctgcttggcgacatgtgggcccagtcatgggagaatatttatgacatggtggtccccttccctgacaaaccaaacctcgatgtgacatcaactatgctgcagcagggctggaacgctactcatatgtttcgcgtggcagaggaattctttacgtcattagaactgagccccatgcctcccgaattctgggaaggatctatgctggaaaagcccgctgatggaagggaagttgtctgtcacgctagtgcctgggacttctataatagaaaggatttccgtataaaacagtgcacaagagtcacaatggatcagctgtcaacggtgcatcatgaaatgggtcatatccagtattatctgcaatacaaagatcttcctgtgagcttacgcagaggtgccaacccgggattccatgaggccatcggcgatgtgctggccctaagcgtaagtacacccgaacacctgcacaagatcggattactggatcgcgtcacgaatgacaccgagccatcgatccgcggttccgtgctgcttctgcccgagacaaaacctacacttatgcttgagttatcattcatgttccagatgtag

SEQ ID NO: 15683 - DNA, 3921 bp, Artificial Sequence
  derived and/or modified sequence
atgggcgccgccagcggcagaagaggccccggcctgctgctgcccctgcccctgctgctgctgctgcccccccagcccgccctggccctggaccccggcctgcagcccggcaacttcagcgccgacgaggccggcgcccagctgttcgcccagagctacaacagcagcgccgagcaggtgctgttccagagcgtggccgccagctgggcccacgacaccaacatcaccgccgagaacgccagaagacaggaggaggccgccctgctgagccaggagttcgccgaggcctggggccagaaggccaaggagctgtacgagcccatctggcagaacttcaccgacccccagctgagaagaatcatcggcgccgtgagaaccctgggcagcgccaacctgcccctggccaagagacagcagtacaacgccctgctgagcaacatgagcagaatctacagcaccgccaaggtgtgcctgcccaacaagaccgccacctgctggagcctggaccccgacctgaccaacatcctggccagcagcagaagctacgccatgctgctgttcgcctgggagggctggcacaacgccgccggcatccccctgaagcccctgtacgaggacttcaccgccctgagcaacgaggcctacaagcaggacggcttcaccgacaccggcgcctactggagaagctggtacaacagccccaccttcgaggacgacctggagcacctgtaccagcagctggagcccctgtacctgaacctgcacgccttcgtgagaagagccctgcacagaagatacggcgacagatacatcaacctgagaggccccatccccgcccacctgctgggcgacatgtgggcccagagctgggagaacatctacgacatggtggtgcccttccccgacaagcccaacctggacgtgaccagcaccatgctgcagcagggctggaacgccacccacatgttcagagtggccgaggagttcttcaccagcctggagctgagccccatgccccccgagttctgggagggcagcatgctggagaagcccgccgacggcagagaggtggtgtgccacgccagcgcctgggacttctacaacagaaaggacttcagaatcaagcagtgcaccagagtgaccatggaccagctgagcaccgtgcaccacgagatgggccacatccagtactacctgcagtacaaggacctgcccgtgagcctgagaagaggcgccaaccccggcttccacgaggccatcggcgacgtgctggccctgagcgtgagcacccccgagcacctgcacaagatcggcctgctggacagagtgaccaacgacaccgagagcgacatcaactacctgctgaagatggccctggagaagatcgccttcctgcccttcggctacctggtggaccagtggagatggggcgtgttcagcggcagaaccccccccagcagatacaacttcgactggtggtacctgagaaccaagtaccagggcatctgcccccccgtgaccagaaacgagacccacttcgacgccggcgccaagttccacgtgcccaacgtgaccccctacatcagatacttcgtgagcttcgtgctgcagttccagttccacgaggccctgtgcaaggaggccggctacgagggccccctgcaccagtgcgacatctacagaagcaccaaggccggcgccaagctgagaaaggtgctgcaggccggcagcagcagaccctggcaggaggtgctgaaggacatggtgggcctggacgccctggacgcccagcccctgctgaagtacttccagcccgtgacccagtggctgcaggagcagaaccagcagaacggcgaggtgctgggctggcccgagtaccagtggcacccccccctgcccgacaactaccccgagggcatcgacctggtgaccgacgaggccgaggccagcaagttcgtggaggagtacgacagaaccagccaggtggtgtggaacgagtacgccgaggccaactggaactacaacaccaacatcaccaccgagaccagcaagatcctgctgcagaagaacatgcagatcgccaaccacaccctgaagtacggcacccaggccagaaagttcgacgtgaaccagctgcagaacaccaccatcaagagaatcatcaagaaggtgcaggacctggagagagccgccctgcccgcccaggagctggaggagtacaacaagatcctgctggacatggagaccacctacagcgtggccaccgtgtgccaccccaacggcagctgcctgcagctggagcccgacctgaccaacgtgatggccaccagcagaaagtacgaggacctgctgtgggcctgggagggctggagagacaaggccggcagagccatcctgcagttctaccccaagtacgtggagctgatcaaccaggccgccagactgaacggctacgtggacgccggcgacagctggagaagcatgtacgagacccccagcctggagcaggacctggagagactgttccaggagctgcagcccctgtacctgaacctgcacgcctacgtgagaagagccctgcacagacactacggcgcccagcacatcaacctggagggccccatccccgcccacctgctgggcaacatgtgggcccagacctggagcaacatctacgacctggtggtgcccttccccagcgcccccagcatggacaccaccgaggccatgctgaagcagggctggacccccagaagaatgttcaaggaggccgacgacttcttcaccagcctgggcctgctgcccgtgccccccgagttctggaacaagagcatgctggagaagcccaccgacggcagagaggtggtgtgccacgccagcgcctgggacttctacaacggcaaggacttcagaatcaagcagtgcaccaccgtgaacctggaggacctggtggtggcccaccacgagatgggccacatccagtacttcatgcagtacaaggacctgcccgtggccctgagagagggcgccaaccccggcttccacgaggccatcggcgacgtgctggccctgagcgtgagcacccccaagcacctgcacagcctgaacctgctgagcagcgagggcggcagcgacgagcacgacatcaacttcctgatgaagatggccctggacaagatcgccttcatccccttcagctacctggtggaccagtggagatggagagtgttcgacggcagcatcaccaaggagaactacaaccaggagtggtggagcctgagactgaagtaccagggcctgtgcccccccgtgcccagaacccagggcgacttcgaccccggcgccaagttccacatccccagcagcgtgccctacatcagatacttcgtgagcttcatcatccagttccagttccacgaggccctgtgccaggccgccggccacaccggccccctgcacaagtgcgacatctaccagagcaaggaggccggccagagactggccaccgccatgaagctgggcttcagcagaccctggcccgaggccatgcagctgatcaccggccagcccaacatgagcgccagcgccatgctgagctacttcaagcccctgctggactggctgagaaccgagaacgagctgcacggcgagaagctgggctggccccagtacaactggacccccaacagcgccagaagcgagggccccctgcccgacagcggcagagtgagcttcctgggcctggacctggacgcccagcaggccagagtgggccagtggctgctgctgttcctgggcatcgccctgctggtggccaccctgggcctgagccagagactgttcagcatcagacacagaagcctgcacagacacagccacggcccccagttcggcagcgaggtggagctgagacacagctag

SEQ ID NO: 15684 - DNA, 3438 bp, Artificial Sequence
  derived and/or modified sequence
atgggcgccgccagcggcagaagaggccccggcctgctgctgcccctgcccctgctgctgctgctgcccccccagcccgccctggccctggaccccggcctgcagcccggcaacttcagcgccgacgaggccggcgcccagctgttcgcccagagctacaacagcagcgccgagcaggtgctgttccagagcgtggccgccagctgggcccacgacaccaacatcaccgccgagaacgccagaagacaggaggaggccgccctgctgagccaggagttcgccgaggcctggggccagaaggccaaggagctgtacgagcccatctggcagaacttcaccgacccccagctgagaagaatcatcggcgccgtgagaaccctgggcagcgccaacctgcccctggccaagagacagcagtacaacgccctgctgagcaacatgagcagaatctacagcaccgccaaggtgtgcctgcccaacaagaccgccacctgctggagcctggaccccgacctgaccaacatcctggccagcagcagaagctacgccatgctgctgttcgcctgggagggctggcacaacgccgccggcatccccctgaagcccctgtacgaggacttcaccgccctgagcaacgaggcctacaagcaggacggcttcaccgacaccggcgcctactggagaagctggtacaacagccccaccttcgaggacgacctggagcacctgtaccagcagctggagcccctgtacctgaacctgcacgccttcgtgagaagagccctgcacagaagatacggcgacagatacatcaacctgagaggccccatccccgcccacctgctgggcgacatgtgggcccagagctgggagaacatctacgacatggtggtgcccttccccgacaagcccaacctggacgtgaccagcaccatgctgcagcagggctggaacgccacccacatgttcagagtggccgaggagttcttcaccagcctggagctgagccccatgccccccgagttctgggagggcagcatgctggagaagcccgccgacggcagagaggtggtgtgccacgccagcgcctgggacttctacaacagaaaggacttcagaatcaagcagtgcaccagagtgaccatggaccagctgagcaccgtgcaccacgagatgggccacatccagtactacctgcagtacaaggacctgcccgtgagcctgagaagaggcgccaaccccggcttccacgaggccatcggcgacgtgctggccctgagcgtgagcacccccgagcacctgcacaagatcggcctgctggacagagtgaccaacgacaccgagagcgacatcaactacctgctgaagatggccctggagaagatcgccttcctgcccttcggctacctggtggaccagtggagatggggcgtgttcagcggcagaaccccccccagcagatacaacttcgactggtggtacctgagaaccaagtaccagggcatctgcccccccgtgaccagaaacgagacccacttcgacgccggcgccaagttccacgtgcccaacgtgaccccctacatcagatacttcgtgagcttcgtgctgcagttccagttccacgaggccctgtgcaaggaggccggctacgagggccccctgcaccagtgcgacatctacagaagcaccaaggccggcgccaagctgagaaaggtgctgcaggccggcagcagcagaccctggcaggaggtgctgaaggacatggtgggcctggacgccctggacgcccagcccctgctgaagtacttccagcccgtgacccagtggctgcaggagcagaaccagcagaacggcgaggtgctgggctggcccgagtaccagtggcacccccccctgcccgacaactaccccgagggcatcgacctggtgaccgacgaggccgaggccagcaagttcgtggaggagtacgacagaaccagccaggtggtgtggaacgagtacgccgaggccaactggaactacaacaccaacatcaccaccgagaccagcaagatcctgctgcagaagaacatgcagatcgccaaccacaccctgaagtacggcacccaggccagaaagttcgacgtgaaccagctgcagaacaccaccatcaagagaatcatcaagaaggtgcaggacctggagagagccgccctgcccgcccaggagctggaggagtacaacaagatcctgctggacatggagaccacctacagcgtggccaccgtgtgccaccccaacggcagctgcctgcagctggagcccgacctgaccaacgtgatggccaccagcagaaagtacgaggacctgctgtgggcctgggagggctggagagacaaggccggcagagccatcctgcagttctaccccaagtacgtggagctgatcaaccaggccgccagactgaacggctacgtggacgccggcgacagctggagaagcatgtacgagacccccagcctggagcaggacctggagagactgttccaggagctgcagcccctgtacctgaacctgcacgcctacgtgagaagagccctgcacagacactacggcgcccagcacatcaacctggagggccccatccccgcccacctgctgggcaacatgtgggcccagacctggagcaacatctacgacctggtggtgcccttccccagcgcccccagcatggacaccaccgaggccatgctgaagcagggctggacccccagaagaatgttcaaggaggccgacgacttcttcaccagcctgggcctgctgcccgtgccccccgagttctggaacaagagcatgctggagaagcccaccgacggcagagaggtggtgtgccacgccagcgcctgggacttctacaacggcaaggacttcagaatcaagcagtgcaccaccgtgaacctggaggacctggtggtggcccaccacgagatgggccacatccagtacttcatgcagtacaaggacctgcccgtggccctgagagagggcgccaaccccggcttccacgaggccatcggcgacgtgctggccctgagcgtgagcacccccaagcacctgcacagcctgaacctgctgagcagcgagggcggcagcgacgagcacgacatcaacttcctgatgaagatggccctggacaagatcgccttcatccccttcagctacctggtggaccagtggagatggagagtgttcgacggcagcatcaccaaggagaactacaaccaggagtggtggagcctgagactgaagtaccagggcctgtgcccccccgtgcccagaacccagggcgacttcgaccccggcgccaagttccacatccccagcagcgtgccctacatcagatacttcgtgagcttcatcatccagttccaccccttcagccagcacaccgccgcctag

SEQ ID NO: 15685 - DNA, 1428 bp, Artificial Sequence
  derived and/or modified sequence
atgggcgccgccagcggcagaagaggccccggcctgctgctgcccctgcccctgctgctgctgctgcccccccagcccgccctggccctggaccccggcctgcagcccggcaacttcagcgccgacgaggccggcgcccagctgttcgcccagagctacaacagcagcgccgagcaggtgctgttccagagcgtggccgccagctgggcccacgacaccaacatcaccgccgagaacgccagaagacaggaggaggccgccctgctgagccaggagttcgccgaggcctggggccagaaggccaaggagctgtacgagcccatctggcagaacttcaccgacccccagctgagaagaatcatcggcgccgtgagaaccctgggcagcgccaacctgcccctggccaagagacagcagtacaacgccctgctgagcaacatgagcagaatctacagcaccgccaaggtgtgcctgcccaacaagaccgccacctgctggagcctggaccccgacctgaccaacatcctggccagcagcagaagctacgccatgctgctgttcgcctgggagggctggcacaacgccgccggcatccccctgaagcccctgtacgaggacttcaccgccctgagcaacgaggcctacaagcaggacggcttcaccgacaccggcgcctactggagaagctggtacaacagccccaccttcgaggacgacctggagcacctgtaccagcagctggagcccctgtacctgaacctgcacgccttcgtgagaagagccctgcacagaagatacggcgacagatacatcaacctgagaggccccatccccgcccacctgctgggcgacatgtgggcccagagctgggagaacatctacgacatggtggtgcccttccccgacaagcccaacctggacgtgaccagcaccatgctgcagcagggctggaacgccacccacatgttcagagtggccgaggagttcttcaccagcctggagctgagccccatgccccccgagttctgggagggcagcatgctggagaagcccgccgacggcagagaggtggtgtgccacgccagcgcctgggacttctacaacagaaaggacttcagaatcaagcagtgcaccagagtgaccatggaccagctgagcaccgtgcaccacgagatgggccacatccagtactacctgcagtacaaggacctgcccgtgagcctgagaagaggcgccaaccccggcttccacgaggccatcggcgacgtgctggccctgagcgtgagcacccccgagcacctgcacaagatcggcctgctggacagagtgaccaacgacaccgagcccagcatcagaggcagcgtgctgctgctgcccgagaccaagcccaccctgatgctggagctgagcttcatgttccagatgtag

SEQ ID NO: 15686 - protein, 480 aa, Artificial Sequence
  derived and/or modified sequence
MNASEFRRRGKEMVDYMANYMEGIEGRQVYPDVEPGYLRPLIPAAAPQEPDTFEDIINDVEKIIMPGVTHWHSPYFFAYFPTASSYPAMLADMLCGAIGCIGFSWAASPACTELETVMMDWLGKMLELPKAFLNEKAGEGGGVIQGSASEATLVALLAARTKVIHRLQAASPELTQAAIMEKLVAYSSDQAHSSVERAGLIGGVKLKAIPSDGNFAMRASALQEALERDKAAGLIPFFMVATLGTTTCCSFDNLLEVGPICNKEDIWLHVDAAYAGSAFICPEFRHLLNGVEFADSFNFNPHKWLLVNFDCSAMWVKKRTDLTGAFRLDPTYLKHSHQDSGLITDYRHWQIPLGRRFRSLKMWFVFRMYGVKGLQAYIRKHVQLSHEFESLVRQDPRFEICVEVILGLVCFRLKGSNKVNEALLQRINSAKKIHLVPCHLRDKFVLRFAICSRTVESAHVQRAWEHIKELAADVLRAERE

SEQ ID NO: 15687 - DNA, 1443 bp, Artificial Sequence
  derived and/or modified sequence
atgaacgcctccgaattccgacggagaggtaaagagatggtggactacatggccaattatatggaagggatcgaagggcgccaggtgtatcccgatgtggagcctggctatctgaggcccttaataccggcagcagcaccccaggaacctgacacctttgaggacatcatcaacgacgtggaaaagatcatcatgcctggggtgacccactggcatagcccatacttctttgcttactttccgactgccagttcgtatcccgcgatgctggctgacatgctgtgtggggcaatcgggtgtatcggctttagctgggcggccagtcccgcgtgcacagaactggaaacagttatgatggattggttggggaaaatgttagagctgcctaaggccttcctcaacgagaaggcaggggaaggaggcggtgtgatacagggctccgctagcgaggccacgctcgtagccttgctcgcagctagaacgaaagttattcatcgcctgcaagcagcctcccctgagctaacccaggccgccatcatggaaaagctagttgcatattctagtgatcaggctcactcttcggtcgaacgggccggactcataggcggtgtgaagcttaaggcgataccatcggacggaaactttgccatgagggcaagcgcattgcaagaggccttggagcgggacaaagccgcgggcctgattccattttttatggtcgccaccctgggtactaccacttgttgctctttcgacaatcttcttgaagtggggccaatttgcaataaggaagacatctggctgcatgtggacgccgcctatgccggtagcgctttcatatgccctgagtttcgtcaccttctgaacggagtcgaatttgctgacagttttaatttcaacccacacaagtggctgttagtgaatttcgattgctccgctatgtgggtgaaaaagagaaccgatctaactggagccttccggctggatcctacctacctcaaacactctcaccaggatagtggactgatcaccgactatcggcactggcaaatcccccttgggcggcggtttcggagcctaaagatgtggttcgttttccgcatgtatggtgttaaggggctgcaggcatatattagaaaacatgtccagctgtctcacgaatttgagtccttagtcaggcaggaccccaggttcgagatctgtgtagaagtgatccttggccttgtctgttttcggctgaagggatctaacaaagtaaacgaagctctattgcagcggattaactctgccaaaaagattcatctcgtgccctgccacctgcgcgataagttcgtgttacggttcgccatctgctcccgtactgttgagtctgcgcatgtccagagagcttgggagcacataaaagaacttgcagctgatgtcttgagagctgagcgagagtag

SEQ ID NO: 15688 - DNA, 51 bp, Artificial Sequence
  derived and/or modified sequence
atgaacgcgagcgagtttaggagacgaggtaaggaaatggtggattactag

SEQ ID NO: 15689 - DNA, 1443 bp, Artificial Sequence
  derived and/or modified sequence
atgaatgcttctgaattccggaggagaggcaaggagatggttgactatatggccaactatatggagggtattgagggccggcaggtctaccctgacgtggagccaggctatctccgtcctctaattccagctgccgccccccaggaaccagacacattcgaggacatcattaacgatgtggagaagatcattatgccaggagtcacccactggcatagtccatactttttcgcttacttccccacagcctcatcttaccctgcaatgctagccgatatgctttgtggagccattggatgcatcgggtttagctgggctgcctctccagcgtgtaccgaattggagactgtgatgatggactggctgggaaagatgttagagcttccaaaagctttcctgaacgaaaaggcgggggaaggcgggggagttatccagggtagtgcatccgaggctactctggttgccctcttagctgcacgtactaaagtcatacatcggctgcaggcagcgtcacccgaattaacgcaggccgcaatcatggagaagttggttgcgtatagttccgatcaagcgcattcatccgtggagagagctgggctcatcggtggcgtcaaactgaaagcgatacctagcgatgggaatttcgctatgcgtgcatctgcactgcaagaggcactggaacgggacaaagctgctggcttgataccttttttcatggtggccacattgggaacaaccacgtgttgctccttcgataacctgctggaggtaggacctatatgtaacaaagaggatatctggctgcacgtggatgctgcctacgccgggtccgcatttatttgtccagagttccggcatctcctcaatggcgtggagttcgcagattccttcaactttaatccacataagtggttgttggtgaattttgattgcagcgcaatgtgggtcaagaagcgcactgacctgacaggagcatttagactggatcctacttatctaaagcactcccatcaggattctggactcataactgattaccggcactggcagatccctcttggacgtcggttccgatccttaaagatgtggtttgttttccgcatgtatggcgtcaaagggcttcaggcttatattaggaagcacgtgcagctctctcacgagttcgagagccttgtgaggcaggatccccggttcgaaatatgtgtggaggtgatactgggattagtgtgctttaggctcaagggttcaaataaagtcaacgaggctctgcttcagcgtattaacagcgcaaaaaaaatccacctcgttccatgccacctgcgcgacaagtttgtgctgcgttttgccatttgtagccggactgtcgagtctgcacatgtacagcgggcgtgggagcatatcaaagaacttgctgctgacgttctgcgggctgaacgcgaatag

SEQ ID NO: 15690 - DNA, 1443 bp, Artificial Sequence
  derived and/or modified sequence
atgaatgccagcgagttcagaagaagaggcaaggagatggtggactacatggccaactacatggagggcatcgagggccggcaggtgtacccagatgtggagcccggctacctgcggcccctcatcccagctgctgccccccaggagccagacacctttgaggacatcatcaatgatgtggagaagatcatcatgcctggggtgacccactggcacagcccctacttctttgcctacttccccacagccagcagctacccagccatgctggccgacatgctgtgtggggccatcggctgcatcggcttctcctgggccgccagccctgcctgcacagagctggagaccgtgatgatggactggctgggcaagatgctggagctgcccaaggccttcctgaatgagaaggccggggagggcggcggcgtcatccagggcagcgccagcgaggccaccctggtggccctgctggccgcccggaccaaggtgatccaccggctgcaggccgccagccctgagctgacccaggccgccatcatggagaagctggtggcctacagcagtgaccaggcccacagctctgtggagcgggccggcctgattggaggagtgaagctgaaggccatccccagtgatggcaactttgccatgagggccagcgccctgcaggaggccctggagcgggacaaggccgccggcctcatccccttcttcatggtggccaccctgggcaccaccacctgctgcagctttgacaacctgctggaggtgggccccatctgcaacaaggaggacatctggctgcacgtggatgctgcctatgccggcagcgccttcatctgcccagagttccgccacctgctgaatggagtggagtttgctgacagcttcaacttcaacccccacaagtggctgctggtgaactttgactgcagcgccatgtgggtgaagaagaggacagacctgactggagccttccggctggaccccacctacctgaagcacagccaccaggacagcggcctcatcacagactaccgccactggcagatccccctgggccgccgcttccgcagcctgaagatgtggtttgtgttcaggatgtatggagtgaagggcctgcaggcctacatcaggaagcacgtgcagctgagccatgaatttgagagcctggtgcggcaggaccccaggtttgagatctgtgtggaggtgatcctgggcctggtgtgcttccggctgaagggcagcaacaaggtgaatgaggccctgctgcagaggatcaacagcgccaagaagatccacctggtgccctgccacctgcgggacaagtttgtgctgcgctttgccatctgcagcaggacagtggagagcgcccacgtgcagagggcctgggagcacatcaaggagctggccgcagatgtgctgcgggcagagcgggagtag

SEQ ID NO: 15691 - DNA, 51 bp, Artificial Sequence
  derived and/or modified sequence
atgaatgccagcgagttcagaagaagaggcaaggagatggtggactactag

SEQ ID NO: 15692 - DNA, 1443 bp, Artificial Sequence
  derived and/or modified sequence
atgaacgccagcgagttccggcggcggggcaaggagatggtggactatatggccaactacatggagggcatcgaaggccgtcaggtctaccccgacgtcgagcctggatacctgaggcccttaattcccgcagctgcaccccaagagcctgataccttcgaggacatcattaacgatgtggaaaaaattattatgcccggtgtaacccactggcactctccttatttcttcgcctattttcccactgctagctcctatccggctatgctggccgatatgctttgtggtgccatcggctgtatcggcttctcttgggctgcctcaccagcctgcacagagctggagaccgtgatgatggactggttaggaaaaatgctggaacttccaaaggccttcctcaacgaaaaagctggagaggggggaggagtgattcaggggtctgcttcagaggccacactggttgccctcttagcagcgaggactaaggtcattcacaggttacaagctgccagccccgagttgacacaggccgccatcatggaaaagctagtcgcttattcttcagaccaggctcatagctccgtggaacgagccggtctcataggaggggtgaagttgaaggctatcccctctgacggaaactttgccatgagggcatccgccctgcaagaggctttggaaagagataaagcagccggtctgatacccttctttatggttgcaactcttggtaccaccacttgttgcagtttcgataacttgttagaggttggcccaatatgcaataaagaggatatttggctgcatgtagatgccgcttatgctggcagcgccttcatctgccctgaatttcgccatcttctgaacggggttgaatttgcagacagtttcaattttaacccgcacaagtggctcctagtgaattttgactgctcagccatgtgggtgaagaagcgtaccgatctgactggtgcctttcgcctggacccaacgtatctgaagcacagtcaccaggactccggtctgatcacagattatcgccactggcagatcccgctgggacgtagatttagatctctgaaaatgtggtttgtgttccggatgtatggagtcaaaggactgcaggcttatatacgcaagcacgtgcagttgtcgcatgaatttgagtccttagttcggcaggatccccggttcgagatctgcgtggaggtcattttaggcctcgtgtgcttcaggctgaaaggcagtaacaaagtcaatgaagctctcctacagaggatcaactccgctaagaagattcatttggttccctgtcatctgcgtgataaattcgtgctccggtttgccatttgtagtagaaccgtcgagtccgcacacgttcagagagcatgggaacacattaaggagttggccgccgacgtcttacgcgcagaacgggagtag

SEQ ID NO: 15693 - DNA, 51 bp, Artificial Sequence
  derived and/or modified sequence
atgaacgccagcgagttccggcggcggggcaaggagatggtggactactag

SEQ ID NO: 15694 - DNA, 1443 bp, Artificial Sequence
  derived and/or modified sequence
atgaacgccagcgagttccggcggcggggcaaggagatggtggactacatggccaactacatggaggggatcgagggacgccaggtgtacccagacgttgagcctggatacctccgcccactgattccggcagccgctccgcaggaacccgatacttttgaggatatcattaatgacgtcgagaagatcataatgcctggtgtcacccactggcacagcccctacttttttgcatactttcccactgcctccagttatcccgcgatgttggcagatatgctctgtggtgcaatcggctgtatcgggttctcttgggcggcaagccccgcttgcacagagctggagacagtaatgatggattggcttggcaagatgctcgagctgcccaaggctttcctgaacgaaaaagcaggggagggcggcggcgtgattcaggggtcagcatccgaggcgaccctggtggccctgctggctgccaggacaaaggtcattcatagactgcaagccgcatctcccgaactcacccaagccgccattatggagaaactggttgcttacagtagtgaccaggctcacagtagcgtcgagagagcaggtctcattggcggagtgaagttgaaggcaataccatcagatgggaactttgcaatgcgcgctagcgctctgcaggaggcactcgagcgagacaaggccgccggtttgatacctttcttcatggtggccactttgggcactaccacttgctgttcctttgacaatttgctcgaggtgggtcctatctgcaataaggaggatatctggttgcatgtggacgccgcatacgcgggcagcgcctttatctgtcccgagttccgccacttattgaacggagtggagttcgccgatagcttcaatttcaatccccacaaatggcttcttgtcaattttgactgcagtgctatgtgggtgaagaagcggacggacttgacaggagcattccgccttgatcctacgtacctgaagcactcacaccaagattctggcttgatcaccgactacagacattggcagatccccttgggtagaaggtttcgcagcttaaaaatgtggttcgtctttagaatgtacggagtgaaagggctgcaggcctacattaggaaacacgttcagctctcccacgagtttgaatctttggtccgtcaagacccacggtttgaaatttgcgttgaagtgatcctcgggcttgtatgtttcagattgaaggggtccaataaggtgaacgaagctcttctacagaggattaactcagctaagaagatccatctcgtgccctgccatctaagagataagttcgttttaagatttgctatctgctcccggacggttgaaagcgcgcacgtgcaacgcgcttgggaacatatcaaggagctggcagcagacgttttgagagccgagagagagtag

SEQ ID NO: 15695 - DNA, 1443 bp, Artificial Sequence
  derived and/or modified sequence
atgaacgcatcagaattccgaaggcggggaaaagagatggtggattacatggccaattatatggaggggatcgaaggaagacaagtgtaccccgacgtggagcccggatatctgcgtccacttatcccagccgcagcaccacaggaacctgacactttcgaggacataattaatgatgttgaaaaaatcattatgcctggcgtgactcactggcatagcccttacttctttgcctacttcccaaccgctagtagctatcctgctatgttagccgatatgctttgcggtgcaatcggttgtatcggcttctcctgggccgcatcacctgcttgcactgagctggagactgtgatgatggactggctgggaaagatgctggaattgcccaaagccttccttaacgaaaaggcaggcgagggaggtggggtgatccagggctccgcatctgaggccactctagttgccctgttggctgccaggaccaaggtcatccacagattacaggccgcatcaccggagctgacccaagccgctattatggaaaagctcgtggcttatagcagcgatcaggcccactcatctgttgagcgcgctgggttgatcgggggagtgaaactgaaggccattcctagcgacgggaatttcgctatgagggcgtcagcgctgcaggaagcactggagagagacaaagctgccggtctcattcccttcttcatggtcgctaccttggggacaacaacatgctgctcattcgacaatctgcttgaggtgggcccaatctgcaataaagaggacatttggctgcatgtggacgccgcttacgcagggtcggcctttatctgcccggaattcagacacttactgaatggggtagaattcgctgactcgttcaatttcaatccccataaatggcttttggttaatttcgattgcagcgccatgtgggtcaagaagcgcacagacttgaccggcgctttccgcttagatcccacctatctaaagcatagtcatcaagactccgggttaatcactgactaccgccactggcagatccccctaggcaggcgattccgatcccttaagatgtggttcgttttccgaatgtatggagtgaaaggtctgcaggcctatattaggaaacatgtacagctttcccatgaattcgaaagtctggtgaggcaggatccgaggttcgagatctgtgttgaagtcatcttaggtttagtatgcttcagactcaagggctccaataaggtgaacgaggcactactgcaacgtattaattcagctaaaaaaatccacctggtgccctgtcacctccgggacaagttcgtgctgcggttcgctatctgcagtaggactgtcgaaagcgctcacgttcagagggcatgggaacacatcaaggaacttgcagccgatgttctgcgggcagagcgggagtag

SEQ ID NO: 15696 - DNA, 51 bp, Artificial Sequence
  derived and/or modified sequence
atgaacgcatcagaattccgtagaaggggcaaggaaatggtggactactag

SEQ ID NO: 15697 - DNA, 1443 bp, Artificial Sequence
  derived and/or modified sequence
atgaacgcaagcgagttccggagacgagggaaggagatggtggattatatggccaattacatggaagggattgaggggaggcaggtatacccagacgtggaacccggatatctccggccactcattccagctgcagctccccaggagcctgatacctttgaagatatcattaacgatgtggaaaagatcatcatgccaggggtgacccattggcattccccatatttcttcgcatactttccaaccgcctccagttatcccgcaatgctggctgatatgctctgcggtgctataggatgtatagggttttcctgggcagccagcccagcctgcaccgaactcgaaaccgtgatgatggattggttaggaaagatgctggaactccccaaggcctttctcaacgagaaggctggagaaggcggtggagtgatacaaggatcggcgtccgaggctacccttgtcgctcttctggctgctcgaactaaggtgatccatcggctacaggcagcatctcccgaactcactcaggccgcaataatggagaaactggtggcttacagcagtgaccaggcccactcaagcgttgagagggctggcctgatagggggtgtgaagttaaaagcaataccatccgacggtaatttcgctatgcgtgccagcgccctgcaggaggccctcgagcgcgacaaggcagctgggttgattccgttcttcatggtggccaccctcggtacgaccacttgttgctcattcgataacctgctcgaggtcgggccaatctgcaataaagaggacatctggctgcacgtagatgccgcttacgccggaagcgccttcatctgtcccgaattccgccatctcctcaacggagtggagtttgccgatagcttcaattttaatccccacaagtggttgctggttaatttcgactgtagcgcaatgtgggtaaaaaaacgcaccgatttaaccggagcatttcgcctggatccaacgtatctaaaacactcacaccaggattcagggctcatcactgactaccgccattggcaaataccactgggcaggcgattccgtagtctgaaaatgtggtttgtgtttagaatgtacggcgtgaaagggctgcaggcctatattagaaaacacgtgcaactaagccatgagttcgagtcgctggtacgacaggaccccaggttcgagatttgcgtggaagtcatcctgggactcgtgtgtttccggttaaagggttccaacaaggtgaatgaggcgctgttgcagcgaattaacagcgcaaaaaaaatccatcttgtgccctgtcacctcagagacaagtttgtgctaaggttcgcaatttgctcccggactgtggaaagcgcccacgtgcagcgtgcctgggagcacattaaggagctcgccgcagacgttttaagggccgagagggagtag

SEQ ID NO: 15698 - DNA, 1443 bp, Artificial Sequence
  derived and/or modified sequence
atgaacgccagcgagttcagaagaagaggcaaggagatggtggactacatggccaactacatggagggcatcgagggcagacaggtgtaccccgacgtggagcccggctacctgagacccctgatccccgccgccgccccccaggagcccgacaccttcgaggacatcatcaacgacgtggagaagatcatcatgcccggcgtgacccactggcacagcccctacttcttcgcctacttccccaccgccagcagctaccccgccatgctggccgacatgctgtgcggcgccatcggctgcatcggcttcagctgggccgccagccccgcctgcaccgagctggagaccgtgatgatggactggctgggcaagatgctggagctgcccaaggccttcctgaacgagaaggccggcgagggcggcggcgtgatccagggcagcgccagcgaggccaccctggtggccctgctggccgccagaaccaaggtgatccacagactgcaggccgccagccccgagctgacccaggccgccatcatggagaagctggtggcctacagcagcgaccaggcccacagcagcgtggagagagccggcctgatcggcggcgtgaagctgaaggccatccccagcgacggcaacttcgccatgagagccagcgccctgcaggaggccctggagagagacaaggccgccggcctgatccccttcttcatggtggccaccctgggcaccaccacctgctgcagcttcgacaacctgctggaggtgggccccatctgcaacaaggaggacatctggctgcacgtggacgccgcctacgccggcagcgccttcatctgccccgagttcagacacctgctgaacggcgtggagttcgccgacagcttcaacttcaacccccacaagtggctgctggtgaacttcgactgcagcgccatgtgggtgaagaagagaaccgacctgaccggcgccttcagactggaccccacctacctgaagcacagccaccaggacagcggcctgatcaccgactacagacactggcagatccccctgggcagaagattcagaagcctgaagatgtggttcgtgttcagaatgtacggcgtgaagggcctgcaggcctacatcagaaagcacgtgcagctgagccacgagttcgagagcctggtgagacaggaccccagattcgagatctgcgtggaggtgatcctgggcctggtgtgcttcagactgaagggcagcaacaaggtgaacgaggccctgctgcagagaatcaacagcgccaagaagatccacctggtgccctgccacctgagagacaagttcgtgctgagattcgccatctgcagcagaaccgtggagagcgcccacgtgcagagagcctgggagcacatcaaggagctggccgccgacgtgctgagagccgagagagagtag

SEQ ID NO: 15699 - DNA, 51 bp, Artificial Sequence
  derived and/or modified sequence
atgaacgccagcgagttcagaagaagaggcaaggagatggtggactactag

SEQ ID NO: 15700 - DNA, 1938 bp, Artificial Sequence
  derived and/or modified sequence
ggagagagagaggacagagagcaagtcactcccggctgcctttttcacctctgacagagcccagacaccatgaacgcaagtgaattccgaaggagagggaaggagatggtggattacatggccaactacatggaaggcattgagggacgccaggtctaccctgacgtggagcccgggtacctgcggccgctgatccctgccgctgcccctcaggagccagacacgtttgaggacatcatcaacgacgttgagaagataatcatgcctggggtgacgcactggcacagcccctacttcttcgcctacttccccactgccagctcgtacccggccatgcttgcggacatgctgtgcggggccattggctgcatcggcttctcctgggcggcaagcccagcatgcacagagctggagactgtgatgatggactggctcgggaagatgctggaactaccaaaggcatttttgaatgagaaagctggagaagggggaggagtgatccagggaagtgccagtgaagccaccctggtggccctgctggccgctcggaccaaagtgatccatcggctgcaggcagcgtccccagagctcacacaggccgctatcatggagaagctggtggcttactcatccgatcaggcacactcctcagtggaaagagctgggttaattggtggagtgaaattaaaagccatcccctcagatggcaacttcgccatgcgtgcgtctgccctgcaggaagccctggagagagacaaagcggctggcctgattcctttctttatggttgccaccctggggaccacaacatgctgctcctttgacaatctcttagaagtcggtcctatctgcaacaaggaagacatatggctgcacgttgatgcagcctacgcaggcagtgcattcatctgccctgagttccggcaccttctgaatggagtggagtttgcagattcattcaactttaatccccacaaatggctattggtgaattttgactgttctgccatgtgggtgaaaaagagaacagacttaacgggagcctttagactggaccccacttacctgaagcacagccatcaggattcagggcttatcactgactaccggcattggcagataccactgggcagaagatttcgctctttgaaaatgtggtttgtatttaggatgtatggagtcaaaggactgcaggcttatatccgcaagcatgtccagctgtcccatgagtttgagtcactggtgcgccaggatccccgctttgaaatctgtgtggaagtcattctggggcttgtctgctttcggctaaagggttccaacaaagtgaatgaagctcttctgcaaagaataaacagtgccaaaaaaatccacttggttccatgtcacctcagggacaagtttgtcctgcgctttgccatctgttctcgcacggtggaatctgcccatgtgcagcgggcctgggaacacatcaaagagctggcggccgacgtgctgcgagcagagagggagtaggagtgaagccagctgcaggaatcaaaaattgaagagagatatatctgaaaactggaataagaagcaaataaatatcatcctgccttcatggaactcagctgtctgtggcttcccatgtctttctccaaagttatccagagggttgtgattttgtctgcttagtatctcatcaacaaagaaatattatttgctaattaaaaagttaatcttcatggccatagcttttattcattagctgtgatttttgttgattaaaacattatagattttcatgttcttgcagtcatcagaagtggtaggaaagcctcactgatatattttccagggcaatcaatgttcacgcaacttgaaattatatctgtggtcttcaaattgtcttttgtcatgtggctaaatgcctaataaacaattcaagtgaaatactaa

SEQ ID NO: 15701 - DNA, 2041 bp, Artificial Sequence
  derived and/or modified sequence
ggcacatgtggctggaaatgcaagaagagggaaacgtgtggcttggagtttcaagaagagtgactgtctcagtgccgagtgcctcagcagcttctccacatgctcttcagtccccaaagttggagaatcccatcaaggagagtagccctgtaaggaattcgaatttccagcatttttcacctctgacagagcccagacaccatgaacgcaagtgaattccgaaggagagggaaggagatggtggattacatggccaactacatggaaggcattgagggacgccaggtctaccctgacgtggagcccgggtacctgcggccgctgatccctgccgctgcccctcaggagccagacacgtttgaggacatcatcaacgacgttgagaagataatcatgcctggggtgacgcactggcacagcccctacttcttcgcctacttccccactgccagctcgtacccggccatgcttgcggacatgctgtgcggggccattggctgcatcggcttctcctgggcggcaagcccagcatgcacagagctggagactgtgatgatggactggctcgggaagatgctggaactaccaaaggcatttttgaatgagaaagctggagaagggggaggagtgatccagggaagtgccagtgaagccaccctggtggccctgctggccgctcggaccaaagtgatccatcggctgcaggcagcgtccccagagctcacacaggccgctatcatggagaagctggtggcttactcatccgatcaggcacactcctcagtggaaagagctgggttaattggtggagtgaaattaaaagccatcccctcagatggcaacttcgccatgcgtgcgtctgccctgcaggaagccctggagagagacaaagcggctggcctgattcctttctttatggttgccaccctggggaccacaacatgctgctcctttgacaatctcttagaagtcggtcctatctgcaacaaggaagacatatggctgcacgttgatgcagcctacgcaggcagtgcattcatctgccctgagttccggcaccttctgaatggagtggagtttgcagattcattcaactttaatccccacaaatggctattggtgaattttgactgttctgccatgtgggtgaaaaagagaacagacttaacgggagcctttagactggaccccacttacctgaagcacagccatcaggattcagggcttatcactgactaccggcattggcagataccactgggcagaagatttcgctctttgaaaatgtggtttgtatttaggatgtatggagtcaaaggactgcaggcttatatccgcaagcatgtccagctgtcccatgagtttgagtcactggtgcgccaggatccccgctttgaaatctgtgtggaagtcattctggggcttgtctgctttcggctaaagggttccaacaaagtgaatgaagctcttctgcaaagaataaacagtgccaaaaaaatccacttggttccatgtcacctcagggacaagtttgtcctgcgctttgccatctgttctcgcacggtggaatctgcccatgtgcagcgggcctgggaacacatcaaagagctggcggccgacgtgctgcgagcagagagggagtaggagtgaagccagctgcaggaatcaaaaattgaagagagatatatctgaaaactggaataagaagcaaataaatatcatcctgccttcatggaactcagctgtctgtggcttcccatgtctttctccaaagttatccagagggttgtgattttgtctgcttagtatctcatcaacaaagaaatattatttgctaattaaaaagttaatcttcatggccatagcttttattcattagctgtgatttttgttgattaaaacattatagattttcatgttcttgcagtcatcagaagtggtaggaaagcctcactgatatattttccagggcaatcaatgttcacgcaacttgaaattatatctgtggtcttcaaattgtcttttgtcatgtggctaaatg

SEQ ID NO: 15702 - protein, 187 aa, Artificial Sequence
  derived and/or modified sequence
MVGSLNCIVAVSQNMGIGKNGDLPWPPLRNEFRYFQRMTTTSSVEGKQNLVIMGKKTWFSIPEKNRPLKGRINLVLSRELKEPPQGAHFLSRSLDDALKLTEQPELANKVDMVWIVGGSSVYKEAMNHPGHLKLFVTRIMQDFESDTFFPEIDLEKYKLLPEYPGVLSDVQEEKGIKYKFEVYEKND

SEQ ID NO: 15703 - DNA, 564 bp, Artificial Sequence
  derived and/or modified sequence
atggtggggtctctgaattgtatcgttgccgtgagtcagaacatgggtatcggaaagaatggcgacctgccctggcccccactgagaaacgaatttcgctattttcagcgaatgaccaccacatcttcagtggaaggtaagcaaaatttagtaataatgggaaaaaagacatggttctcaataccagagaagaatcggcctttaaaggggaggatcaatctggtcttgtcacgtgagctaaaagaaccaccccagggtgcccattttctgagccgttcgctcgatgatgcacttaagcttaccgagcaacccgaactggctaacaaggtggacatggtctggatcgttggaggcagtagtgtgtacaaggaggccatgaaccatccaggccaccttaaactcttcgtgacccggattatgcaggacttcgagtccgacacttttttcccggaaattgatttggagaaatacaaactgttgcctgagtaccccggagtattgtctgatgtgcaggaagaaaagggtataaagtataaattcgaggtttacgagaagaacgattag

SEQ ID NO: 15704 - DNA, 564 bp, Artificial Sequence
  derived and/or modified sequence
atggttggctccctgaactgcatagttgccgtctcccagaacatgggaattgggaagaatggcgatctgccatggccccccttgcgcaacgagtttagatacttccagcggatgaccactaccagcagcgtcgaggggaaacagaatctggtaatcatgggaaaaaaaacttggttcagtattccagagaaaaaccggcctctcaagggtcgcatcaatctggtcctgtcgcgggaacttaaggagccaccacagggcgcccattttctttcccgaagcttagatgacgctctaaagttgacagaacagccagagctcgctaataaggtcgatatggtctggatcgtgggggggtcctctgtatacaaggaggcgatgaaccacccaggacacctgaaactatttgtgacacggataatgcaggacttcgagtcagatactttcttccccgaaattgacctcgagaagtataagcttttgccagaataccccggagttttaagcgacgtgcaagaagagaagggtattaaatacaagtttgaagtgtatgagaagaacgattag

SEQ ID NO: 15705 - DNA, 564 bp, Artificial Sequence
  derived and/or modified sequence
atggtgggcagcctgaactgcatcgtggccgtgtcccagaacatgggcatcggcaagaatggagacctgccctggccacccctgagaaatgagttccgctacttccagaggatgaccaccaccagctctgtggagggcaagcagaacctggtgatcatgggcaagaagacctggttcagcatccctgagaagaaccggcccctgaagggccgcatcaacctggtgctgagccgggagctgaaggagcccccccagggcgcccacttcctgagccgcagcctggatgatgccctgaagctgacagagcagcctgagctggccaacaaggtggacatggtgtggatcgtgggcggcagctctgtgtacaaggaggccatgaaccaccctggccacctgaagctgtttgtgacccgcatcatgcaggactttgaaagtgacaccttcttccctgagattgacctggagaagtacaagctgctgcctgagtacccaggagtgctgagtgatgtgcaggaggagaagggcatcaagtacaagtttgaggtgtatgagaagaatgactag

SEQ ID NO: 15706 - DNA, 564 bp, Artificial Sequence
  derived and/or modified sequence
atggtgggcagcctgaactgcatcgtggccgtgagccagaacatgggaatcggcaagaatggagacctgccatggcccccactgcgcaatgagtttcgctactttcagcgtatgactaccacaagctcagtcgagggaaagcaaaaccttgtcattatgggcaagaaaacttggttctccatccccgaaaagaacaggcctctcaaggggaggattaatctggtgcttagccgagaactgaaagagccaccccagggagcccacttcttgagcaggtctctggatgacgcccttaaactcaccgagcagcccgagctcgccaacaaggtggatatggtgtggattgttggcggcagcagtgtttataaggaggctatgaaccacccaggacatcttaagctgttcgttacccgaataatgcaagatttcgagtctgataccttctttccggagattgacctcgaaaagtacaagctgttacccgaatacccgggcgtattgtcagatgtgcaggaagaaaagggtatcaagtataagtttgaggtgtatgagaagaatgactag

SEQ ID NO: 15707 - DNA, 564 bp, Artificial Sequence
  derived and/or modified sequence
atggtgggcagcctgaactgcatcgtggccgtgagccagaacatgggaatcggaaaaaacggggacctgccgtggccccccctcaggaacgaattccgctatttccagagaatgacaacaactagtagcgtcgagggcaaacagaatttagtgatcatgggtaagaaaacctggttctccatcccagaaaagaacagaccgctgaagggccgtatcaacttggtgctctcacgagagctcaaagagccgccccagggcgctcatttcctgtcacgaagcttggacgacgccctcaagcttaccgaacagcctgagctggctaataaggtcgatatggtgtggatagtgggaggctctagcgtctacaaggaggctatgaatcacccgggccatctgaagctattcgtgacaagaattatgcaggacttcgagagcgacaccttctttcctgagatagacctggagaagtacaagctcttaccagagtacccaggtgtgctgagtgacgtgcaggaggagaagggaatcaagtacaaatttgaggtgtacgaaaagaatgattag

SEQ ID NO: 15708 - DNA, 564 bp, Artificial Sequence
  derived and/or modified sequence
atggtgggctcgctcaactgtatcgtggccgtttcacagaatatgggcatcggcaaaaacggggacttgccttggccacccctaaggaacgaattcaggtattttcagaggatgactaccacaagcagtgtcgagggaaagcagaatctggtgataatgggtaagaagacatggtttagcatccctgaaaaaaataggccgctaaagggcagaattaatctagttctgagtcgcgagctcaaggagccccctcagggagcccactttctgtctagatccctggacgatgctctgaagctgaccgagcaacccgagttggcgaacaaagtggacatggtttggattgtgggaggctcttcggtttataaggaagctatgaatcatcccggtcacctgaaactctttgtcacaagaataatgcaggacttcgaatcggacacattttttcccgagatcgacctcgaaaagtataagcttctgccagaatacccaggcgtcctgtcggacgtccaggaggagaagggtattaagtacaagttcgaggtttatgaaaagaatgactag

SEQ ID NO: 15709 - DNA, 564 bp, Artificial Sequence
  derived and/or modified sequence
atggttggctccctgaattgtatcgtcgctgtgagccagaatatggggattggaaaaaatggagacttgccgtggcctccactgcggaatgaattcaggtatttccagcgtatgacgacaacgagctcagtggaaggtaagcaaaacctggtgatcatgggtaagaaaacctggttttcaattccggagaaaaacagaccgctcaaggggagaattaaccttgtgctgagcagggagctcaaggaaccaccccaaggggcacactttttgagccggtccctcgatgatgcccttaagttaactgaacagccggagcttgctaacaaggtcgatatggtgtggatcgttggaggtagttcagtctacaaagaggccatgaatcatcccggtcaccttaaactcttcgtcacgagaatcatgcaggactttgaatccgacaccttcttccctgagatcgacctagagaaatataagctgctgcctgaatatccaggcgtgttgtctgatgtgcaggaagaaaaaggcatcaaatataaatttgaggtctatgaaaaaaatgattag

SEQ ID NO: 15710 - DNA, 564 bp, Artificial Sequence
  derived and/or modified sequence
atggtgggcagcctgaactgcatcgtggccgtgagccagaacatgggcatcggcaagaacggcgacctgccctggccccccctgagaaacgagttcagatacttccagagaatgaccaccaccagcagcgtggagggcaagcagaacctggtgatcatgggcaagaagacctggttcagcatccccgagaagaacagacccctgaagggcagaatcaacctggtgctgagcagagagctgaaggagcccccccagggcgcccacttcctgagcagaagcctggacgacgccctgaagctgaccgagcagcccgagctggccaacaaggtggacatggtgtggatcgtgggcggcagcagcgtgtacaaggaggccatgaaccaccccggccacctgaagctgttcgtgaccagaatcatgcaggacttcgagagcgacaccttcttccccgagatcgacctggagaagtacaagctgctgcccgagtaccccggcgtgctgagcgacgtgcaggaggagaagggcatcaagtacaagttcgaggtgtacgagaagaacgactag

SEQ ID NO: 15711 - DNA, 3917 bp, Artificial Sequence
  derived and/or modified sequence
agtcccagacagaacctactatgtgcggcggcagctggggcgggaaggcgggagctgggggcgctgggggcgctgcggccgctgcggccgctgcagccgctgcagcgccagggtccacctggtcggctgcacctgtggaggaggaggtggatttcaggcttcccgtagactggaagaatcggctcaaaaccgcttgcctcgcaggggctgagctggaggcagcgaggccgcccgacgcaggcttccggcgagacatggcagggcaaggatggcagcccggcggcagggcctggcgaggagcgcgagcccgcggccgcagttcccaggcgtctgcgggcgcgagcacgccgcgaccctgcgtgcgccggggcgggggggcggggcctcgcctgcacaaatggggacgaggggggcggggcggccacaatttcgcgccaaacttgaccgcgcgttctgctgtaacgagcgggctcggaggtcctcccgctgctgtcatggttggttcgctaaactgcatcgtcgctgtgtcccagaacatgggcatcggcaagaacggggacctgccctggccaccgctcaggaatgaattcagatatttccagagaatgaccacaacctcttcagtagaaggtaaacagaatctggtgattatgggtaagaagacctggttctccattcctgagaagaatcgacctttaaagggtagaattaatttagttctcagcagagaactcaaggaacctccacaaggagctcattttctttccagaagtctagatgatgccttaaaacttactgaacaaccagaattagcaaataaagtagacatggtctggatagttggtggcagttctgtttataaggaagccatgaatcacccaggccatcttaaactatttgtgacaaggatcatgcaagactttgaaagtgacacgttttttccagaaattgatttggagaaatataaacttctgccagaatacccaggtgttctctctgatgtccaggaggagaaaggcattaagtacaaatttgaagtatatgagaagaatgattaatatgaaggtgttttctagtttaagttgttccccctccctctgaaaaaagtatgtatttttacattagaaaaggttttttgttgactttagatctataattatttctaagcaactagtttttattccccactactcttgtctctatcagataccatttatgagacattcttgctataactaagtgcttctccaagaccccaactgagtccccagcacctgctacagtgagctgccattccacacccatcacatgtggcactcttgccagtccttgacattgtcgggcttttcacatgttggtaatatttattaaagatgaagatccacatacccttcaactgagcagtttcactagtggaaataccaaaagcttcctacgtgtatatccagaggtttgtagataaatgttgccaccttgtttgtaacagtgaaaaattgaaaacaacctggaagtccagtgatgggaaaatgagtatgtttctgtcttagattggggaacccaaagcagattgcaagactgaaatttcagtgaaagcagtgtatttgctaggtcataccagaaatcatcaattgaggtacggagaaactgaactgagaaggtaagaaaagcaatttaaagtcagcgagcaggttctcattgataacaagctccatactgctgagatacagggaaatggaggggggaaagctggagtattgatcccgcccccctccttggttgtcagctccctgtcctgtgtgtgggcggaacatagtccagctgctctatagcaagtctcaggtgtttgcagtaagaagctgctggcatgcacgggaacagtgaatgccaaacacttaaagcaattcgatgtttaagtatgtaagttcttttttttttagacagcgtttcgctcttgttgcccaggctagcatgcaatggtgtgacctcggcttactgcaacctccgccttcccagattcaagcgattctcctgcctcaggctcccaagtagctaggaccaggtgcgcgccaccacgcccggctaatttttgtattttgtatttttagtagagatggggtttcaccatgttggtcaggctagtctcgaactcgtgaccgcaagcgattcacccacctcagcctcccaaagtgctgggattaccggcttgagccaccacacccggcacatcttcattctttttatgtagtaaaaagtataaggccacacatggtttatttgaagtattttataatttaaaaaaatacagaagcaggaaaaccaattataagttcaagtgagggatgatggttgcttgaaccaaagggttgcatgtagtaagaaattgtgatttaagatatattttaaagttataagtagcaggatattctgatggagtttgactttggttttgggcccagggagtttcagatgcctttgagaaatgaatgaagtagagagaaaataaaagaaaaaccagccaggcacagtggctcacacctgtaatcccagcgctttgggaggctaaggcaggcagatcacttgagaccagcttgggcaacatggcaaagccccatctctacaaaaaacacaaaaattagctgggcattgtggcgcacacctgtattcccatctagtcaggaagctgagatggaagaattaattgagcccacgagttcaaggctgcagtgagtcgtgattgtgccactgcactccagccggggtgacagaagagaccttgtctcgaaaaggaatctgaaaacaatggaaccatgccttcataattctagaaagttattttcaactgataaatctatattcacccaaataatcaagggtgaaggtaaaataatacatttttagacaagcaaagactcaggggttacctccatgtgccctttttagggaagctgttggagaaaatactccagcaaaatgaaggagtacacaaaccagagaatgacatgaatccagcaaataggatccaacacaggcaatattccagctatggagctagctttaaaaaggaacagtaaaaatattaatcggttagctgggtggaatggcccatgcctgtagtcccagctactcaggaggctcagcagcaggacgacttgagcccaagagttccagaccagcctggccaccttagtgagatcccttctcttaaaaataataacttattgccagatttggggcatttggaaagaagttcattgaagataaagcaaaagtaaaaaaaaaaaaaaaaaaaacaaggggaaagggttggttaggcaatcattctagggcagaaagaagtacaggataggaagagcataatacactgtttttctcaacaaggagcagtatgtacacagtcataatgatgtgactgcttagcccctaaatatggtaactactctgggacaatatgggaggaaaagtgaagattgtgatggtgtaagagctaaatcctcatctgtcatatccagaaatcactatataatatataataatgaaatgactaagttatgtgaggaaaaaaacagaagacattgctaaaagagttaaaagtcattgctctggagaattaggagggatggggcaggggactgttaggatgcattataaactgaaaagcctttttaaaattttatgtattaatatatgcattcacttgaaaaactaaaaaaaaacaataatttggaaaaacccatgaaggtaactaacggaaggaaaaactaagagaatgaaaagtatttgcctctggaaagaacaactggcaggactgttgttttcattgtaagacttttggagccatttaattgtacttaaccattttcatctatttctttaataagaacaattccatcttaataaagagttacacttgttaataa

SEQ ID NO: 15712 - DNA, 1719 bp, Artificial Sequence
  derived and/or modified sequence
gcggccgcagttcccaggcgtctgcgggcgcgagcacgccgcgaccctgcgtgcgccggggcgggggggcggggcctcgcctgcacaaatggggacgaggggggcggggcggccacaatttcgcgccaaacttgaccgcgcgttctgctgtaacgagcgggctcggaggtcctcccgctgctgtcatggttggttcgctaaactgcatcgtcgctgtgtcccagaacatgggcatcggcaagaacggggacctgccctggccaccgctcaggaatgaattcagatatttccagagaatgaccacaacctcttcagtagaaggtaaacagaatctggtgattatgggtaagaagacctggttctccattcctgagaagaatcgacctttaaagggtagaattaatttagttctcagcagagaactcaaggaacctccacaaggagctcattttctttccagaagtctagatgatgccttaaaacttactgaacaaccagaattagcaaataaagtagacatggtctggatagttggtggcagttctgtttataaggaagccatgaatcacccaggccatcttaaactatttgtgacaaggatcatgcaagactttgaaagtgacacgttttttccagaaattgatttggagaaatataaacttctgccagaatacccaggtgttctctctgatgtccaggaggagaaaggcattaagtacaaatttgaagtatatgagaagaatgattaatatgaaggtgttttctagtttaagttgttccccctccctctgaaaaaaataccatttatgagacattcttgctataactaagtgcttctccaagaccccaactgagtccccagcacctgctacagtgagctgccattccacacccatcacatgtggcactcttgccagtccttgacattgtcgggcttttcacatgttggtaatatttattaaagatgaagatccacatacccttcaactgagcagtttcactagtggaaataccaaaagcttcctacgtgtatatccagaggtttgtagataaatgttgccaccttgtttgtaacagtgaaaaattgaaaacaacctggaagtccagtgatgggaaaatgagtatgtttctgtcttagattggggaacccaaagcagattgcaagactgaaatttcagtgaaagcagtgtatttgctaggtcataccagaaatcatcaattgaggtacggagaaactgaactgagaaggtaagaaaagcaatttaaagtcagcgagcaggttctcattgataacaagctccatactgctgagatacagggaaatggaggggggaaagctggagtattgatcccgcccccctccttggttgtcagctccctgtcctgtgtgtgggcggaacatagtccagctgctctatagcaagtctcaggtgtttgcagtaagaagctgctggcatgcacgggaacagtgaatgccaaacacttaaagcaattcgatgtttaagtatgtaagttcttttttttttagacagcgtttcgctcttgttgcccaggctagcatgcaatggtgtgacctcggcttactgcaacctccgccttcccagattcaagcgattctcctgcctcaggctcccaagtagctaggaccaggtgcgcgccaccacgcccggctaatttttgtattttgtatttttagtagagatggggtttcaccatgtt

SEQ ID NO: 15713 - protein, 132 aa, Artificial Sequence
  derived and/or modified sequence
MGILSVDLLITLQILPVFFSNCLFLALYDSVILLKHVVLLLSRSKSTRGEWRRMLTSEGLRCVWKSFLLDAYKQVKLGEDAPNSSVVHVSSTEGGDNSGNGTQEKIAEGATCHLLDFASPERPLVVNFGSAT

SEQ ID NO: 15714 - protein, 273 aa, Artificial Sequence
  derived and/or modified sequence
MGILSVDLLITLQILPVFFSNCLFLALYDSVILLKHVVLLLSRSKSTRGEWRRMLTSEGLRCVWKSFLLDAYKQVKLGEDAPNSSVVHVSSTEGGDNSGNGTQEKIAEGATCHLLDFASPERPLVVNFGSATCPPFTSQLPAFRKLVEEFSSVADFLLVYIDEAHPSDGWAIPGDSSLSFEVKKHQNQEDRCAAAQQLLERFSLPPQCRVVADRMDNNANIAYGVAFERVCIVQRQKIAYLGGKGPFSYNLQEVRHWLEKNFSKRCKKTRLAG

SEQ ID NO: 15715 - protein, 55 aa, Artificial Sequence
  derived and/or modified sequence
MGILSVDLLITLQILPVFFSNCLFLALYDSVILLKHVVLLLSRSKSTRGEWRRML

SEQ ID NO: 15716 - DNA, 399 bp, Artificial Sequence
  derived and/or modified sequence
atgggcatcctgagtgtagacctgctcatcactctacaaatcctgcccgtttttttctcaaactgtctctttctcgcactgtacgattccgttattcttctcaaacacgtcgttcttctcctcagcagatcgaaaagcacgaggggagaatggcgccggatgctcacctcagaagggttaaggtgcgtttggaagtcctttcttctcgatgcgtataaacaggtgaaactcggtgaggatgcccccaacagcagcgtggtccatgtgagttctacagaaggcggggacaactctggcaacgggacccaggagaaaatcgccgaaggagctacatgtcacctcctcgattttgcctctccagaacgacccctggttgtgaattttgggtccgccacgtag

SEQ ID NO: 15717 - DNA, 822 bp, Artificial Sequence
  derived and/or modified sequence
atgggcattctttccgtcgatctgcttatcacactgcagatcctgccagtgtttttctcaaactgcctctttttagctctctatgactcagtgattctcctcaagcacgtcgttcttttgctgtccaggtccaaatccacaagaggagaatggcgcaggatgctaacgtctgaagggctcagatgcgtctggaagtcattcctccttgatgcatacaagcaggtcaagctcggagaggacgcccctaactcttccgtagttcacgtcagctcaacggagggcggtgataactctgggaatggaacgcaggagaagatcgcagagggcgcaacgtgccatctgttggatttcgcttctcccgaacggccattggtggtgaacttcggcagtgcgacatgacccccattcacctctcaactgcctgcgttccgaaaactcgttgaagagttctctagtgtagcagatttcttattggtgtatattgacgaggcgcatccatctgacgggtgggccatcccgggagacagttccctgtcctttgaagtgaaaaagcaccaaaaccaagaggaccggtgcgccgccgcacagcagctgctggaacgtttttctctccctccgcagtgccgcgtcgtggctgatcggatggacaacaatgccaacatagcctatggcgtggctttcgagagggtttgcattgtccagcggcaaaagatcgcttacttagggggcaaagggcccttttcctacaacctgcaggaagtacggcattggctggagaaaaatttttcaaagaggtgaaagaaaacacggctggctggttag

SEQ ID NO: 15718 - DNA, 822 bp, Artificial Sequence
  derived and/or modified sequence
atgggtatcctgtctgttgatcttctgatcacattgcagatactgccagtgttcttttcaaattgtttgtttctggctttatacgacagtgtaatcctactgaagcacgtggtgctcctgttatcccgctctaaatcgacaaggggcgaatggcgcagaatgctgacctccgaaggcctgcgttgtgtttggaagtcatttctgctggatgcttacaaacaggtgaagctgggggaggatgcgcctaactcttctgtggtccacgtatcatccacagaaggtggcgataatagcggaaacggcacacaggaaaaaatcgccgagggtgccacctgtcacctgctagacttcgcatcccccgaaaggccactggtcgttaacttcgggtcggctacttgaccaccctttacaagtcagctgcccgcgttccggaaactggtggaagaattcagctcagttgcagacttcctgctggtctacatcgacgaagcacatccctcagatggatgggctattccgggagactcatctctgtcctttgaggtcaagaaacaccagaaccaggaggacagatgtgccgctgcccagcaactgcttgagcgattctcacttccaccccaatgtagagtagttgcagatagaatggacaataatgctaacatcgcctacggagtggcgtttgaaagagtgtgtattgtacagcgacaaaagatagcatacctcggaggcaagggccccttttcttataaccttcaggaggtgagacactggctggaaaagaactttagcaagcggtgaaaaaagacacgccttgcaggctag

SEQ ID NO: 15719 - DNA, 399 bp, Artificial Sequence
  derived and/or modified sequence
atgggcatcctgtctgtggacctgctgatcaccctgcagatcctgcccgtcttcttcagcaactgcctcttcctggccctgtatgacagcgtcatcctgctgaagcacgtggtgctgctgctgagccgcagcaagagcaccagaggagagtggaggaggatgctgaccagcgagggcctgcgctgtgtgtggaagagcttcctgctggatgcctacaagcaggtgaagctgggagaagatgcccccaacagctctgtggtgcacgtgagcagcacagagggcggggacaacagcggaaatggcacccaggagaagattgctgagggcgccacctgccacctgctggactttgccagccctgagcggcccctggtggtgaactttggcagcgccacctag

SEQ ID NO: 15720 - DNA, 810 bp, Artificial Sequence
  derived and/or modified sequence
atgggcatcctgtctgtggacctgctgatcaccctgcagatcctgcccgtcttcttcagcaactgcctcttcctggccctgtatgacagcgtcatcctgctgaagcacgtggtgctgctgctgagccgcagcaagagcaccagaggagagtggaggaggatgctgaccagcgagggcctgcgctgtgtgtggaagagcttcctgctggatgcctacaagcaggtgaagctgggagaagatgcccccaacagctctgtggtgcacgtgagcagcacagagggcggggacaacagcggaaatggcacccaggagaagattgctgagggcgccacctgccacctgctggactttgccagccctgagcggcccctggtggtgaactttggcagcgccacccccttcaccagccagctgcctgccttcaggaagctggtggaggagttcagctctgtggccgacttcctgctggtgtacattgatgaggcccaccccagtgatggctgggccatccctggggacagcagcctgagctttgaggtgaagaagcaccagaaccaggaggacagatgtgccgccgcccagcagctgctggagcgcttcagcctgcccccccagtgccgggtggtggccgacaggatggacaacaatgccaacatcgcctatggagtggcctttgagcgggtgtgcatcgtgcagaggcagaagatcgcctacctgggcggcaagggccccttctcctacaacctgcaggaggtgcgccactggctggagaagaacttcagcaagaagaagacccggctggccggctag

SEQ ID NO: 15721 - DNA, 399 bp, Artificial Sequence
  derived and/or modified sequence
atgggcatcctgagcgtggacctgctgatcaccctgcagatcctgcccgtgtttttctccaattgcctgtttctcgcgctctacgacagcgttatcttgcttaagcatgtagtgctgttactctcgagaagtaagagtacccgaggtgagtggcgcagaatgttaacgagcgagggcctgcgctgcgtgtggaagtcatttctacttgatgcctataaacaggtcaagcttggggaagacgcccccaattcctccgtagtccatgttagttcaaccgagggcggcgataatagtggtaacggtactcaggagaaaatcgctgagggcgccacatgtcatcttctggattttgcttctccagagagacctctggttgtgaatttcggcagcgccacctag

SEQ ID NO: 15722 - DNA, 822 bp, Artificial Sequence
  derived and/or modified sequence
atgggcatcctgagcgtggacctgctgatcaccctgcagatcctgcccgtattcttttcgaactgcctcttcctcgccctgtatgatagtgtgattctgctcaaacatgttgtgctactcctttctcggagcaagagtacacggggagaatggcgacgtatgctgacttcagaggggctcagatgcgtgtggaaatcctttttgctggatgcttacaagcaggtgaagcttggtgaggacgctcctaatagttccgtggtacacgtctcctcaaccgagggcggggataacagcggcaacggaactcaagaaaagatcgcagagggggccacctgccacctgctggactttgcctccccagagaggccacttgtggttaacttcgggtccgccacgtgacctccttttaccagccagctgcctgcctttcgcaaacttgtcgaagaattctctagcgttgctgatttcctgttggtgtacatagatgaggctcacccctctgacggttgggcaatccccggagattcttctctctcctttgaggtaaaaaagcaccagaatcaagaggatcggtgtgctgctgcccagcagctactggaaaggttcagtcttcccccccaatgccgtgttgtggccgaccggatggacaataatgcaaatatcgcctatggcgtggccttcgaacgcgtctgtatagtgcagcgccagaaaatcgcctacctcggcggaaagggccctttctcttacaacctacaggaggtccgccattggctggaaaaaaacttctctaagaggtgaaagaaaacaaggctggccggatag

SEQ ID NO: 15723 - DNA, 822 bp, Artificial Sequence
  derived and/or modified sequence
atgggcatcctgagcgtggacctgctgatcaccctgcagatcctgcccgtgttcttcagcaattgtctgttcctagccctatacgacagcgtaatactattaaagcatgtcgtcctgctcctcagtagatcaaagtcaacgcgaggggagtggcgccggatgttgacgtcagagggactgagatgcgtatggaagagtttcctgctagatgcctataagcaggtgaaacttggcgaagacgctcctaatagctcagtggtgcacgtgtcctccaccgagggcggagacaacagcggaaatggtacccaggaaaaaatcgcagagggtgccacatgccacttgctggacttcgcatctcccgaaagaccactggtggtgaacttcggttcagcaacctgacccccttttaccagtcaactacccgcatttagaaagttagttgaggagtttagctctgtcgccgatttcctactggtttacatagacgaagcccacccctctgacggctgggctattccgggagactccagtctctcattcgaggtgaaaaagcaccagaatcaggaggatcgctgcgccgctgcacagcagctccttgaacgcttctcactgccaccacaatgccgagtggtggccgatcgaatggataacaacgccaatatcgcctatggtgtggcgtttgaaagggtttgcattgtgcagcggcaaaagatcgcctatctgggtggcaaaggacctttcagttataacctgcaagaagtccgccattggctggagaagaacttctccaaacgctgaaaaaagactcgcctagcagggtag

SEQ ID NO: 15724 - DNA, 399 bp, Artificial Sequence
  derived and/or modified sequence
atgggcatcctgagcgtcgatttactgatcactctgcagattctgccagtgttttttagcaactgtctgttcctggccctgtatgacagtgttatcctcctgaagcacgtcgtgttgctgctatccaggagcaagtccacacggggagaatggcgtagaatgctgacgtcggagggcctgaggtgcgtctggaaatccttcttgcttgatgcatataagcaagtaaaactgggcgaagatgcacccaactcttccgtggttcatgtctcatcaactgaaggcggtgacaactctgggaatggcactcaagagaaaatcgcggagggcgctacctgccacctgctggacttcgcctcccccgagcgacctttagtggttaacttcggatcagctacttag

SEQ ID NO: 15725 - DNA, 822 bp, Artificial Sequence
  derived and/or modified sequence
atggggatactgtctgtggatctcctgattactttgcaaatacttccggtgttttttagcaattgcctgttccttgccctttatgatagcgtgatcctcctgaagcacgtggttttgcttctctcaaggagcaagagcacacggggtgagtggagacgcatgctcacgagcgaagggctgaggtgcgtgtggaaatctttcttactcgatgcttataagcaggtgaagctcggagaggatgcccctaattcctcggtcgtgcacgtatccagcaccgagggcggagacaactcaggaaatggtacacaggaaaaaatcgcagaaggggctacatgtcacctgcttgacttcgcaagtcctgagagacccttggtcgtcaatttcggatctgctacttgacccccattcacttctcagctgcccgctttcaggaaactggtggaagaattctcatctgttgctgatttcctgctggtctatatcgacgaagcgcacccaagcgatggatgggcaatacctggcgattcttccctctccttcgaggttaagaagcatcagaaccaagaggatcggtgtgccgctgcccagcagctgctggagaggtttagcctccccccacagtgtagggttgtcgccgaccggatggataacaatgccaatattgcctatggggtggcgtttgaacgggtatgcatcgtgcagcggcagaagatcgcatacttgggcggtaaaggtcctttcagctataatttgcaggaagtaaggcactggctggaaaagaacttcagcaaaaggtgaaagaagacacgcttggccggatag

SEQ ID NO: 15726 - DNA, 822 bp, Artificial Sequence
  derived and/or modified sequence
atgggaatattaagcgtcgatctgctgatcaccctccagattctgccagttttcttttcaaactgtcttttccttgccctgtacgacagcgtcattctgttgaagcacgttgtgctcctactttccagatcaaagagcacgcgaggagaatggaggagaatgctcacgtccgagggtctgagatgtgtctggaagtcattcctcttggatgcctataaacaggttaaattaggcgaggacgcacccaactcttcagtggtgcatgtatctagcaccgaaggcggagataattcaggtaacgggacccaggaaaagattgctgaaggcgcaacatgccacctccttgacttcgcatcccctgaaaggccgctggttgttaacttcgggagcgcaacctgaccaccatttacatcacagctaccagcattccgcaagctggtggaagaattctcttccgtcgcagattttttgctggtgtatatagacgaggcccacccttcagatgggtgggccataccgggagactcttccctttctttcgaggtcaagaagcatcaaaaccaggaggatcgatgcgcagctgcacaacaactgctggaacgattctccctgcccccacagtgccgagttgtggctgatcgaatggataataatgccaatatagcttatggtgtcgcctttgaaagagtgtgtatcgtgcaacggcaaaagatcgcgtatctcgggggaaagggacctttctcttacaacctgcaagaagtgcggcattggctcgagaagaacttctctaagcgatgaaaaaagacacggcttgcgggttag

SEQ ID NO: 15727 - DNA, 399 bp, Artificial Sequence
  derived and/or modified sequence
atgggcatcctgagcgtggacctgctgatcaccctgcagatcctgcccgtgttcttcagcaactgcctgttcctggccctgtacgacagcgtgatcctgctgaagcacgtggtgctgctgctgagcagaagcaagagcaccagaggcgagtggagaagaatgctgaccagcgagggcctgagatgcgtgtggaagagcttcctgctggacgcctacaagcaggtgaagctgggcgaggacgcccccaacagcagcgtggtgcacgtgagcagcaccgagggcggcgacaacagcggcaacggcacccaggagaagatcgccgagggcgccacctgccacctgctggacttcgccagccccgagagacccctggtggtgaacttcggcagcgccacctag

SEQ ID NO: 15728 - DNA, 822 bp, Artificial Sequence
  derived and/or modified sequence
atgggcatcctgagcgtggacctgctgatcaccctgcagatcctgcccgtgttcttcagcaactgcctgttcctggccctgtacgacagcgtgatcctgctgaagcacgtggtgctgctgctgagcagaagcaagagcaccagaggcgagtggagaagaatgctgaccagcgagggcctgagatgcgtgtggaagagcttcctgctggacgcctacaagcaggtgaagctgggcgaggacgcccccaacagcagcgtggtgcacgtgagcagcaccgagggcggcgacaacagcggcaacggcacccaggagaagatcgccgagggcgccacctgccacctgctggacttcgccagccccgagagacccctggtggtgaacttcggcagcgccacctgaccccccttcaccagccagctgcccgccttcagaaagctggtggaggagttcagcagcgtggccgacttcctgctggtgtacatcgacgaggcccaccccagcgacggctgggccatccccggcgacagcagcctgagcttcgaggtgaagaagcaccagaaccaggaggacagatgcgccgccgcccagcagctgctggagagattcagcctgcccccccagtgcagagtggtggccgacagaatggacaacaacgccaacatcgcctacggcgtggccttcgagagagtgtgcatcgtgcagagacagaagatcgcctacctgggcggcaagggccccttcagctacaacctgcaggaggtgagacactggctggagaagaacttcagcaagagatgaaagaagaccagactggccggctag

SEQ ID NO: 15729 - DNA, 1462 bp, Artificial Sequence
  derived and/or modified sequence
tcttaccagtaggtagcctggaaaaaaaagagaagcaacagttcctgagggaagaatgcattaacaactcggatgggtgctgtctgccagcactgcagaggaacctacggagagggctgctgggagagaatgctcatacctcccaaggcgtcagcctgccctcccgcccccaagttgctttgctcaagagggtgaaggggaaccagagcgcacaagggaactgactcaggaggcagagaagatgggcatcctcagcgtagacttgctgatcacactgcaaattctgccagtttttttctccaactgcctcttcctggctctctatgactcggtcattctgctcaagcacgtggtgctgctgttgagccgctccaagtccactcgcggagagtggcggcgcatgctgacctcagagggactgcgctgcgtctggaagagcttcctcctcgatgcctacaaacaggtgaaattgggtgaggatgcccccaattccagtgtggtgcatgtctccagtacagaaggaggtgacaacagtggcaatggtacccaggagaagatagctgagggagccacatgccaccttcttgactttgccagccctgagcgcccactagtggtcaactttggctcagccacttgacctcctttcacgagccagctgccagccttccgcaaactggtggaagagttctcctcagtggctgacttcctgctggtctacattgatgaggctcatccatcagatggctgggcgataccgggggactcctctttgtcttttgaggtgaagaagcaccagaaccaggaagatcgatgtgcagcagcccagcagcttctggagcgtttctccttgccgccccagtgccgagttgtggctgaccgcatggacaataacgccaacatagcttacggggtagcctttgaacgtgtgtgcattgtgcagagacagaaaattgcttatctgggaggaaagggccccttctcctacaaccttcaagaagtccggcattggctggagaagaatttcagcaagagatgaaagaaaactagattagctggttaaaggtatgattataagagagcttattgttttaaaaagttatataaaggcaaggaaattaagaactgaatccatatttcaacagagccctattggcttactgaaagacaggagtttatctatcggaagaacatgaatctctaacagctccatacttctttcactactcaaatggcattgggctgagtaagtaaccatatcacctctcttcttagtaaaaagccctatgtgaaaagatcccaagatggagaggaagaaacgctaattcagcatgtgttcattctgcattgagaaggaactgatacatctgatgcatgctttgagaccagaagaaaagacttacctgaataattactacattagggaagctactgtctacgttaagataaagggtattgcctt

SEQ ID NO: 15730 - DNA, 6136 bp, Artificial Sequence
  derived and/or modified sequence
gggcttccttttaatttagttttttttccccttctcccccaacccccaaccttcccccttacctcccccaccccctttatcaccaccccccttttaaataagagggtgaaggggaaccagagcgcacaagggaactgactcaggaggcagagaagatgggcatcctcagcgtagacttgctgatcacactgcaaattctgccagtttttttctccaactgcctcttcctggctctctatgactcggtcattctgctcaagcacgtggtgctgctgttgagccgctccaagtccactcgcggagagtggcggcgcatgctgacctcagagggactgcgctgcgtctggaagagcttcctcctcgatgcctacaaacaggtgaaattgggtgaggatgcccccaattccagtgtggtgcatgtctccagtacagaaggaggtgacaacagtggcaatggtacccaggagaagatagctgagggagccacatgccaccttcttgactttgccagccctgagcgcccactagtggtcaactttggctcagccacttgacctcctttcacgagccagctgccagccttccgcaaactggtggaagagttctcctcagtggctgacttcctgctggtctacattgatgaggctcatccatcagatggctgggcgataccgggggactcctctttgtcttttgaggtgaagaagcaccagaaccaggaagatcgatgtgcagcagcccagcagcttctggagcgtttctccttgccgccccagtgccgagttgtggctgaccgcatggacaataacgccaacatagcttacggggtagcctttgaacgtgtgtgcattgtgcagagacagaaaattgcttatctgggaggaaagggccccttctcctacaaccttcaagaagtccggcattggctggagaagaatttcagcaagagatgaaagaaaactagattagctggttaaaggtatgattataagagagcttattgttttaaaaagttatataaaggcaaggaaattaagaactgaatccatatttcaacagagccctattggcttactgaaagacaggagtttatctatcggaagaacatgaatctctaacagctccatacttctttcactactcaaatggcattgggctgagtaagtaaccatatcacctctcttcttagtaaaaagccctatgtgaaaagatcccaagatggagaggaagaaacgctaattcagcatgtgttcattctgcattgagaaggaactgatacatctgatgcatgctttgagaccagaagaaaagacttacctgaataattactacattagggaagctactgtctacgttaagataaagggtattgccttggctctatttggcatggatggagcccagttggaaaattcccaaatattacaacaagtccttgaacccaggccatgtggttagacgttggtgttaaggttagaccttatgttagagtcatttctgatgttccagcttctagccatgtagtgctctcagtcttcataccccagaaattattggtatatttgtagataccgagaatgatccctcagtctgagaggttagaatgatcatctgtaatctgagggttaatttctaggcaggtggagagagtggtaaaaaagaaatgaaattgacaagctaggaaagaggaggcagaaagatttggaaaattcacagagtttcacccttaagctgtagagagtgggtcacatttgttagccacggaaacatagaaacatacacaaggccagaaaaagaagaaggagctcaactaaaagtggcatagagaatacacatataaaaacaatatatttgtcatatgctcctagagaggagaaaggggtgattgaaagaaaaaaaaatacttaaatatttgtaattgtgaggggtttcttttggaaataattacttttgaaccatgtatgtggtatgtatattttcagtgggttaattataccccatgatacctattaaaggaaaaccagtgggtctggtggtgctggtcttttcctccccattcctacaatttctatgtggcccaagtcattcctaatcttggtctctatagcagtgttctctctgaatgctgagctgaagaaattatacgtacatacacacatacatacatacatacaaatatatgtatatatattctcagctgctgcgggaggtaggtaccatggccattcagcacagccttgatttcctcccaaagtaggtgagctatagtgaagaataggtgcaaacaaacaagcttacttccattgcaaaatagaagaagaggaagttagagataattctgatcaatcattttggaggctttgttataaggcaacccccggtatatcatggaatttccattgacatttgaatttggacttggatcttcccttggtcccattagctgaggtttagtaatctaaagtccctatagtatatgattataatgctattttaaaaaatatatatataaaatatttttttctttttaaaatagacactatagttttacccataagtaatatttaaagattatagctcccaaaagaatggaccaaccactttcgtatcataatttctttttggtaaatatgagactattatgaaatcatagtatatgattgtatttaaaggtacaatcaaaggatcttttgtccattccattaataactgaataaaaaataaataaaatggatagaaaaaaactaaagttgaaaatacattcttaaactagttgtctgaattgagaaaagagtgagaactaggtgtgcaagaaccaaacgtattttattttattttttaaatgggagcaacatatcagtcgtgtcaccagctggtatattgtgtaaatattaaagctccattgggactgatttttcatggcaacatcagctttctaatgttctaaattctataaaaaccacccacaaagaaacaaagcaaatttcattatctaatgagttgctggaaaatcatattgagaataattatttcagattcctcagttgttaacttctacattcaaggcttatctctgcccccattgatttttaacctcaaaatggtgttgagatttacgtggaaccctaaagcagtaaaataaaaaacctggttgcagcacattcacactgttgtccttaaaattccccttttttctctatgtacgataaagtaacagtatgtcagataagccggtggggggatgagattaggctgaggcagtgctagtcaactggggaaaaggatgatggaaaaatcacccagttgtgctatatttttaaagaaggaggtcgtttatgtgtgcagacaattctccctgaggttagcccaatggagaaatgaagcagaggaaggaaacatagaaagacatgggctatcagggaggaagatgttcaatagaacatgcaagaatttctggaagaaaggctgtggaagggccaatggagaaaatgaatggacaaagctcaggaatcctacgctatgtagaatgtcttggtgttatcagggttaagcctgtaattatgtaacctatttatcgcaacatgaatttttatgatttcttgtgatgtattcttttatgaaattaacaagaactcattattttgaggtagaggaaaatcaatgctttatctgatatgctgagaaattattagattgccaatactcatgtgcgtttcatgtgttttataaggtttgttcctttgaagaattgtagttcttagtcccacagggaaatgtgtatctatttatatatcatagtataaatctatgatatatttatatcatatataaaagtctgagttctctttcttagtccctaatcatgtttctcccataggctgtgtttacatggagctatcggtttagccttttaagcttcattagcttgtctattattgaaatagtttccaagaaattttagatattatcataacatctgggtctactcaaacacttattgtttgaaagacttatgtcttggacctatcaaaaactgactttatttattgcttagtgaaaatactagtgggatcaacaatgattttcttgaatgggcatgaatggagatgcccgcacagtaatgtagaaatgtttcatacagctattaaaatgtaactgacctccttagaggcagattagtaactgttcctactttgtatagctaagtgacagtcacttaacttacatgactttcttttttcacattgggtctctggtcctgtgtcttcacctcatttatagcacgtctccttgatttttggtagtatcaacttcccagtgatctgttcagttaagttcttctcccgttaaccaggaagtgcttattctctcatcacagtgggaagaatagcctattgtctttcattttgcctgagtgtattttactatttgggctctgaaataaaaattatgaaatatggtgaggtcacatgttggtgctgccttgctgcataaaattctagagggcaggttagagacagtatgtatgccttcgggaaaattcaaaggtggattacaaggtgtcctcagcatgccctatggcctatgtgcgaagcaagaagaattgactgatttacaggacttctctttatgtcaatcttaagaggatggatgaatctggacatttgttccacccgacctctgactgatggtttggaaaataactttaattaggatcatatgaccattgaaaaaggaaaaatgtagactctgacttccgtcccactgaaggattaatgaaaacctttactagcatttagagcttttcagaacatccccactgtcatgtgtctcagcagtggagactgcaagtaaggcttttaattttaggaggtttttttttttttttttttttccctaaatggtatggccaaaagtcagagttaaaatatatatagttagattccaacttcctccttcactctaaaaatagaatccaaacccactcttcatatatgcttccagaatggggcttaagtaccaatctctgctttgcaatgggcacaatcttggtcatgtcctgaggctctctaagaaaagagaggatctaggatgggagagctagaaagttgctaactgggaagaacaaggccctgagggcttggtctaccaatctgggaagatttgaaaacaaacttctcgcaactgaaggaaggctgaaggctgctgcaagtcattgagtgactttaggatgagcaaaacattgggccacttcctaatgccctatgtgtatagtaccagaagcaaggtctcagacttaacagacccagctctgttccaaggtgagtctgaaccaatagaaagcaaacatgtgcagatatccaaacaagactgctcatgcaagtcggggctggctacccgtcttaggcagcaacagcagagctccagggagcttattcaatatttactgagacttcgaagacccagcagatgtttaatgaagtcactattttggctcaaaccctccacttctccccctcccctcaaaaagccaacaggtaaacacataaatgaaagaaacccacagaaggggatgggaaataaagaaaattctctcaagacttctccaggcccatgtcactggtcagcgtggtttttatgtgtattaggattgggggatgtgaagaaataagtatccagtactttataaccaaagcaattaaatgatattgggtagggaatgttggccagttttgtttagttttgcatcacattgtcaccagactcactagcccaagtaatcgggcgcccgaagagggagacagagatgtgcagagttgaccagtgtgcggatgataactactgacgaaagagtcatcgactcagttagtggttggatgtagtcacattagtttgcctctccccatctttgtctccctggcaaggagaatatgcgggacatgatgctaagagtcctgggtaaatgtggtgagaatgcacgcgtgcatatgctacacatatgtgcttctcagttgcagaaaatgaactgctttgggagattatcagtagaaagagtgttatcatattggtgctgagtgctatgtgtgcttatacaatttgttcttgtattttaataaactttgaataaaagaataaa

SEQ ID NO: 15731 - DNA, 6367 bp, Artificial Sequence
  derived and/or modified sequence
agactggtctagcctcccagcctacatctttcttcagtgctggatgcttcctgccctcaaacatcggactccaagttcttcagttttgagactcagactgactgtccttgctcctcaagcttgcagacagcctattgtgggacgttgtgatcattaggtagcctggaaaaaaaagagaagcaacagttcctgagggaagaatgcattaacaactcggatgggtgctgtctgccagcactgcagaggaacctacggagagggctgctgggagagaatgctcatacctcccaaggcgtcagcctgccctcccgcccccaagttgctttgctcaagagggtgaaggggaaccagagcgcacaagggaactgactcaggaggcagagaagatgggcatcctcagcgtagacttgctgatcacactgcaaattctgccagtttttttctccaactgcctcttcctggctctctatgactcggtcattctgctcaagcacgtggtgctgctgttgagccgctccaagtccactcgcggagagtggcggcgcatgctgacctcagagggactgcgctgcgtctggaagagcttcctcctcgatgcctacaaacaggtgaaattgggtgaggatgcccccaattccagtgtggtgcatgtctccagtacagaaggaggtgacaacagtggcaatggtacccaggagaagatagctgagggagccacatgccaccttcttgactttgccagccctgagcgcccactagtggtcaactttggctcagccacttgacctcctttcacgagccagctgccagccttccgcaaactggtggaagagttctcctcagtggctgacttcctgctggtctacattgatgaggctcatccatcagatggctgggcgataccgggggactcctctttgtcttttgaggtgaagaagcaccagaaccaggaagatcgatgtgcagcagcccagcagcttctggagcgtttctccttgccgccccagtgccgagttgtggctgaccgcatggacaataacgccaacatagcttacggggtagcctttgaacgtgtgtgcattgtgcagagacagaaaattgcttatctgggaggaaagggccccttctcctacaaccttcaagaagtccggcattggctggagaagaatttcagcaagagatgaaagaaaactagattagctggttaaaggtatgattataagagagcttattgttttaaaaagttatataaaggcaaggaaattaagaactgaatccatatttcaacagagccctattggcttactgaaagacaggagtttatctatcggaagaacatgaatctctaacagctccatacttctttcactactcaaatggcattgggctgagtaagtaaccatatcacctctcttcttagtaaaaagccctatgtgaaaagatcccaagatggagaggaagaaacgctaattcagcatgtgttcattctgcattgagaaggaactgatacatctgatgcatgctttgagaccagaagaaaagacttacctgaataattactacattagggaagctactgtctacgttaagataaagggtattgccttggctctatttggcatggatggagcccagttggaaaattcccaaatattacaacaagtccttgaacccaggccatgtggttagacgttggtgttaaggttagaccttatgttagagtcatttctgatgttccagcttctagccatgtagtgctctcagtcttcataccccagaaattattggtatatttgtagataccgagaatgatccctcagtctgagaggttagaatgatcatctgtaatctgagggttaatttctaggcaggtggagagagtggtaaaaaagaaatgaaattgacaagctaggaaagaggaggcagaaagatttggaaaattcacagagtttcacccttaagctgtagagagtgggtcacatttgttagccacggaaacatagaaacatacacaaggccagaaaaagaagaaggagctcaactaaaagtggcatagagaatacacatataaaaacaatatatttgtcatatgctcctagagaggagaaaggggtgattgaaagaaaaaaaaatacttaaatatttgtaattgtgaggggtttcttttggaaataattacttttgaaccatgtatgtggtatgtatattttcagtgggttaattataccccatgatacctattaaaggaaaaccagtgggtctggtggtgctggtcttttcctccccattcctacaatttctatgtggcccaagtcattcctaatcttggtctctatagcagtgttctctctgaatgctgagctgaagaaattatacgtacatacacacatacatacatacatacaaatatatgtatatatattctcagctgctgcgggaggtaggtaccatggccattcagcacagccttgatttcctcccaaagtaggtgagctatagtgaagaataggtgcaaacaaacaagcttacttccattgcaaaatagaagaagaggaagttagagataattctgatcaatcattttggaggctttgttataaggcaacccccggtatatcatggaatttccattgacatttgaatttggacttggatcttcccttggtcccattagctgaggtttagtaatctaaagtccctatagtatatgattataatgctattttaaaaaatatatatataaaatatttttttctttttaaaatagacactatagttttacccataagtaatatttaaagattatagctcccaaaagaatggaccaaccactttcgtatcataatttctttttggtaaatatgagactattatgaaatcatagtatatgattgtatttaaaggtacaatcaaaggatcttttgtccattccattaataactgaataaaaaataaataaaatggatagaaaaaaactaaagttgaaaatacattcttaaactagttgtctgaattgagaaaagagtgagaactaggtgtgcaagaaccaaacgtattttattttattttttaaatgggagcaacatatcagtcgtgtcaccagctggtatattgtgtaaatattaaagctccattgggactgatttttcatggcaacatcagctttctaatgttctaaattctataaaaaccacccacaaagaaacaaagcaaatttcattatctaatgagttgctggaaaatcatattgagaataattatttcagattcctcagttgttaacttctacattcaaggcttatctctgcccccattgatttttaacctcaaaatggtgttgagatttacgtggaaccctaaagcagtaaaataaaaaacctggttgcagcacattcacactgttgtccttaaaattccccttttttctctatgtacgataaagtaacagtatgtcagataagccggtggggggatgagattaggctgaggcagtgctagtcaactggggaaaaggatgatggaaaaatcacccagttgtgctatatttttaaagaaggaggtcgtttatgtgtgcagacaattctccctgaggttagcccaatggagaaatgaagcagaggaaggaaacatagaaagacatgggctatcagggaggaagatgttcaatagaacatgcaagaatttctggaagaaaggctgtggaagggccaatggagaaaatgaatggacaaagctcaggaatcctacgctatgtagaatgtcttggtgttatcagggttaagcctgtaattatgtaacctatttatcgcaacatgaatttttatgatttcttgtgatgtattcttttatgaaattaacaagaactcattattttgaggtagaggaaaatcaatgctttatctgatatgctgagaaattattagattgccaatactcatgtgcgtttcatgtgttttataaggtttgttcctttgaagaattgtagttcttagtcccacagggaaatgtgtatctatttatatatcatagtataaatctatgatatatttatatcatatataaaagtctgagttctctttcttagtccctaatcatgtttctcccataggctgtgtttacatggagctatcggtttagccttttaagcttcattagcttgtctattattgaaatagtttccaagaaattttagatattatcataacatctgggtctactcaaacacttattgtttgaaagacttatgtcttggacctatcaaaaactgactttatttattgcttagtgaaaatactagtgggatcaacaatgattttcttgaatgggcatgaatggagatgcccgcacagtaatgtagaaatgtttcatacagctattaaaatgtaactgacctccttagaggcagattagtaactgttcctactttgtatagctaagtgacagtcacttaacttacatgactttcttttttcacattgggtctctggtcctgtgtcttcacctcatttatagcacgtctccttgatttttggtagtatcaacttcccagtgatctgttcagttaagttcttctcccgttaaccaggaagtgcttattctctcatcacagtgggaagaatagcctattgtctttcattttgcctgagtgtattttactatttgggctctgaaataaaaattatgaaatatggtgaggtcacatgttggtgctgccttgctgcataaaattctagagggcaggttagagacagtatgtatgccttcgggaaaattcaaaggtggattacaaggtgtcctcagcatgccctatggcctatgtgcgaagcaagaagaattgactgatttacaggacttctctttatgtcaatcttaagaggatggatgaatctggacatttgttccacccgacctctgactgatggtttggaaaataactttaattaggatcatatgaccattgaaaaaggaaaaatgtagactctgacttccgtcccactgaaggattaatgaaaacctttactagcatttagagcttttcagaacatccccactgtcatgtgtctcagcagtggagactgcaagtaaggcttttaattttaggaggtttttttttttttttttttttccctaaatggtatggccaaaagtcagagttaaaatatatatagttagattccaacttcctccttcactctaaaaatagaatccaaacccactcttcatatatgcttccagaatggggcttaagtaccaatctctgctttgcaatgggcacaatcttggtcatgtcctgaggctctctaagaaaagagaggatctaggatgggagagctagaaagttgctaactgggaagaacaaggccctgagggcttggtctaccaatctgggaagatttgaaaacaaacttctcgcaactgaaggaaggctgaaggctgctgcaagtcattgagtgactttaggatgagcaaaacattgggccacttcctaatgccctatgtgtatagtaccagaagcaaggtctcagacttaacagacccagctctgttccaaggtgagtctgaaccaatagaaagcaaacatgtgcagatatccaaacaagactgctcatgcaagtcggggctggctacccgtcttaggcagcaacagcagagctccagggagcttattcaatatttactgagacttcgaagacccagcagatgtttaatgaagtcactattttggctcaaaccctccacttctccccctcccctcaaaaagccaacaggtaaacacataaatgaaagaaacccacagaaggggatgggaaataaagaaaattctctcaagacttctccaggcccatgtcactggtcagcgtggtttttatgtgtattaggattgggggatgtgaagaaataagtatccagtactttataaccaaagcaattaaatgatattgggtagggaatgttggccagttttgtttagttttgcatcacattgtcaccagactcactagcccaagtaatcgggcgcccgaagagggagacagagatgtgcagagttgaccagtgtgcggatgataactactgacgaaagagtcatcgactcagttagtggttggatgtagtcacattagtttgcctctccccatctttgtctccctggcaaggagaatatgcgggacatgatgctaagagtcctgggtaaatgtggtgagaatgcacgcgtgcatatgctacacatatgtgcttctcagttgcagaaaatgaactgctttgggagattatcagtagaaagagtgttatcatattggtgctgagtgctatgtgtgcttatacaatttgttcttgtattttaataaactttgaataaaagaataaa

SEQ ID NO: 15732 - protein, 446 aa, Artificial Sequence
  derived and/or modified sequence
MRTLNTSAMDGTGLVVERDFSVRILTACFLSLLILSTLLGNTLVCAAVIRFRHLRSKVTNFFVISLAVSDLLVAVLVMPWKAVAEIAGFWPFGSFCNIWVAFDIMCSTASILNLCVISVDRYWAISSPFRYERKMTPKAAFILISVAWTLSVLISFIPVQLSWHKAKPTSPSDGNATSLAETIDNCDSSLSRTYAISSSVISFYIPVAIMIVTYTRIYRIAQKQIRRIAALERAAVHAKNCQTTTGNGKPVECSQPESSFKMSFKRETKVLKTLSVIMGVFVCCWLPFFILNCILPFCGSGETQPFCIDSNTFDVFVWFGWANSSLNPIIYAFNADFRKAFSTLLGCYRLCPATNNAIETVSINNNGAAMFSSHHEPRGSISKECNLVYLIPHAVGSSEDLKKEEAAGIARPLEKLSPALSVILDYDTDVSLEKIQPITQNGQHPT

SEQ ID NO: 15733 - DNA, 1341 bp, Artificial Sequence
  derived and/or modified sequence
atgaggaccttaaacacgagcgccatggatggaacagggctggtggtggaacgtgacttttctgttcgaatattgactgcctgtttcttgtccctgcttatactgagtacgttgctgggcaatacactggtttgcgctgccgtcattagattccgacaccttaggagcaaggtgaccaacttttttgtcataagcctggcggtctccgacctgttagtcgctgtgcttgttatgccatggaaagctgtagcagagatagctggcttttggcccttcggaagcttttgcaatatatgggtggcattcgatatcatgtgctccactgcttcgatcctcaatttgtgtgttatttctgtggaccgctactgggctatttcctctccttttcgctatgaacgaaagatgactcctaaggccgcattcatactaatctccgtggcctggaccttgtccgtccttatcagtttcattcctgtgcaactttcctggcacaaagcgaagcccacatctccctccgacgggaacgccaccagcctggccgagacaatcgacaactgtgacagcagcctgagtcggacctacgccatctctagtagcgtgatttcattttatatccctgtcgcaatcatgatagttacgtacaccaggatctaccgaatcgcccagaagcagataagacggatcgctgcattggagcgcgccgctgtgcatgcaaagaactgccagacgacaactggcaacggaaaaccagtggaatgtagtcagcctgagtcatccttcaagatgtccttcaagcgtgagaccaaggtgctcaaaacactcagcgtgatcatgggagtgtttgtttgctgctggttgccgttctttatccttaattgtatcctgccattctgcgggtcaggcgagacccagccattttgcatcgactcaaatacattcgatgtgttcgtctggttcggatgggcaaactcgtccctaaacccgatcatttacgctttcaatgccgattttagaaaagcctttagcactctcctgggatgctaccggctctgtcctgctaccaataacgccattgagacagtttccattaacaataatggcgccgcaatgttctcctctcatcatgagccgagaggctccatctcaaaagagtgtaatctggtctacctgatccctcacgctgttggttcgtctgaggaccttaaaaaagaagaagccgccgggatcgctcgacccctggagaaactctctcccgcactgtctgtgattttggactacgacacagatgtctccctcgagaagattcaaccaattacccaaaacggccagcaccccacgtag

SEQ ID NO: 15734 - DNA, 1341 bp, Artificial Sequence
  derived and/or modified sequence
atgagaaccctaaatacaagtgccatggacggcacagggcttgttgtggaacgggatttttcagtgagaatcctcacagcttgttttctgagtctgcttatcctatccactctcctgggaaacactctggtttgcgccgccgtgataaggttcaggcacctgaggtctaaagtgacaaactttttcgtgatttcccttgctgtgagcgatttgctggtggccgtgctcgtaatgccctggaaagcagtggccgaaatcgctggcttttggccatttggcagtttttgcaatatttgggttgcattcgacataatgtgttctacagcctccatattgaatctgtgtgtgatcagtgttgacagatattgggctatctcgtcaccttttaggtacgaacgcaagatgacacccaaggcagcttttatccttatatctgtggcttggacactatcagtgttgatctcttttattccagtccagctgtcgtggcataaggcaaagccaacgtcgccaagtgacggcaatgccacttcacttgccgagacgatcgataattgtgacagttcgctatccaggacctacgcgatctcaagctcagttatctccttttacatacctgtagcaatcatgatcgtcacctacactaggatctatcggatagcccagaagcaaattcgccggatcgctgccctggagcgcgcagcggtgcatgcgaagaactgccaaactacaactggcaacggcaagcccgtggagtgcagccagcctgagtcatccttcaagatgtccttcaagagggagacgaaggttctgaagacactcagcgtgatcatgggtgtattcgtgtgctgctggctgccattcttcattctcaattgcattctgcctttttgcggaagtggcgagactcagcctttttgcatagattccaacactttcgatgtgtttgtgtggttcggctgggcaaactcctctctcaatccaatcatatatgcttttaacgctgactttcgtaaagctttttcgactctcctaggctgctatcggctttgccccgcaacaaataacgccattgagacggtttccatcaataataacggcgcggcaatgttcagttctcaccatgagccgaggggttcaatatcaaaggagtgtaacctcgtttatttgattcctcacgccgtgggctcttcagaagaccttaagaaagaggaagcggcgggaatcgcccggcccttggaaaaactgtccccggcactatccgtgattttggattatgatacagatgtgagtctcgagaaaatccagcccataactcagaacggccaacacccaacgtag

SEQ ID NO: 15735 - DNA, 1341 bp, Artificial Sequence
  derived and/or modified sequence
atgaggaccctgaacaccagcgccatggatggcaccggcctggtggtggagcgggacttctctgtgcgcatcctgacagcctgcttcctgagcctgctgatcctgagcaccctgctgggcaacaccctggtgtgtgccgctgtgatccgcttccgccacctgcggagcaaggtgaccaacttcttcgtcatcagcctggccgtgtctgacctgctggtggccgtgctggtgatgccctggaaggctgtggccgagattgctggcttctggcccttcggcagcttctgcaacatctgggtggcctttgacatcatgtgcagcacagccagcatcctgaacctgtgtgtgatctctgtggaccgctactgggccatcagcagccccttccgctatgaaaggaagatgacccccaaggccgccttcatcctgatctctgtggcctggaccctgtctgtgctgatctccttcatccctgtgcagctgtcctggcacaaggccaagcccaccagccccagtgatggaaatgccaccagcctggccgagaccatcgacaactgtgacagcagcctgagcaggacctacgccatcagcagcagcgtcatctccttctacatccctgtggccatcatgattgtgacctacacccgcatctaccgcatcgcccagaagcagatcagaagaattgctgccctggagagagctgctgtgcacgccaagaactgccagaccaccactggaaatggcaagcctgtggagtgcagccagcctgagagcagcttcaagatgtccttcaagcgggagaccaaggtgctgaagaccctgagcgtcatcatgggcgtgtttgtgtgctgctggctgcccttcttcatcctgaactgcatcctgcccttctgtggcagcggggagacccagcccttctgcatcgacagcaacacctttgatgtgtttgtgtggtttggctgggccaacagcagcctgaaccccatcatctatgccttcaatgctgacttcaggaaggccttcagcaccctgctgggctgctaccgcctgtgcccagccaccaacaatgccatcgagaccgtgtccatcaacaacaacggggccgccatgttcagcagccaccacgagccccggggcagcatcagcaaggagtgcaacctggtgtacctgatcccccatgctgtgggcagcagcgaggacctgaagaaggaggaggccgccggcatcgcccggcccctggagaagctgagccctgccctgagcgtcatcctggactatgacacagatgtgtccctggagaagatccagcccatcacccagaatggccagcaccccacctag

SEQ ID NO: 15736 - DNA, 1341 bp, Artificial Sequence
  derived and/or modified sequence
atgcggaccctgaacaccagcgccatggacggcaccggcctggtggtggagcgcgatttctctgtgagaatcctgaccgcatgttttctgtcactcctcatactctcaacattgttggggaatacactcgtttgtgctgcagttataagatttcgccacttaagatctaaagttactaattttttcgtgatcagcctggccgtcagcgacctcctcgtggctgtattggtcatgccttggaaggctgtggctgagatcgccggtttctggccttttggctctttttgcaacatctgggtggctttcgatattatgtgtagcaccgcctccatccttaatctgtgtgttattagcgtggacagatactgggccatttccagcccattccggtacgagaggaagatgacacctaaggctgctttcatcctaatctcagtggcctggactctatccgtgctgatctcatttatccctgtccaactcagctggcacaaggccaaacctacctcccccagcgacgggaatgccacctcactggccgagacaattgacaattgcgactccagcctgagtagaacctatgccataagctcgtccgtgatctcgttctacatccccgtggccatcatgatagtcacctacacccgcatctatagaatcgcccaaaaacagatccgccgcatcgccgctctggagagagctgctgtccacgcgaagaactgccaaaccaccaccgggaacggaaagccagtggagtgttctcagcccgaatcaagcttcaagatgagctttaaaagggagactaaggttctgaagacgctctcggtcatcatgggcgtgttcgtgtgttgctggcttccctttttcatcctgaactgtatcctgccgttttgcggctcaggcgaaacccaaccattttgtatcgactccaacacgttcgacgtctttgtgtggttcggatgggccaattcatctctcaatcctatcatctatgcgttcaacgcggacttcaggaaagctttctcaactctccttggttgttaccgcctttgtcctgcaacaaataacgctatcgaaacggtcagcattaataacaatggcgccgccatgttttcatctcatcatgaacccagaggcagtatctctaaagagtgcaatctggtttatctgattcctcatgctgtgggaagcagtgaggatctgaagaaggaggaggccgcaggaattgcacgtcccctggaaaagctgtcaccagctctctctgttattcttgattacgacacagacgtgtcgctggaaaagatccagccaatcacacagaacggacagcacccgacttag

SEQ ID NO: 15737 - DNA, 1341 bp, Artificial Sequence
  derived and/or modified sequence
atgcggaccctgaacaccagcgccatggacggcaccggcctggtggtggagcgggacttcagcgtcaggatcctgacagcttgttttctctcgttgttaatcctgtctacccttctcggcaacactctggtctgcgcagctgtcatacggtttagacatctgcggtccaaagtcaccaattttttcgtgatcagccttgccgtcagcgatcttctggtggcagttctggtgatgccttggaaggcagtggctgaaatcgcaggattctggccatttggtagcttctgtaacatttgggtggcgttcgatataatgtgttccacagcttctatactcaatctgtgcgtgatctctgtcgatcgttattgggccatcagtagtccattcagatatgaacggaagatgactcctaaagccgcattcattttaatcagcgtggcctggactctgtctgtgctcatttcttttattcctgtccaactatcctggcacaaagccaaacctacaagcccctccgatggcaatgctactagcttggctgagactatcgataattgtgattcatctctgtctcgcacctacgccatcagttcaagcgtcatcagtttctatatccccgtagccatcatgattgtgacttatacccggatttacaggattgcacagaagcagattaggaggattgccgctctcgaacgtgccgctgtgcacgccaagaattgtcaaacaactaccggcaacggcaagccagtagaatgctcacagcccgagagctccttcaagatgtccttcaagagagagacaaaagtattgaagacactaagcgtcattatgggggtctttgtgtgctgttggctccccttctttattctcaattgtatcttgccattctgtgggagcggggagacccagccattttgcattgatagtaacacttttgacgtattcgtttggttcggctgggctaatagcagcttgaatccaatcatatacgccttcaatgccgacttccgcaaagcgttctccacattgttgggctgttatcgcctatgccctgccacaaacaacgcgattgaaacagtcagcatcaataataacggcgccgctatgtttagctctcatcatgagccccgaggctctatcagtaaggaatgcaatctcgtgtacctgatcccccacgccgtgggcagctcggaagatctgaagaaagaggaggctgccggcattgctcgtccacttgaaaagctcagcccagctttatcagtcatactagactacgacactgatgtgtcgctggaaaaaattcaacctattactcaaaacggacaacatcctacctag

SEQ ID NO: 15738 - DNA, 1341 bp, Artificial Sequence
  derived and/or modified sequence
atgcgaacattaaatacctccgccatggacggaacaggattagtggtggaacgtgattttagcgtgaggatcctcacagcctgttttttgagccttttaatactgtctactcttctgggaaatacactcgtgtgtgccgctgtaatcagatttaggcacctcaggagtaaggtaacaaactttttcgtaatttctctggcagtcagcgacctgctagtggccgtgctggttatgccatggaaagccgttgcagaaattgctggattttggccgtttggctcattctgtaatatttgggtcgcatttgacataatgtgtagtacggcaagcatcctgaatttgtgtgtgatctcagtcgaccgctactgggcaatctcttccccatttagatacgaaagaaaaatgacgcccaaagcagcctttattttgatttccgtagcgtggacactatccgtgctgatttctttcattcccgtacagctgtcctggcacaaagccaaacctaccagccctagcgacggaaatgcgaccagcctggcagagacaatcgataattgtgatagttcgctgtcacggacctacgctatatcatcctccgttattagcttctacataccagtggccatcatgattgtcacgtatacaaggatttaccgaatagcacaaaaacagattaggcggattgcggcattagagcgagccgctgtgcacgccaaaaactgtcagaccacgactggaaatgggaagcctgttgagtgttcccaacctgaatcctcttttaagatgtcctttaagcgcgagactaaggtgttaaagactctcagcgttatcatgggggtgttcgtttgttgttggctgcccttcttcattctgaattgcatcctccccttttgcggcagtggggaaacacagcccttttgtatagattctaacacctttgatgtgtttgtgtggtttggatgggcgaacagcagcttgaaccctattatatatgcctttaatgcagattttcgcaaagcattttcgactctgctgggttgttaccgactatgcccagctactaataacgctatcgaaaccgttagcatcaataataatggggcagctatgttttccagtcaccacgaacctcgcggatcgatttcaaaggaatgtaatctggtgtacctgatacctcacgccgtgggtagctccgaagacctgaaaaaggaagaggctgccggtatcgcacgacctctcgaaaagctttctccagcactaagcgtgatccttgactacgataccgatgtatcgctggagaagatacaacctatcactcagaatgggcagcatcctacgtag

SEQ ID NO: 15739 - DNA, 1341 bp, Artificial Sequence
  derived and/or modified sequence
atgcgcaccttgaatacttctgcaatggacggaactggcctggtcgtggaacgcgactttagcgtgcgtattctgacagcttgcttcctgtctctgctgatactgtctacacttctgggaaacactcttgtctgcgccgctgtgattcggttccggcacctgagaagcaaggtgactaacttcttcgtgataagtcttgctgtgtctgatttactggtggctgtcctggtgatgccctggaaggctgtagcagaaattgccggattctggccattcggctctttctgcaacatctgggtggctttcgacatcatgtgcagcaccgccagtatcctcaacctatgcgtgatcagtgtagacagatattgggcgatttcttccccatttcgatacgaacgcaaaatgaccccaaaggctgcattcattctaattagcgtggcctggacattgtcagtactgattagtttcatcccagtgcaacttagttggcacaaggctaagcctacctctccaagcgatggaaatgctactagcctcgcggagaccatcgataactgcgatagcagcctgagtaggacctatgcgatctcttcatccgtgatcagcttctatatcccggtcgcaattatgattgttacctacacccggatttaccggatcgctcagaagcaaatccgcagaatcgcagctttggagagagctgctgtgcacgctaagaactgtcagactaccactgggaacggcaagcctgttgaatgctctcagcccgagtcatctttcaaaatgtccttcaagagggagaccaaggtccttaaaacattaagcgtcattatgggcgtgtttgtctgctgctggcttcctttcttcatactgaattgcatcctgcccttctgtgggagtggcgaaactcaaccgttttgcatcgactccaacacctttgacgtgttcgtatggttcggttgggccaacagttctctcaacccgatcatttacgcgttcaatgccgacttcaggaaagcttttagcaccctcttaggatgctaccgactctgcccggctaccaataacgctattgaaaccgtgtcaataaataataacggcgcagcgatgtttagctcccaccacgagcctagggggagcatcagcaaagagtgcaacctggtctatctcatcccccatgcagttgggagtagtgaagacctgaaaaaggaagaagccgcaggaattgctaggcctctggagaagttgagcccggcactgagtgtgattctggactacgacaccgatgtgagccttgaaaaaattcagcctatcacacagaacggacaacatcctacgtag

SEQ ID NO: 15740 - DNA, 1341 bp, Artificial Sequence
  derived and/or modified sequence
atgagaaccctgaacaccagcgccatggacggcaccggcctggtggtggagagagacttcagcgtgagaatcctgaccgcctgcttcctgagcctgctgatcctgagcaccctgctgggcaacaccctggtgtgcgccgccgtgatcagattcagacacctgagaagcaaggtgaccaacttcttcgtgatcagcctggccgtgagcgacctgctggtggccgtgctggtgatgccctggaaggccgtggccgagatcgccggcttctggcccttcggcagcttctgcaacatctgggtggccttcgacatcatgtgcagcaccgccagcatcctgaacctgtgcgtgatcagcgtggacagatactgggccatcagcagccccttcagatacgagagaaagatgacccccaaggccgccttcatcctgatcagcgtggcctggaccctgagcgtgctgatcagcttcatccccgtgcagctgagctggcacaaggccaagcccaccagccccagcgacggcaacgccaccagcctggccgagaccatcgacaactgcgacagcagcctgagcagaacctacgccatcagcagcagcgtgatcagcttctacatccccgtggccatcatgatcgtgacctacaccagaatctacagaatcgcccagaagcagatcagaagaatcgccgccctggagagagccgccgtgcacgccaagaactgccagaccaccaccggcaacggcaagcccgtggagtgcagccagcccgagagcagcttcaagatgagcttcaagagagagaccaaggtgctgaagaccctgagcgtgatcatgggcgtgttcgtgtgctgctggctgcccttcttcatcctgaactgcatcctgcccttctgcggcagcggcgagacccagcccttctgcatcgacagcaacaccttcgacgtgttcgtgtggttcggctgggccaacagcagcctgaaccccatcatctacgccttcaacgccgacttcagaaaggccttcagcaccctgctgggctgctacagactgtgccccgccaccaacaacgccatcgagaccgtgagcatcaacaacaacggcgccgccatgttcagcagccaccacgagcccagaggcagcatcagcaaggagtgcaacctggtgtacctgatcccccacgccgtgggcagcagcgaggacctgaagaaggaggaggccgccggcatcgccagacccctggagaagctgagccccgccctgagcgtgatcctggactacgacaccgacgtgagcctggagaagatccagcccatcacccagaacggccagcaccccacctag

SEQ ID NO: 15741 - DNA, 2342 bp, Artificial Sequence
  derived and/or modified sequence
gaattcaggggctttctggtgcccaagacagtgacctgcagcaagggagtcagaagacagatgtagaaatcaagagtgaccatccacgggattgacttggattgccactcaagcggtcctctcatggaatgttggtgaggccctctgccagggaagcaatctggctgtgcaaagtgctgcctggtggggaggactcctggaaatctgactgacccctattccctgcttgggaacttgaggggtgtcagagcccctgatgtgctttctcttaggaagatgaggactctgaacacctctgccatggacgggactgggctggtggtggagagggacttctctgttcgtatcctcactgcctgtttcctgtcgctgctcatcctgtccacgctcctggggaacacgctggtctgtgctgccgttatcaggttccgacacctgcggtccaaggtgaccaacttctttgtcatctccttggctgtgtcagatctcttggtggccgtcctggtcatgccctggaaggcagtggctgagattgctggcttctggccctttgggtccttctgtaacatctgggtggcctttgacatcatgtgctccactgcatccatcctcaacctctgtgtgatcagcgtggacaggtattgggctatctccagccctttccggtatgagagaaagatgacccccaaggcagccttcatcctgatcagtgtggcatggaccttgtctgtactcatctccttcatcccagtgcagctcagctggcacaaggcaaaacccacaagcccctctgatggaaatgccacttccctggctgagaccatagacaactgtgactccagcctcagcaggacatatgccatctcatcctctgtaataagcttttacatccctgtggccatcatgattgtcacctacaccaggatctacaggattgctcagaaacaaatacggcgcattgcggccttggagagggcagcagtccacgccaagaattgccagaccaccacaggtaatggaaagcctgtcgaatgttctcaaccggaaagttcttttaagatgtccttcaaaagagaaactaaagtcctgaagactctgtcggtgatcatgggtgtgtttgtgtgctgttggctacctttcttcatcttgaactgcattttgcccttctgtgggtctggggagacgcagcccttctgcattgattccaacacctttgacgtgtttgtgtggtttgggtgggctaattcatccttgaaccccatcatttatgcctttaatgctgattttcggaaggcattttcaaccctcttaggatgctacagactttgccctgcgacgaataatgccatagagacggtgagtatcaataacaatggggccgcgatgttttccagccatcatgagccacgaggctccatctccaaggagtgcaatctggtttacctgatcccacatgctgtgggctcctctgaggacctgaaaaaggaggaggcagctggcatcgccagacccttggagaagctgtccccagccctatcagtcatattggactatgacactgacgtctctctggagaagatccaacccatcacacaaaacggtcagcacccaacctgaactcgcagatgaatcctgccacacatgctcatcccaaaagctagaggagattgctctggggcttgctattaagaaactaaggtacggtgagactctgaggtgtcaggagagccctctgctgctttccaacacacaattaactccgtttccaaatacattccagtgtattttctgtgttgttcatagtcaatcaaacagggacactacaaacatggggagccataagggacatgtctttggcttcagaattgtttttagaaatttattcttatcttaggatttaccaaatagggcaaagaatcaacagtgaacagcttcacttaaaatcaaatttttctgggaagaaaatgagatgggttgagtttgctgtatacaaacaggtgctaacactgttcccagcaaagttttcagattgtaaaggtaggtgcatgccttcataaattatttctaaaacattaattgaggcttacagtaggagtgagaaatttttttccagaattgagagatgttttgttgatattggttctatttatttattgtatatatggatatttttaatttatgatataataaatatatatttatcatatttaataggataaattaatgagttttatccaagaccttacaaccacatttctggccatttaactagcactttataagccaatgaagcaaacacacagactctgtgagattctaaatgttcatgtgtaacttctaga

SEQ ID NO: 15742 - DNA, 3373 bp, Artificial Sequence
  derived and/or modified sequence
ggctcgctgcctcgcattgccacaggctcctgagaggtcgcgggcagtgcctgcggggaggcgcggggccctgctctgtagggctgaaggccgcccgaggttcgccaaggctctgggctctcgaaaggaagccaagaaaagaagctgcccaggtgaccagtcctgggagtgctctctcccaaggaagctccgagcgcccaggagcccttagccggggtctagtgccctttgaacaatctccagctcttcaaggaagtgggctgccgccgcctctcttgggacctggcctgggatcctttccccaaacgcaccccggcgatttttgcgcaccgggagccgaacccctgctgcgcgcagctggctgggctcaggcgcgcttcctcaacgtttcggagccgctgcccccagcgaagtccacattccaagctccaggggctttgagagagacgaccccaaggcaaggcgtttggagagctgctgaggagccaggggcttggaggagcgagaagacatgtattttcagctgagtctcagaaggggagaatctcctgtcaccaccagaaaagcaacagccccgaaatgtgattgcaactgactagcagagcagaggcccaggagtcactggattgatgatttagaatatgctaaaaagccagtgctttatttggggaattcaggggctttctggtgcccaagacagtgacctgcagcaagggagtcagaagacagatgtagaaatcaagagtgaccatccacgggattgacttggattgccactcaagcggtcctctcatggaatgttggtgaggccctctgccagggaagcaatctggctgtgcaaagtgctgcctggtggggaggactcctggaaatctgactgacccctattccctgcttgggaacttgaggggtgtcagagcccctgatgtgctttctcttaggaagatgaggactctgaacacctctgccatggacgggactgggctggtggtggagagggacttctctgttcgtatcctcactgcctgtttcctgtcgctgctcatcctgtccacgctcctggggaacacgctggtctgtgctgccgttatcaggttccgacacctgcggtccaaggtgaccaacttctttgtcatctccttggctgtgtcagatctcttggtggccgtcctggtcatgccctggaaggcagtggctgagattgctggcttctggccctttgggtccttctgtaacatctgggtggcctttgacatcatgtgctccactgcatccatcctcaacctctgtgtgatcagcgtggacaggtattgggctatctccagccctttccggtatgagagaaagatgacccccaaggcagccttcatcctgatcagtgtggcatggaccttgtctgtactcatctccttcatcccagtgcagctcagctggcacaaggcaaaacccacaagcccctctgatggaaatgccacttccctggctgagaccatagacaactgtgactccagcctcagcaggacatatgccatctcatcctctgtaataagcttttacatccctgtggccatcatgattgtcacctacaccaggatctacaggattgctcagaaacaaatacggcgcattgcggccttggagagggcagcagtccacgccaagaattgccagaccaccacaggtaatggaaagcctgtcgaatgttctcaaccggaaagttcttttaagatgtccttcaaaagagaaactaaagtcctgaagactctgtcggtgatcatgggtgtgtttgtgtgctgttggctacctttcttcatcttgaactgcattttgcccttctgtgggtctggggagacgcagcccttctgcattgattccaacacctttgacgtgtttgtgtggtttgggtgggctaattcatccttgaaccccatcatttatgcctttaatgctgattttcggaaggcattttcaaccctcttaggatgctacagactttgccctgcgacgaataatgccatagagacggtgagtatcaataacaatggggccgcgatgttttccagccatcatgagccacgaggctccatctccaaggagtgcaatctggtttacctgatcccacatgctgtgggctcctctgaggacctgaaaaaggaggaggcagctggcatcgccagacccttggagaagctgtccccagccctatcagtcatattggactatgacactgacgtctctctggagaagatccaacccatcacacaaaacggtcagcacccaacctgaactcgcagatgaatcctgccacacatgctcatcccaaaagctagaggagattgctctggggcttgctattaagaaactaaggtacggtgagactctgaggtgtcaggagagccctctgctgctttccaacacacaattaactccgtttccaaatacattccagtgtattttctgtgttgttcatagtcaatcaaacagggacactacaaacatggggagccataagggacatgtctttggcttcagaattgtttttagaaatttattcttatcttaggatttaccaaatagggcaaagaatcaacagtgaacagcttcacttaaaatcaaatttttctgggaagaaaatgagatgggttgagtttgctgtatacaaacaggtgctaacactgttcccagcaaagttttcagattgtaaaggtaggtgcatgccttcataaattatttctaaaacattaattgaggcttacagtaggagtgagaaatttttttccagaattgagagatgttttgttgatattggttctatttatttattgtatatatggatatttttaatttatgatataataaatatatatttatcatatttaataggataaattaatgagttttatccaagaccttacaaccacatttctggccatttaactagcactttataagccaatgaagcaaacacacagactctgtgagattctaaatgttcatgtgtaacttctagaaacacagcagaaactgatagataagggaataaagttgaaatgattccttaaaattcatggacacagataaatgcaaggtgagaattgacaaatgctataaatgctttctttttctgaaaagattttgaaaaatttaaaaaagtatagctactactgtgttcaaaacgttttaaatgacaaatgactttcccaggggaatttgcagttctgtaaatatcttaaataaaagccaacttaagaagagcccagcattaaatttacgatcttaggtggtaatgaaaagtatatgctgctttgtatttatgtaaaataattggccctctccatcttttctcatttcatgtgtcaggtagtttttctga

SEQ ID NO: 15743 - protein, 445 aa, Artificial Sequence
  derived and/or modified sequence
MDPLNLSWYDDDLERQNWSRPFNGSDGKADRPHYNYYATLLTLLIAVIVFGNVLVCMAVSREKALQTTTNYLIVSLAVADLLVATLVMPWVVYLEVVGEWKFSRIHCDIFVTLDVMMCTASILNLCAISIDRYTAVAMPMLYNTRYSSKRRVTVMISIVWVLSFTISCPLLFGLNNADQNECIIANPAFVVYSSIVSFYVPFIVTLLVYIKIYIVLRRRRKRVNTKRSSRAFRAHLRAPLKGNCTHPEDMKLCTVIMKSNGSFPVNRRRVVQEAARRAQELEMEMLSSTSPPERTRYSPIPPSHHQLTLPDPSHHGLHSTPDSPAKPEKNGHAKDHPKIAKIFEIQTMPNGKTRTSLKTMSRRKLSQQKEKKATQMLAIVLGVFIICWLPFFITHILNIHCDCNIPPVLYSAFTWLGYVNSAVNPIIYTTFNIEFRKAFLKILHC

SEQ ID NO: 15744 - protein, 443 aa, Artificial Sequence
  derived and/or modified sequence
MDPLNLSWYDDDLERQNWSRPFNGSDGKADRPHYNYYATLLTLLIAVIVFGNVLVCMAVSREKALQTTTNYLIVSLAVADLLVATLVMPWVVYLEVVGEWKFSRIHCDIFVTLDVMMCTASILNLCAISIDRYTAVAMPMLYNTRYSSKRRVTVMISIVWVLSFTISCPLLFGLNNADQNECIIANPAFVVYSSIVSFYVPFIVTLLVYIKIYIVLRRRRKRVNTKRSSRAFRAHLRAPLKGNCTHPEDMKLCTVIMKSNGSFPVNRRRVEAARRAQELEMEMLSSTSPPERTRYSPIPPSHHQLTLPDPSHHGLHSTPDSPAKPEKNGHAKDHPKIAKIFEIQTMPNGKTRTSLKTMSRRKLSQQKEKKATQMLAIVLGVFIICWLPFFITHILNIHCDCNIPPVLYSAFTWLGYVNSAVNPIIYTTFNIEFRKAFLKILHC

SEQ ID NO: 15745 - protein, 442 aa, Artificial Sequence
  derived and/or modified sequence
MDPLNLSWYDDDLERQNWSRPFNGSDGKADRPHYNYYATLLTLLIAVIVFGNVLVCMAVSREKALQTTTNYLIVSLAVADLLVATLVMPWVVYLEVGEWKFSRIHCDIFVTLDVMMCTASILNLCAISIDRYTAVAMPMLYNTRYSSKRRVTVMISIVWVLSFTISCPLLFGLNNADQNECIIANPAFVVYSSIVSFYVPFIVTLLVYIKIYIVLRRRRKRVNTKRSSRAFRAHLRAPLKGNCTHPEDMKLCTVIMKSNGSFPVNRRRVEAARRAQELEMEMLSSTSPPERTRYSPIPPSHHQLTLPDPSHHGLHSTPDSPAKPEKNGHAKDHPKIAKIFEIQTMPNGKTRTSLKTMSRRKLSQQKEKKATQMLAIVLGVFIICWLPFFITHILNIHCDCNIPPVLYSAFTWLGYVNSAVNPIIYTTFNIEFRKAFLKILHC

SEQ ID NO: 15746 - DNA, 1338 bp, Artificial Sequence
  derived and/or modified sequence
atggacccattaaacctaagctggtatgatgacgatcttgagaggcagaattggtccagaccctttaacgggagtgacggaaaggcagaccgccctcactacaactattacgccacactgctgacgctgctgatcgcggtgatcgtcttcgggaatgtgctggtgtgtatggcagtgtctagggaaaaagccttgcagacaaccacaaactacctgatcgtctcattagccgtggcagacctgctggtggctacattagtgatgccctgggtcgtttatctggaggtggttggggaatggaaattctccaggattcactgtgacatttttgttacacttgacgtaatgatgtgcacagcgagcatcttgaatctatgtgcgatatcaatcgatcgctacacagcagttgcaatgcccatgttatataacacacgatattctagcaaaagacgtgtcactgtgatgatttcaattgtgtgggttctcagcttcacgatcagctgtccactgctgttcggcctgaacaatgccgatcaaaatgagtgcatcatcgcaaatccagcctttgtggtctactcctcaatcgtgtcattttacgtccccttcatcgtcacgttgctggtttacatcaagatttatatcgtccttcggaggagacggaaacgcgtgaataccaaacggagcagccgagcatttcgcgcccacctgcgcgctcctcttaaaggcaactgtactcaccccgaagatatgaaactttgcactgtaattatgaagtcaaacggaagcttcccggttaatcgcagaagggttgtgcaagaggccgccagaagagcacaggagctagagatggagatgcttagttcaacttcgccacccgagagaacacggtattcaccgatccccccatcacatcaccagctgacactgccagacccatcccaccacggtttgcactcaaccccagacagccccgccaagccagaaaaaaatggacatgccaaagatcacccgaaaattgcaaagatctttgagatacagactatgcccaacggaaagacacgaacgagcctgaaaactatgtccagacggaaactgtcacagcagaaggaaaagaaagcaacccagatgctggccattgttctgggagtgtttatcatctgctggttgccattcttcatcacgcatattctcaacatccactgtgactgtaatattccaccagtcctttacagcgcatttacttggcttggctatgtgaattccgcggtcaaccccatcatctacactaccttcaacattgagttccgcaaagcctttctgaaaatcctgcattgttag

SEQ ID NO: 15747 - DNA, 1332 bp, Artificial Sequence
  derived and/or modified sequence
atggatcctctgaacctgagctggtacgatgatgatctagagaggcagaactggtcacggccctttaacggctctgatggcaaggcggaccgaccgcactacaattattacgccaccctgctcaccttactcatcgctgttatcgtcttcggcaacgtcctggtgtgtatggccgtaagtcgtgaaaaggctctgcagaccaccactaattacctgatcgtaagccttgcagttgccgatttgctcgtggctacgcttgtgatgccctgggtggtgtatctcgaagtagtcggggagtggaagttctccagaattcactgcgacatttttgtgactctcgacgtcatgatgtgtacagcgtccattctgaatctgtgtgccatcagtattgacagatacaccgctgtcgccatgccaatgctgtataatacgaggtactcttcaaagagaagagtcacagtgatgatctctatcgtgtgggtcctttcattcacaatttcttgccccctgctgttcgggttgaataatgccgaccagaacgagtgcatcatagccaaccctgccttcgtggtgtactcttccatcgttagcttttatgtcccgttcatcgtaacattattggtctacatcaaaatttatatcgtgctacggcggaggagaaagagggtcaacacaaagaggagtagtagagcctttagggcccatttaagggctcctttaaagggcaattgtacccaccccgaggatatgaagctctgtacggtaataatgaaaagcaatggttccttcccagtgaacaggcgacgcgtcgaggctgcaagaagagctcaggaactggagatggaaatgctgagctctacgtcaccccctgaaaggacgagatacagccccattcccccatctcaccaccagttgactctccccgaccccagtcatcatggccttcatagcactcccgacagcccggcaaaacctgaaaagaatggacacgccaaggaccatcccaaaatagccaaaattttcgaaattcaaacaatgcccaatggaaaaactcggacaagtctgaagaccatgagtcgcagaaaactgtctcagcaaaaagaaaagaaggctacacagatgctagcgatcgttctgggggtgttcattatctgttggcttccattcttcattacccatatcctgaacattcactgcgactgtaacataccacccgtgttgtatagcgccttcacctggctcggatacgtaaattctgccgtgaaccccatcatttacaccacatttaatattgagtttcgtaaggctttcctgaaaattctgcactgttag

SEQ ID NO: 15748 - DNA, 1338 bp, Artificial Sequence
  derived and/or modified sequence
atggaccccttgaatttatcgtggtacgatgacgacttagagcggcagaattggtctcgcccatttaatggatccgacggcaaggccgataggccacattacaattactatgctactttgttgaccctgctgatcgccgtgattgtctttgggaatgttctggtctgtatggcagtcagtagggagaaggcgctccagacaacaaccaattaccttatcgtgagtctcgcagtcgccgacttgctcgtcgccacgcttgttatgccatgggtcgtttatctcgaagtggtcggagaatggaaattctcacgcattcattgtgacatattcgtcactcttgatgttatgatgtgcactgcttctatcttaaacctttgcgcgattagcatcgataggtataccgccgtagctatgccaatgctgtacaacacccgatatagctctaaacgacgcgttacggttatgattagcatcgtctgggtgctgtcgtttacgatttcttgtcccctgctgttcggactgaataacgcggaccagaatgagtgcattattgctaatcctgcgtttgtagtatattcgagcattgtgtctttctatgtccccttcatcgtgacactgttagtgtacatcaagatatatatcgtgttgagacgccgccgtaagcgggtgaataccaaacggagcagccgggccttccgagcgcaccttagagccccgcttaagggcaactgtacgcatcctgaggatatgaaactatgcacagtgatcatgaagagcaatggcagctttcccgtaaaccgtaggagagtagtgcaagaagccgctcgcagggcccaggaattggagatggagatgctgagcagcacctctccacccgaaagaacccgatactcccctattccgcctagtcatcaccagctcaccttgccagacccttctcaccacggactgcacagcaccccggactcacccgcgaaacctgaaaaaaacggtcacgccaaagaccacccaaaaatcgcgaagatctttgagatccaaactatgccgaatggcaagacacgaaccagcctgaagacaatgagcaggcgcaagctaagccagcagaaggagaaaaaggctacgcaaatgctggctatcgtgctcggcgtatttattatctgttggctgccctttttcataactcacattctgaacatccactgcgactgcaacattcccccagtcctctattctgcattcacgtggctgggttacgttaactcagccgtgaaccccatcatctacactacattcaacatcgagtttcgaaaggcttttctgaagattcttcactgctag

SEQ ID NO: 15749 - DNA, 1332 bp, Artificial Sequence
  derived and/or modified sequence
atggaccccctgaacctgtcctggtatgacgacgacctggagaggcagaattggtccaggccctttaatggatcggatggcaaagccgatcgcccccattataattactatgccactctgctgaccctcctgattgccgtgatcgttttcggtaacgtgctcgtgtgtatggcagtttcacgtgagaaggcactccagacgacaacaaattacttaattgtgtccctcgctgtggccgatttactcgtcgcgacactggtcatgccgtgggtcgtgtacctggaagtggtcggcgaatggaaatttagccgcattcactgcgacatatttgtgacgctggacgtcatgatgtgcaccgcaagcatcttgaacctgtgcgccatctcaatagatcgctacacggcagtggccatgccgatgctgtacaatacccggtattcttcaaaaaggagagtgacagtgatgatctccattgtttgggtcttatccttcactattagctgtcctctgctgtttggtctgaacaacgctgaccagaatgaatgtatcatcgcaaaccccgcgtttgttgtatattccagtatcgtgtcgttctacgtgccctttattgtgaccttattagtgtatattaagatttacatcgttctgcgcagaaggcgcaagagggtgaacactaaaaggtccagccgggcctttcgcgcccatttgagagcacctctgaagggaaattgcacccaccccgaggatatgaaactctgcaccgtcatcatgaagagcaatggaagctttcccgtcaatcgacgaagagttgaggccgcacggagagctcaggagttggagatggaaatgctttcttcaacttcccctcctgaaagaactcgctatagcccaatccctccaagccaccatcagttgactctacctgatccatcccaccatggcttacatagtacacccgattcaccggcgaagccagagaagaacggccacgcaaaagaccatccaaagatcgcaaagatctttgagatccagactatgcccaacggcaaaactagaacatctctgaagacaatgagcagacggaagctcagccaacagaaagaaaagaaagccacccagatgctggccatcgttcttggagtgtttattatctgctggttacccttcttcattacccacattcttaatattcactgcgattgcaacattccccccgtgctctactccgcattcacctggctgggctacgtgaactccgccgtgaatccaatcatttacacaaccttcaatatcgaattccgcaaagcctttctgaagattctgcactgttag

SEQ ID NO: 15750 - DNA, 1329 bp, Artificial Sequence
  derived and/or modified sequence
atggaccctttaaatctgagctggtatgatgacgatctggagcggcagaactggagccgtccatttaacggcagcgacggaaaagcggataggcctcattacaactactatgctaccttattgacactcctgatagccgtaattgtttttggtaatgtgcttgtgtgtatggcagtctcccgggaaaaagcactacagacaaccaccaattacctgattgtctcactggctgttgcagatctgctagtggctacgctcgtgatgccgtgggtggtgtacttggaagtaggcgagtggaagttcagccggatccattgcgacatcttcgttaccctagacgtgatgatgtgtactgcgtcaattctcaacctctgcgcaatttctatcgaccggtacacggcggtagcaatgcccatgctgtacaacacacgctactctagtaagcgcagagtgaccgtgatgatctctatcgtgtgggtcctcagttttactatcagttgccctctcttatttggactaaataacgctgaccagaatgaatgtatcatagccaacccagctttcgtggtttactcttctatcgtaagtttctatgttccattcatcgtaaccctcctcgtgtatatcaaaatttatatcgttttgagacgaaggcgcaagcgtgtcaatactaaaagaagttcacgcgcattccgagctcacttgagagccccgcttaagggtaactgcacacatccagaggatatgaaactctgcacagtgataatgaagagcaatggttcttttcccgtgaatcgaagaagagtggaagctgcccgacgcgcccaggagctggagatggagatgctcagttcgacctctcctcctgagcggacccggtatagtcccattcctccgagccaccaccagctcaccctgcctgacccttctcatcacggactacattccaccccagattctccagccaagcctgaaaaaaatggacacgccaaagatcacccaaaaatagccaagatcttcgagatccagacaatgcctaacggaaaaacacggaccagcctaaaaaccatgtcaaggaggaaactctcacagcaaaaggagaagaaagccactcagatgctcgcgatcgtactaggcgttttcatcatttgctggctaccatttttcataacacacatcctgaacattcattgcgactgtaacatcccccccgtactgtactccgccttcacttggctgggttatgtgaacagcgctgtcaaccctattatatataccacttttaacatcgagttcagaaaagcttttctgaagattctgcactgctag

SEQ ID NO: 15751 - DNA, 1338 bp, Artificial Sequence
  derived and/or modified sequence
atggaccccctgaacctgtcctggtatgatgatgacctggagcggcagaactggagccggcccttcaatggaagtgatggcaaggctgaccggccccactacaactactatgccaccctgctgaccctgctgattgctgtgattgtgtttggaaatgtgctggtgtgcatggctgtgtcccgggagaaggccctgcagaccaccaccaactacctgattgtgtccctggccgtggccgacctgctggtggccaccctggtgatgccctgggtggtgtacctggaggtggtgggggagtggaagttcagccgcatccactgtgacatctttgtgaccctggatgtgatgatgtgcacagccagcatcctgaacctgtgtgccatcagcattgaccgctacacagctgtggccatgcccatgctgtacaacacccgctacagcagcaagagaagagtgacagtgatgatcagcatcgtgtgggtgctgtccttcaccatcagctgccccctgctgtttggcctgaacaatgctgaccagaatgaatgcatcatcgccaacccagcctttgtggtgtacagcagcatcgtgtccttctacgtgcccttcatcgtgaccctgctggtgtacatcaagatctacatcgtgctgcggcggcggaggaagagggtgaacaccaagaggagcagccgggccttccgggcccacctgcgggcccccctgaagggcaactgcacccaccctgaggacatgaagctgtgcaccgtcatcatgaagagcaatggcagcttccctgtgaacagaagaagagtggtgcaggaggccgcccggcgggcccaggagctggagatggagatgctgagcagcaccagccccccagagaggacccgctacagccccatcccccccagccaccaccagctgaccctgcctgaccccagccaccacggcctgcacagcaccccagacagccctgccaagccagagaagaatggccacgccaaggaccaccccaagatcgccaagatctttgagatccagaccatgcccaacgggaagaccaggaccagcctgaagaccatgagcaggaggaagctgagccagcagaaggagaagaaggccacccagatgctggccatcgtgctgggcgtcttcatcatctgctggctgcccttcttcatcacccacatcctgaacatccactgtgactgcaacatcccccctgtgctgtacagcgccttcacctggctgggctacgtgaacagcgctgtgaaccccatcatctacaccaccttcaacatcgagttcaggaaggccttcctgaagatcctgcactgctag

SEQ ID NO: 15752 - DNA, 1332 bp, Artificial Sequence
  derived and/or modified sequence
atggaccccctgaacctgtcctggtatgatgatgacctggagcggcagaactggagccggcccttcaatggaagtgatggcaaggctgaccggccccactacaactactatgccaccctgctgaccctgctgattgctgtgattgtgtttggaaatgtgctggtgtgcatggctgtgtcccgggagaaggccctgcagaccaccaccaactacctgattgtgtccctggccgtggccgacctgctggtggccaccctggtgatgccctgggtggtgtacctggaggtggtgggggagtggaagttcagccgcatccactgtgacatctttgtgaccctggatgtgatgatgtgcacagccagcatcctgaacctgtgtgccatcagcattgaccgctacacagctgtggccatgcccatgctgtacaacacccgctacagcagcaagagaagagtgacagtgatgatcagcatcgtgtgggtgctgtccttcaccatcagctgccccctgctgtttggcctgaacaatgctgaccagaatgaatgcatcatcgccaacccagcctttgtggtgtacagcagcatcgtgtccttctacgtgcccttcatcgtgaccctgctggtgtacatcaagatctacatcgtgctgcggcggcggaggaagagggtgaacaccaagaggagcagccgggccttccgggcccacctgcgggcccccctgaagggcaactgcacccaccctgaggacatgaagctgtgcaccgtcatcatgaagagcaatggcagcttccctgtgaacagaagaagagtggaggccgcccggcgggcccaggagctggagatggagatgctgagcagcaccagccccccagagaggacccgctacagccccatcccccccagccaccaccagctgaccctgcctgaccccagccaccacggcctgcacagcaccccagacagccctgccaagccagagaagaatggccacgccaaggaccaccccaagatcgccaagatctttgagatccagaccatgcccaacgggaagaccaggaccagcctgaagaccatgagcaggaggaagctgagccagcagaaggagaagaaggccacccagatgctggccatcgtgctgggcgtcttcatcatctgctggctgcccttcttcatcacccacatcctgaacatccactgtgactgcaacatcccccctgtgctgtacagcgccttcacctggctgggctacgtgaacagcgctgtgaaccccatcatctacaccaccttcaacatcgagttcaggaaggccttcctgaagatcctgcactgctag

SEQ ID NO: 15753 - DNA, 1329 bp, Artificial Sequence
  derived and/or modified sequence
atggaccccctgaacctgtcctggtatgatgatgacctggagcggcagaactggagccggcccttcaatggaagtgatggcaaggctgaccggccccactacaactactatgccaccctgctgaccctgctgattgctgtgattgtgtttggaaatgtgctggtgtgcatggctgtgtcccgggagaaggccctgcagaccaccaccaactacctgattgtgtccctggccgtggccgacctgctggtggccaccctggtgatgccctgggtggtgtacctggaggtgggggagtggaagttcagccgcatccactgtgacatctttgtgaccctggatgtgatgatgtgcacagccagcatcctgaacctgtgtgccatcagcattgaccgctacacagctgtggccatgcccatgctgtacaacacccgctacagcagcaagagaagagtgacagtgatgatcagcatcgtgtgggtgctgtccttcaccatcagctgccccctgctgtttggcctgaacaatgctgaccagaatgaatgcatcatcgccaacccagcctttgtggtgtacagcagcatcgtgtccttctacgtgcccttcatcgtgaccctgctggtgtacatcaagatctacatcgtgctgcggcggcggaggaagagggtgaacaccaagaggagcagccgggccttccgggcccacctgcgggcccccctgaagggcaactgcacccaccctgaggacatgaagctgtgcaccgtcatcatgaagagcaatggcagcttccctgtgaacagaagaagagtggaggccgcccggcgggcccaggagctggagatggagatgctgagcagcaccagccccccagagaggacccgctacagccccatcccccccagccaccaccagctgaccctgcctgaccccagccaccacggcctgcacagcaccccagacagccctgccaagccagagaagaatggacatgccaaggaccaccccaagatcgccaagatctttgagatccagaccatgcccaacgggaagaccaggaccagcctgaagaccatgagcaggaggaagctgagccagcagaaggagaagaaggccacccagatgctggccatcgtgctgggcgtcttcatcatctgctggctgcccttcttcatcacccacatcctgaacatccactgtgactgcaacatcccccctgtgctgtacagcgccttcacctggctgggctacgtgaacagcgctgtgaaccccatcatctacaccaccttcaacatcgagttcaggaaggccttcctgaagatcctgcactgctag

SEQ ID NO: 15754 - DNA, 1338 bp, Artificial Sequence
  derived and/or modified sequence
atggaccccctgaacctgagctggtacgacgacgacctggagcggcaaaactggagccgtccgtttaatggcagtgacggtaaggcggataggccccactacaactactatgctacgctacttacactgttaatcgcagtcatagtgtttgggaatgttctcgtttgtatggccgtgtcacgtgagaaggcattacagacaacaacgaactacctcatcgtatctctggctgtcgccgacctccttgtcgcgacactcgtcatgccctgggtcgtgtaccttgaggtcgtgggggagtggaaattttctcgcattcactgtgatatattcgtcaccctagatgttatgatgtgtacagcatccattctcaatctgtgcgccatctcaatcgaccgctacactgcagttgccatgcctatgttatacaacactcgttactcttctaaacgaagggttacagtaatgattagcatcgtgtgggtgttgtccttcacaatttcctgcccccttctttttggactgaataatgcagatcaaaacgaatgcatcatagccaacccagcttttgtggtgtatagcagcatcgtgtctttctatgtgccatttattgttactttactggtatacattaagatatatatagtcctgaggagaaggcgcaagcgtgtgaatacaaaaaggtcttcccgcgcattccgggcacacctgcgagctcccctgaaaggaaactgcacgcacccagaagatatgaaactgtgtactgtcatcatgaaaagcaatggcagtttccctgttaacaggcggagggtggtgcaggaggctgcacgccgcgcccaggaactggagatggagatgctctcatctacatctcctccagagcgcactcgctactcgcctatccctccatctcaccaccagcttaccctccccgaccctagtcatcacggtttgcattccacccccgatagcccagcaaagccagaaaagaatggacacgcaaaggatcatccaaagatagcaaagatatttgaaatacagacgatgcccaacggcaaaacgcggaccagtctcaagacaatgtctaggcgaaagctgtcccagcagaaggagaaaaaagctacacagatgctggccatcgtgttaggtgtctttataatttgctggctgcctttttttattacccacatcctcaacatccactgcgattgtaatatccctcccgtcctgtattccgcttttacgtggttaggctacgtgaactcagccgtcaatcccatcatttataccactttcaacattgagttcaggaaggcatttctcaaaattttgcactgctag

SEQ ID NO: 15755 - DNA, 1332 bp, Artificial Sequence
  derived and/or modified sequence
atggaccccctgaacctgagctggtacgacgacgacctggagcggcagaactggtctcgacctttcaacggctccgatggcaaggcggacagaccacactacaattattacgctaccctgctcactcttctcatcgctgtgatcgtctttggcaacgtgttggtgtgtatggctgtgtccagggaaaaggcgctgcagactacgactaattatttgatcgtaagtttggccgtggcggatctgctcgtggctactctcgtgatgccttgggtggtctatctcgaggtggttggcgagtggaagttcagccgcatccactgcgacatttttgtgacattagatgtcatgatgtgcacagcttccattctgaacctttgcgccatttcaattgaccggtacactgccgtggcaatgccaatgttgtataacactcggtatagctctaaacgccgggtgactgttatgatctcaattgtgtgggtgctgagttttactattagctgcccgctgctcttcgggctgaacaacgctgatcagaatgagtgcattattgccaacccagcattcgtcgtgtactccagcatcgtgagcttctatgtgccctttatcgtgaccctgctggtatacatcaagatctatattgtccttcgccgtcgccggaagcgcgtaaataccaagcgatcctcacgagcatttagggctcacctgcgtgctcctctcaaaggaaactgcacacaccccgaggatatgaagctgtgtactgtgattatgaagtctaatggctccttcccggtgaatcggagaagagtggaggctgccaggagggcccaagagctggagatggagatgttaagctcaaccagcccacctgagcggaccaggtacagccccatccccccctcccaccaccagctgactcttcctgaccccagtcatcatggcctccattctaccccagattcacctgctaagcccgaaaaaaatggccatgcgaaagatcatcctaagatcgcaaagattttcgagatccagactatgcctaatggaaaaacccgaaccagcttaaaaaccatgtctcggcggaaactgagccaacagaaagaaaagaaggcgacccaaatgctggcaatcgtgctgggggtgtttatcatctgctggttgcccttttttattacacacatcctgaacatccattgtgattgcaatatcccacccgtgctgtatagtgctttcacatggctgggatatgtgaacagcgctgtgaaccccattatctacactacctttaacattgaattcagaaaagccttcctgaagattcttcactgctag

SEQ ID NO: 15756 - DNA, 1338 bp, Artificial Sequence
  derived and/or modified sequence
atggaccccctgaacctgagctggtacgacgacgacctggagcggcagaattggagccgcccatttaacggcagtgatgggaaggccgatcgaccgcactataactactacgcaacactgttgacactgcttatcgccgtgatcgtgttcggaaacgttttggtgtgtatggccgtgtcccgggagaaggcattgcagacaaccaccaactacttgatcgtgtcgttagcagtcgctgacttgctggtcgccacgctggttatgccttgggtggtgtacctcgaagtagtcggggagtggaagtttagcaggattcactgcgacatattcgtaaccctggacgttatgatgtgcactgcatctattttgaatttgtgcgctatcagtatcgaccgctatactgccgttgcgatgccgatgctttacaatactaggtattctagtaagagacgcgtgacagtgatgatctccatcgtgtgggtactaagcttcaccatcagctgtccacttctttttggcctcaacaatgcagaccagaatgagtgcatcattgccaatcccgccttcgttgtttattctagcatcgtgtcattctacgtgccattcatcgtgacccttctggtgtatataaagatttatattgtgctgcgccgacgacgcaaacgggtgaacactaaaagatcatctcgggccttcagggcccacctgcgggcaccccttaagggaaactgcacccaccccgaagacatgaaactttgcactgtgatcatgaaatctaatggttcgttcccagtgaacaggcgtcgggtcgtgcaagaggccgccaggcgcgcacaggagcttgaaatggagatgctgtcttccaccagcccccctgaaagaactcgctattcaccaatcccaccttctcatcaccagcttactctaccggatccttcacaccatggacttcactccaccccagacagccccgcgaagcccgagaagaatggacacgcaaaggatcatcctaagatcgctaagatcttcgagattcagactatgccaaacggaaagacccggactagcctgaagactatgtctcggcgtaaattatctcagcaaaaagagaagaaagcaacccaaatgctggctatcgttctcggagtttttatcatctgttggctccctttctttatcactcacatcctgaatattcactgtgactgcaacattcctcctgtgctgtacagtgcattcacttggttaggttacgtgaactcggccgttaatcctatcatctacacaactttcaatatcgagttccggaaagctttcctgaaaattttacattgctag

SEQ ID NO: 15757 - DNA, 1332 bp, Artificial Sequence
  derived and/or modified sequence
atggaccccctgaacctgagctggtacgacgacgacctggagcggcagaactggtcacgccctttcaatggatctgacggtaaagcggataggcctcattataattactatgccaccttactgaccctcctgatagctgtgatcgtctttggaaacgttttggtgtgcatggcagtgtctagggaaaaagcccttcagacaactacaaactatctcatagtctctcttgctgtggctgacctgctggtggctactctcgtgatgccctgggtggtgtatcttgaggttgttggggagtggaagtttagccggattcattgcgacattttcgtgacactggacgtcatgatgtgtacagcatccattcttaatctttgtgcaatatcaattgatcgctacactgcagtagctatgcccatgctctacaacacacgatattcatccaagcggcgcgtgaccgtaatgatcagcattgtgtgggtcctgtccttcacaatatcttgcccgctgctttttgggctgaataacgccgatcagaacgagtgtatcattgctaatccagcctttgtggtttactcgtcaattgtgtccttttacgtcccattcatagtcactctcctggtttacatcaagatctatattgtgcttagaagaagacgaaagcgcgtgaatactaaaagatccagtcgggccttccgggctcacttgagggctcctctcaaaggtaactgtacccacccggaggatatgaagctctgcactgttatcatgaagtcgaacgggtcatttcctgttaaccgccggagggtagaagccgcaagacgggctcaagaactggaaatggagatgctgtcatctacatcacctcccgagcggactagatactcccctattccaccaagccatcatcagctgactttgcctgatccttcccatcatgggctacattccacgcccgacagtccagcaaagcctgaaaagaacggtcacgccaaagaccatcctaaaatcgcgaaaatcttcgagatccaaaccatgcctaacggcaagactcgaacaagtctgaaaaccatgtctaggaggaaactgagtcagcagaaggagaagaaggccacccagatgttagcaatagtgcttggagtgtttattatttgttggttgccatttttcattacacacatcttgaatatccactgcgactgtaacatcccgcctgttctgtactctgcttttacctggctcggatacgttaattctgccgtgaatcccatcatctatacaacttttaatatcgagttccgcaaggctttcctgaagatccttcattgttag

SEQ ID NO: 15758 - DNA, 1329 bp, Artificial Sequence
  derived and/or modified sequence
atggaccccctgaacctgagctggtacgacgacgacctggagcggcaaaactggtctagaccattcaatggaagcgatgggaaagccgacaggccccactacaactattatgcaacattgctgactcttctcattgccgttatcgtgttcgggaatgttctggtctgcatggccgtgtcaagggagaaggcactgcaaaccacaacgaactacctgattgtcagtctggcggtagccgatctacttgtcgccaccctcgtgatgccctgggtggtgtatctcgaagttggggaatggaaattctcgaggatccattgtgatatctttgttacactcgacgttatgatgtgcactgctagcatcttaaacctatgtgcgatttccattgatcgctacacagctgtggccatgcctatgttgtacaatacgagatattccagtaaacgacgcgtgactgtaatgataagcatcgtgtgggtgctgagtttcacgattagttgcccactcctgtttggccttaataacgcggaccaaaacgagtgcatcatagctaaccccgcctttgttgtctactctagcatagtctccttttatgtgccattcatcgtgactctcctagtttacattaagatatacattgtcctacggcgtcgtcgaaagcgggtcaataccaaaagaagttctcgggcctttcgcgcacatttaagagccccgttgaaaggcaactgtacccaccctgaggacatgaagctctgcaccgtcattatgaaatccaatggatcattccccgtgaatcggcgcagagtggaggccgcccggcgggctcaagagctcgagatggagatgttgtcctccacctctcctcccgaacgaaccagatattcccctattcctccttcccatcaccagctgactctgcccgacccttcacatcacggtcttcactccacaccagattcacccgctaagcctgagaagaatgggcacgccaaggatcacccaaaaattgctaagatcttcgaaatccagaccatgccaaatgggaaaaccagaacgtccctgaagacaatgtctcgcaggaagttgtcgcagcagaaggagaagaaggcaacgcagatgctagccatagtgctgggggtttttatcatatgttggcttccattttttattactcacatccttaacatccactgcgattgtaacatccctcctgtgctgtatagcgctttcacctggctgggatacgtcaactccgcagttaacccaataatctatactaccttcaatatagaatttagaaaagcctttctgaagatacttcattgctag

SEQ ID NO: 15759 - DNA, 1338 bp, Artificial Sequence
  derived and/or modified sequence
atggaccccctgaacctcagttggtatgacgacgatctggagcggcagaactggtccaggccatttaacggatccgatggtaaagccgatcgaccccattataattactatgccactctattgactctcctgatcgccgtcatcgtctttggaaacgtgctggtttgtatggctgtgtcacgcgagaaggccctgcaaacaacaactaattatcttatcgtgagtctggcagtagccgacctgctagtggccactctggtaatgccttgggtggtttatctggaagttgtgggcgaatggaagttctcccgcattcactgcgatatttttgtgacactggatgtaatgatgtgtactgcctctatcctgaatctgtgcgctatcagtatcgacagatatacagcagtggcaatgccaatgctgtataatacacgttattcttcaaagaggcgagtgactgtgatgatctcaatcgtttgggtgctgtcttttacgatctcgtgtccactcttgtttgggctcaacaatgctgatcaaaacgagtgcataattgctaatcccgcattcgtcgtgtacagcagcatcgtcagcttttatgtgccctttatcgtgacactgctggtctacataaaaatctatatagtattgagacgcaggagaaagagggtgaatacaaaacgtagcagtcgggcattcagagcacatttgcgtgctccactaaagggtaactgcacacaccccgaggacatgaagctttgtaccgtcattatgaaatctaacggttcgttccccgtgaatcgacgccgagtcgtacaggaggcagcgaggcgggctcaggagctagagatggaaatgctgtcctcgacctccccccctgaacgcaccagatactctcccattccgcctagccaccatcaactgaccctcccagacccctcccatcatggcttacatagcacccctgattctcccgcaaagcccgaaaagaatggacatgcgaaggatcaccccaaaatagccaagattttcgagattcaaacaatgccgaatggaaaaacgaggactagtctgaaaacaatgagtcggaggaagctgtcacagcaaaaggaaaagaaagctacccagatgcttgccattgtcttgggtgtgttcatcatctgctggcttcccttctttatcacacacatccttaatattcactgtgactgcaatattccaccggtgttgtactcagcctttacgtggctgggttatgtaaactccgccgtcaatccaattatctacacgacctttaacatcgagtttcgtaaagcctttttgaagattctccattgttag

SEQ ID NO: 15760 - DNA, 1332 bp, Artificial Sequence
  derived and/or modified sequence
atggaccctctcaatttgtcatggtatgacgatgacctggagcgccagaattggagtcgaccattcaacgggtcggacggaaaggctgataggcctcattacaactactatgccaccctgctgacactcctgatcgccgtcatcgtcttcgggaatgtcctagtttgtatggccgtcagtcgggagaaggctcttcaaaccacaaccaattatctgatcgtctcactggctgtagccgacctgcttgtggcgaccttggtaatgccctgggtggtgtaccttgaagtggttggcgagtggaaattttccaggattcactgcgacatcttcgtcaccttggatgtgatgatgtgtactgcttccattctaaacctctgcgccattagcattgacagatatactgccgtggccatgcctatgttgtataatactcgctatagcagcaagagaagggtcacagtgatgatatccatcgtctgggtgttaagtttcacaatctcctgcccacttttgttcgggctcaataatgcagatcagaacgaatgtatcatcgctaaccccgcattcgtcgtgtattcttccatcgtttctttctatgtgccgttcattgtgactctgctggtgtatattaaaatctacatcgtgttacgcaggcggagaaagcgggtgaataccaaaagatcaagccgggcattccgggctcacctgcgggcaccattgaagggcaactgcacccatcctgaggatatgaaactgtgcacggtcataatgaaatccaacggctcgtttcccgttaacagacgcagagttgaggccgcacggagggcacaagagttggagatggagatgctgtcatcaaccagtcccccagagcgcacgaggtactcgccaatcccaccctctcaccaccagctgactctgccagaccccagtcatcacggcctgcatagtacccccgattccccagccaaaccggaaaagaacggtcacgctaaggatcaccccaaaatagcaaagatattcgaaatccagaccatgcctaacggcaagacaagaaccagcctgaagacaatgtctcgcagaaagctgagccagcagaaagaaaaaaaagccacgcaaatgctcgctatcgtcttgggggtattcattatttgctggctccctttctttattacacacattctgaacattcactgtgattgcaacatccccccagtcctgtactccgcatttacatggctcggctatgtgaattcggccgtgaatcccattatctacacaacctttaatatcgaattcaggaaggcctttttgaaaatcttacactgttag

SEQ ID NO: 15761 - DNA, 1338 bp, Artificial Sequence
  derived and/or modified sequence
atggaccccctcaatctttcttggtacgatgatgatctagaaaggcaaaactggtcccgcccatttaacggatccgatgggaaagccgataggcctcattacaattattacgccacgttgctgacattgctgattgccgttattgtcttcgggaacgtgttggtgtgtatggctgtgtcgcgggagaaagccctccagaccactacaaactacctgatcgtgtcactggctgtcgctgatcttctggtcgccacgttagtgatgccttgggtggtctaccttgaagtcgtgggcgaatggaaatttagccgcatccactgcgatatttttgtaactcttgatgtgatgatgtgcacggcttctatcctgaacctttgtgccatttccatcgaccggtataccgcagtggctatgcctatgctgtacaatactcgatattccagtaagaggcgcgtgacagtgatgatctccatcgtgtgggtactgtcttttaccatatcctgcccactgcttttcgggctgaataatgcagaccaaaacgagtgcattatcgctaaccctgcatttgtggtgtactccagcattgtgtcgttctacgttccttttattgtcaccctgctggtatacattaaaatctatattgtccttcgacgtcgcagaaagcgggtcaacacgaagcgctcgagccgtgcgttccgcgcacatttgcgcgctccccttaaagggaactgtacacaccctgaagacatgaagctctgcaccgttattatgaagtccaatggcagcttccccgtgaaccgcaggcgagtggtgcaggaagcagcaagaagagctcaggagcttgagatggaaatgttgtcttctactagtcccccagagcggacacgctacagtcccatccccccttcccaccaccagcttactttacccgacccatcccaccatggcctgcattccactcccgatagtccggctaaacccgaaaagaacggccatgccaaggatcatcccaagatcgcgaagatcttcgagattcagaccatgccaaatggtaagacaaggactagtctaaaaactatgtccaggcgcaagctctctcaacagaaggaaaagaaggccacccagatgctggccatcgtgctcggggtatttataatatgctggctgcccttttttatcacacatatcttgaatattcattgcgactgtaacatcccaccagttctctattctgcattcacctggttagggtatgtgaacagcgctgttaaccccatcatctatactacctttaacatcgagttcagaaaagctttcttgaagatattgcactgctag

SEQ ID NO: 15762 - DNA, 1332 bp, Artificial Sequence
  derived and/or modified sequence
atggacccacttaatctgtcttggtatgacgatgacctggagaggcagaactggtccagaccttttaatggcagtgacgggaaggcagatcgaccgcactacaattattatgccaccctgctgaccctgctgatcgcggtcatcgtgttcgggaacgtgctggtttgtatggccgtaagtagggagaaagccctgcagaccacaacgaactatctcatcgtgtcattggccgtggcagacctgctggtagccactttggtgatgccatgggtggtgtacctcgaggtcgttggtgagtggaagtttagtaggatacactgtgatatctttgtcaccctcgacgtaatgatgtgcaccgcgtccattctaaatttgtgtgcgatttcgattgatcggtataccgcagtggcaatgcccatgctgtacaacacacggtactcctcaaaacgcagagtcactgtgatgatttcaatagtgtgggtgctgagttttacaatcagctgcccactactgttcggtttgaacaatgcggaccaaaatgaatgcatcatagctaatcccgctttcgtggtttattcctctatcgtgagcttttatgtcccttttatagtcacgcttttggtttatatcaagatttacattgttctgcgacgtcgccgtaagcgggtgaatacaaaacggtcttctagagcatttcgggcacatcttcgggcaccccttaaagggaattgcactcacccagaggatatgaaactgtgtaccgtgatcatgaagtcaaacggttcatttcccgtaaaccgcagacgtgtagaggctgccaggcgcgcacaagaactggagatggagatgctatcctccacttctcccccagaaaggacccggtactctccaattcctccctcacaccaccagcttaccttacctgatccctcacaccacggcttacactccacacctgatagtccggctaaaccggaaaagaacgggcacgccaaggatcaccctaaaatcgccaagatattcgagattcagactatgcccaatggaaaaactcgcaccagcctcaaaacaatgagcaggcggaagctgtcccagcaaaaggaaaagaaagccacgcagatgctcgccatcgtgctcggggtctttatcatctgttggcttcccttcttcattacacacatactgaacatccactgcgactgtaacattccccctgttctgtattcagcattcacctggcttggttacgtgaatagcgctgttaaccccatcatctacactacgttcaacatcgaatttcgcaaagccttcctcaaaatcctgcattgttag

SEQ ID NO: 15763 - DNA, 1329 bp, Artificial Sequence
  derived and/or modified sequence
atggacccactcaacttgagttggtacgatgacgatttagagaggcagaactggtctcggccttttaacggctctgatggaaaggccgatcgaccccactacaattactatgccactctacttaccctcctgattgctgtaatcgtgttcgggaacgttctggtatgtatggcagtttccagggagaaagcactgcagaccacaaccaactacctgatcgtgtctctggccgtggccgatctgttagtggctactttagtgatgccatgggtggtgtacctggaggtgggagagtggaagttttctaggatccattgcgacatctttgttactcttgatgtaatgatgtgtaccgcgtccatactgaacctctgcgccatctctattgacagatataccgccgtggccatgccaatgctgtataacacacgatacagctcgaaacgacgggttactgtgatgataagcatcgtgtgggtgctgagctttaccatttcctgcccactgcttttcggactgaataatgcagatcagaacgaatgcataatcgctaacccagcattcgtcgtttacagcagcattgtgtcgttctatgtgccattcattgttactctcctggtgtacattaagatctatatcgttctgagaagacggaggaagagagtgaacaccaaacggtcctcacgcgcttttcgcgcacacctaagggccccactgaaaggcaattgcacacatccagaggacatgaagctttgtaccgtcattatgaaatcaaacgggtcattcccagtaaaccgacgcagagtggaggccgctcgtagagctcaggagttggaaatggaaatgctctccagtacatccccccctgagcgcacacgatacagccctattcccccttcacaccaccagctgactctccctgacccaagccaccatggtttgcacagtacacctgatagtccagccaagcctgagaagaatggacacgccaaagatcacccaaagatcgctaaaatctttgagattcagacaatgccaaatggaaaaacaagaaccagcttaaagactatgtccaggagaaaactgtcccaacaaaaggagaagaaggcgactcagatgctggccatagtcctgggcgtcttcataatttgctggcttcctttcttcatcacacatatcttaaacattcactgcgattgtaacattcctcccgtgctgtatagtgccttcacctggttgggatatgtaaacagcgctgttaatcccattatttacaccaccttcaatatcgaatttcggaaggcattcctcaagattctgcattgctag

SEQ ID NO: 15764 - DNA, 1338 bp, Artificial Sequence
  derived and/or modified sequence
atggaccccctgaacctgagctggtacgacgacgacctggagagacagaactggagcagacccttcaacggcagcgacggcaaggccgacagaccccactacaactactacgccaccctgctgaccctgctgatcgccgtgatcgtgttcggcaacgtgctggtgtgcatggccgtgagcagagagaaggccctgcagaccaccaccaactacctgatcgtgagcctggccgtggccgacctgctggtggccaccctggtgatgccctgggtggtgtacctggaggtggtgggcgagtggaagttcagcagaatccactgcgacatcttcgtgaccctggacgtgatgatgtgcaccgccagcatcctgaacctgtgcgccatcagcatcgacagatacaccgccgtggccatgcccatgctgtacaacaccagatacagcagcaagagaagagtgaccgtgatgatcagcatcgtgtgggtgctgagcttcaccatcagctgccccctgctgttcggcctgaacaacgccgaccagaacgagtgcatcatcgccaaccccgccttcgtggtgtacagcagcatcgtgagcttctacgtgcccttcatcgtgaccctgctggtgtacatcaagatctacatcgtgctgagaagaagaagaaagagagtgaacaccaagagaagcagcagagccttcagagcccacctgagagcccccctgaagggcaactgcacccaccccgaggacatgaagctgtgcaccgtgatcatgaagagcaacggcagcttccccgtgaacagaagaagagtggtgcaggaggccgccagaagagcccaggagctggagatggagatgctgagcagcaccagcccccccgagagaaccagatacagccccatcccccccagccaccaccagctgaccctgcccgaccccagccaccacggcctgcacagcacccccgacagccccgccaagcccgagaagaacggccacgccaaggaccaccccaagatcgccaagatcttcgagatccagaccatgcccaacggcaagaccagaaccagcctgaagaccatgagcagaagaaagctgagccagcagaaggagaagaaggccacccagatgctggccatcgtgctgggcgtgttcatcatctgctggctgcccttcttcatcacccacatcctgaacatccactgcgactgcaacatcccccccgtgctgtacagcgccttcacctggctgggctacgtgaacagcgccgtgaaccccatcatctacaccaccttcaacatcgagttcagaaaggccttcctgaagatcctgcactgctag

SEQ ID NO: 15765 - DNA, 1332 bp, Artificial Sequence
  derived and/or modified sequence
atggaccccctgaacctgagctggtacgacgacgacctggagagacagaactggagcagacccttcaacggcagcgacggcaaggccgacagaccccactacaactactacgccaccctgctgaccctgctgatcgccgtgatcgtgttcggcaacgtgctggtgtgcatggccgtgagcagagagaaggccctgcagaccaccaccaactacctgatcgtgagcctggccgtggccgacctgctggtggccaccctggtgatgccctgggtggtgtacctggaggtggtgggcgagtggaagttcagcagaatccactgcgacatcttcgtgaccctggacgtgatgatgtgcaccgccagcatcctgaacctgtgcgccatcagcatcgacagatacaccgccgtggccatgcccatgctgtacaacaccagatacagcagcaagagaagagtgaccgtgatgatcagcatcgtgtgggtgctgagcttcaccatcagctgccccctgctgttcggcctgaacaacgccgaccagaacgagtgcatcatcgccaaccccgccttcgtggtgtacagcagcatcgtgagcttctacgtgcccttcatcgtgaccctgctggtgtacatcaagatctacatcgtgctgagaagaagaagaaagagagtgaacaccaagagaagcagcagagccttcagagcccacctgagagcccccctgaagggcaactgcacccaccccgaggacatgaagctgtgcaccgtgatcatgaagagcaacggcagcttccccgtgaacagaagaagagtggaggccgccagaagagcccaggagctggagatggagatgctgagcagcaccagcccccccgagagaaccagatacagccccatcccccccagccaccaccagctgaccctgcccgaccccagccaccacggcctgcacagcacccccgacagccccgccaagcccgagaagaacggccacgccaaggaccaccccaagatcgccaagatcttcgagatccagaccatgcccaacggcaagaccagaaccagcctgaagaccatgagcagaagaaagctgagccagcagaaggagaagaaggccacccagatgctggccatcgtgctgggcgtgttcatcatctgctggctgcccttcttcatcacccacatcctgaacatccactgcgactgcaacatcccccccgtgctgtacagcgccttcacctggctgggctacgtgaacagcgccgtgaaccccatcatctacaccaccttcaacatcgagttcagaaaggccttcctgaagatcctgcactgctag

SEQ ID NO: 15766 - DNA, 1329 bp, Artificial Sequence
  derived and/or modified sequence
atggaccccctgaacctgagctggtacgacgacgacctggagagacagaactggagcagacccttcaacggcagcgacggcaaggccgacagaccccactacaactactacgccaccctgctgaccctgctgatcgccgtgatcgtgttcggcaacgtgctggtgtgcatggccgtgagcagagagaaggccctgcagaccaccaccaactacctgatcgtgagcctggccgtggccgacctgctggtggccaccctggtgatgccctgggtggtgtacctggaggtgggcgagtggaagttcagcagaatccactgcgacatcttcgtgaccctggacgtgatgatgtgcaccgccagcatcctgaacctgtgcgccatcagcatcgacagatacaccgccgtggccatgcccatgctgtacaacaccagatacagcagcaagagaagagtgaccgtgatgatcagcatcgtgtgggtgctgagcttcaccatcagctgccccctgctgttcggcctgaacaacgccgaccagaacgagtgcatcatcgccaaccccgccttcgtggtgtacagcagcatcgtgagcttctacgtgcccttcatcgtgaccctgctggtgtacatcaagatctacatcgtgctgagaagaagaagaaagagagtgaacaccaagagaagcagcagagccttcagagcccacctgagagcccccctgaagggcaactgcacccaccccgaggacatgaagctgtgcaccgtgatcatgaagagcaacggcagcttccccgtgaacagaagaagagtggaggccgccagaagagcccaggagctggagatggagatgctgagcagcaccagcccccccgagagaaccagatacagccccatcccccccagccaccaccagctgaccctgcccgaccccagccaccacggcctgcacagcacccccgacagccccgccaagcccgagaagaacggccacgccaaggaccaccccaagatcgccaagatcttcgagatccagaccatgcccaacggcaagaccagaaccagcctgaagaccatgagcagaagaaagctgagccagcagaaggagaagaaggccacccagatgctggccatcgtgctgggcgtgttcatcatctgctggctgcccttcttcatcacccacatcctgaacatccactgcgactgcaacatcccccccgtgctgtacagcgccttcacctggctgggctacgtgaacagcgccgtgaaccccatcatctacaccaccttcaacatcgagttcagaaaggccttcctgaagatcctgcactgctag

SEQ ID NO: 15767 - DNA, 2704 bp, Artificial Sequence
  derived and/or modified sequence
actgctccccgcgggccagagccggccgagctgctgcccgccggggctctgaacggcgcggcggggccgggagccagggaccggccgaggagagtggcggccccggacggctgccggaggggcggccgcgcgtggatgcggcgggagctggaagcctcaagcagccggcgccgtctctgcccccgggcgccctatggcttgaagagcctggccacccagtggctccaccgccctgatggatccactgaatctgtcctggtatgatgatgatctggagaggcagaactggagccggcccttcaacgggtcagacgggaaggcggacagaccccactacaactactatgccacactgctcaccctgctcatcgctgtcatcgtcttcggcaacgtgctggtgtgcatggctgtgtcccgcgagaaggcgctgcagaccaccaccaactacctgatcgtcagcctcgcagtggccgacctcctcgtcgccacactggtcatgccctgggttgtctacctggaggtggtaggtgagtggaaattcagcaggattcactgtgacatcttcgtcactctggacgtcatgatgtgcacggcgagcatcctgaacttgtgtgccatcagcatcgacaggtacacagctgtggccatgcccatgctgtacaatacgcgctacagctccaagcgccgggtcaccgtcatgatctccatcgtctgggtcctgtccttcaccatctcctgcccactcctcttcggactcaataacgcagaccagaacgagtgcatcattgccaacccggccttcgtggtctactcctccatcgtctccttctacgtgcccttcattgtcaccctgctggtctacatcaagatctacattgtcctccgcagacgccgcaagcgagtcaacaccaaacgcagcagccgagctttcagggcccacctgagggctccactaaagggcaactgtactcaccccgaggacatgaaactctgcaccgttatcatgaagtctaatgggagtttcccagtgaacaggcggagagtggtgcaggaggctgcccggcgagcccaggagctggagatggagatgctctccagcaccagcccacccgagaggacccggtacagccccatcccacccagccaccaccagctgactctccccgacccgtcccaccatggtctccacagcactcccgacagccccgccaaaccagagaagaatgggcatgccaaagaccaccccaagattgccaagatctttgagatccagaccatgcccaatggcaaaacccggacctccctcaagaccatgagccgtaggaagctctcccagcagaaggagaagaaagccactcagatgctcgccattgttctcggcgtgttcatcatctgctggctgcccttcttcatcacacacatcctgaacatacactgtgactgcaacatcccgcctgtcctgtacagcgccttcacgtggctgggctatgtcaacagcgccgtgaaccccatcatctacaccaccttcaacattgagttccgcaaggccttcctgaagatcctccactgctgactctgctgcctgcccgcacagcagcctgcttcccacctccctgcccaggccggccagcctcacccttgcgaaccgtgagcaggaaggcctgggtggatcggcctcctcttcaccccggcaggccctgcagtgttcgcttggctccatgctcctcactgcccgcacaccctcactctgccagggcagtgctagtgagctgggcatggtaccagccctggggctgggccccccagctcaggggcagctcatagagtcccccctcccacctccagtccccctatccttggcaccaaagatgcagccgccttccttgaccttcctctggggctctagggttgctggagcctgagtcagggcccagaggctgagttttctctttgtggggcttggcgtggagcaggcggtggggagagatggacagttcacaccctgcaaggcccacaggaggcaagcaagctctcttgccgaggagccaggcaacttcagtcctgggagacccatgtaaataccagactgcaggttggaccccagagattcccaagccaaaaaccttagctccctcccgcaccccgatgtggacctctactttccaggctagtccggacccacctcaccccgttacagctccccaagtggtttccacatgctctgagaagaggagccctcatcttgaagggcccaggagggtctatggggagaggaactccttggcctagcccaccctgctgccttctgacggccctgcaatgtatcccttctcacagcacatgctggccagcctggggcctggcagggaggtcaggccctggaactctatctgggcctgggctaggggacatcagaggttctttgagggactgcctctgccacactctgacgcaaaaccactttccttttctattccttctggcctttcctctctcctgtttcccttcccttccactgcctctgccttagaggagcccacggctaagaggctgctgaaaaccatctggcctggcctggccctgccctgaggaaggaggggaagctgcagcttgggagagcccctggggcctagactctgtaacatcactatccatgcaccaaactaataaaactttgacgagtcaccttccaggacccctgggt

SEQ ID NO: 15768 - DNA, 2789 bp, Artificial Sequence
  derived and/or modified sequence
ccggcagcctcacgcgcgcaccgcgccgcctccgccccgtccccgcgctccctcctgcccgcccgccccgcgcccggccccgccccgccccgccccgccgcggcccgtccactgctccccgcgggccagagccggccgagctgctgcccgccggggctctgaacggcgcggcggggccgggagccagggaccggccgaggagagtggcggccccggacggctgccggaggggcggccgcgcgtggatgcggcgggagctggaagcctcaagcagccggcgccgtctctgcccccgggcgccctatggcttgaagagcctggccacccagtggctccaccgccctgatggatccactgaatctgtcctggtatgatgatgatctggagaggcagaactggagccggcccttcaacgggtcagacgggaaggcggacagaccccactacaactactatgccacactgctcaccctgctcatcgctgtcatcgtcttcggcaacgtgctggtgtgcatggctgtgtcccgcgagaaggcgctgcagaccaccaccaactacctgatcgtcagcctcgcagtggccgacctcctcgtcgccacactggtcatgccctgggttgtctacctggaggtggtaggtgagtggaaattcagcaggattcactgtgacatcttcgtcactctggacgtcatgatgtgcacggcgagcatcctgaacttgtgtgccatcagcatcgacaggtacacagctgtggccatgcccatgctgtacaatacgcgctacagctccaagcgccgggtcaccgtcatgatctccatcgtctgggtcctgtccttcaccatctcctgcccactcctcttcggactcaataacgcagaccagaacgagtgcatcattgccaacccggccttcgtggtctactcctccatcgtctccttctacgtgcccttcattgtcaccctgctggtctacatcaagatctacattgtcctccgcagacgccgcaagcgagtcaacaccaaacgcagcagccgagctttcagggcccacctgagggctccactaaagggcaactgtactcaccccgaggacatgaaactctgcaccgttatcatgaagtctaatgggagtttcccagtgaacaggcggagagtggaggctgcccggcgagcccaggagctggagatggagatgctctccagcaccagcccacccgagaggacccggtacagccccatcccacccagccaccaccagctgactctccccgacccgtcccaccatggtctccacagcactcccgacagccccgccaaaccagagaagaatgggcatgccaaagaccaccccaagattgccaagatctttgagatccagaccatgcccaatggcaaaacccggacctccctcaagaccatgagccgtaggaagctctcccagcagaaggagaagaaagccactcagatgctcgccattgttctcggcgtgttcatcatctgctggctgcccttcttcatcacacacatcctgaacatacactgtgactgcaacatcccgcctgtcctgtacagcgccttcacgtggctgggctatgtcaacagcgccgtgaaccccatcatctacaccaccttcaacattgagttccgcaaggccttcctgaagatcctccactgctgactctgctgcctgcccgcacagcagcctgcttcccacctccctgcccaggccggccagcctcacccttgcgaaccgtgagcaggaaggcctgggtggatcggcctcctcttcaccccggcaggccctgcagtgttcgcttggctccatgctcctcactgcccgcacaccctcactctgccagggcagtgctagtgagctgggcatggtaccagccctggggctgggccccccagctcaggggcagctcatagagtcccccctcccacctccagtccccctatccttggcaccaaagatgcagccgccttccttgaccttcctctggggctctagggttgctggagcctgagtcagggcccagaggctgagttttctctttgtggggcttggcgtggagcaggcggtggggagagatggacagttcacaccctgcaaggcccacaggaggcaagcaagctctcttgccgaggagccaggcaacttcagtcctgggagacccatgtaaataccagactgcaggttggaccccagagattcccaagccaaaaaccttagctccctcccgcaccccgatgtggacctctactttccaggctagtccggacccacctcaccccgttacagctccccaagtggtttccacatgctctgagaagaggagccctcatcttgaagggcccaggagggtctatggggagaggaactccttggcctagcccaccctgctgccttctgacggccctgcaatgtatcccttctcacagcacatgctggccagcctggggcctggcagggaggtcaggccctggaactctatctgggcctgggctaggggacatcagaggttctttgagggactgcctctgccacactctgacgcaaaaccactttccttttctattccttctggcctttcctctctcctgtttcccttcccttccactgcctctgccttagaggagcccacggctaagaggctgctgaaaaccatctggcctggcctggccctgccctgaggaaggaggggaagctgcagcttgggagagcccctggggcctagactctgtaacatcactatccatgcaccaaactaataaaactttgacgagtca

SEQ ID NO: 15769 - DNA, 1493 bp, Artificial Sequence
  derived and/or modified sequence
atggatccactgaatctgtcctggtatgatgatgatctggagaggcagaactggagccggcccttcaacgggtcagacgggaaggcggacagaccccactacaactactatgccacactgctcaccctgctcatcgctgtcatcgtcttcggcaacgtgctggtgtgcatggctgtgtcccgcgagaaggcgctgcagaccaccaccaactacctgatcgtcagcctcgcagtggccgacctcctcgtcgccacactggtcatgccctgggttgtctacctggaggtggtaggtgagtggaaattcagcaggattcactgtgacatcttcgtcactctggacgtcatgatgtgcacggcgagcatcctgaacttgtgtgccatcagcatcgacaggtacacagctgtggccatgcccatgctgtacaatacgcgctacagctccaagcgccgggtcaccgtcatgatctccatcgtctgggtcctgtccttcaccatctcctgcccactcctcttcggactcaataacgcagaccagaacgagtgcatcattgccaacccggccttcgtggtctactcctccatcgtctccttctacgtgcccttcattgtcaccctgctggtctacatcaagatctacattgtcctccgcagacgccgcaagcgagtcaacaccaaacgcagcagccgagctttcagggcccacctgagggctccactaaagggcaactgtactcaccccgaggacatgaaactctgcaccgttatcatgaagtctaatgggagtttcccagtgaacaggcggagagtggtgcaggaggctgcccggcgagcccaggagctggagatggagatgctctccagcaccagcccacccgagaggacccggtacagccccatcccacccagccaccaccagctgactctccccgacccgtcccaccatggtctccacagcactcccgacagccccgccaaaccagagaagaatgggcatgccaaagaccaccccaagattgccaagatctttgagatccagaccatgcccaatggcaaaacccggacctccctcaagaccatgagccgtaggaagctctcccagcagaaggagaagaaagccactcagatgctcgccattgttctcggcgtgttcatcatctgctggctgcccttcttcatcacacacatcctgaacatacactgtgactgcaacatcccgcctgtcctgtacagcgccttcacgtggctgggctatgtcaacagcgccgtgaaccccatcatctacaccaccttcaacattgagttccgcaaggccttcctgaagatcctccactgctgactctgctgcctgcccgcacagcagcctgcttcccacctccctgcccaggccggccagcctcacccttgcgaaccgtgagcaggaaggcctgggtggatcggcctcctcttcaccccggcaggccctgcagtgttcgcttggctccatgctcctca

SEQ ID NO: 15770 - DNA, 2467 bp, Artificial Sequence
  derived and/or modified sequence
ttaagaagtgtttgttgaatgaataaataaatgatggatcagctctgttcaagctcatcttattatgcatttttaaaaaattgtgtttgctcatttgtcctaccagctgtaaaaacttgctagcaaaagagtggcagaaggcccaacatttttagaaaattcttagccgtaaaccttaaaatcccgagttggaaaattctcattattaaatgccaggagttggtcttcttcctggagacctctgcaagaggccctctcactgacaccttgtgtccatttttcctggccagagcctggccacccagtggctccaccgccctgatggatccactgaatctgtcctggtatgatgatgatctggagaggcagaactggagccggcccttcaacgggtcagacgggaaggcggacagaccccactacaactactatgccacactgctcaccctgctcatcgctgtcatcgtcttcggcaacgtgctggtgtgcatggctgtgtcccgcgagaaggcgctgcagaccaccaccaactacctgatcgtcagcctcgcagtggccgacctcctcgtcgccacactggtcatgccctgggttgtctacctggaggtggtaggtgagtggaaattcagcaggattcactgtgacatcttcgtcactctggacgtcatgatgtgcacggcgagcatcctgaacttgtgtgccatcagcatcgacaggtacacagctgtggccatgcccatgctgtacaatacgcgctacagctccaagcgccgggtcaccgtcatgatctccatcgtctgggtcctgtccttcaccatctcctgcccactcctcttcggactcaataacgcagaccagaacgagtgcatcattgccaacccggccttcgtggtctactcctccatcgtctccttctacgtgcccttcattgtcaccctgctggtctacatcaagatctacattgtcctccgcagacgccgcaagcgagtcaacaccaaacgcagcagccgagctttcagggcccacctgagggctccactaaagggcaactgtactcaccccgaggacatgaaactctgcaccgttatcatgaagtctaatgggagtttcccagtgaacaggcggagagtggaggctgcccggcgagcccaggagctggagatggagatgctctccagcaccagcccacccgagaggacccggtacagccccatcccacccagccaccaccagctgactctccccgacccgtcccaccatggtctccacagcactcccgacagccccgccaaaccagagaagaatgggcatgccaaagaccaccccaagattgccaagatctttgagatccagaccatgcccaatggcaaaacccggacctccctcaagaccatgagccgtaggaagctctcccagcagaaggagaagaaagccactcagatgctcgccattgttctcggcgtgttcatcatctgctggctgcccttcttcatcacacacatcctgaacatacactgtgactgcaacatcccgcctgtcctgtacagcgccttcacgtggctgggctatgtcaacagcgccgtgaaccccatcatctacaccaccttcaacattgagttccgcaaggccttcctgaagatcctccactgctgactctgctgcctgcccgcacagcagcctgcttcccacctccctgcccaggccggccagcctcacccttgcgaaccgtgagcaggaaggcctgggtggatcggcctcctcttcaccccggcaggccctgcagtgttcgcttggctccatgctcctcactgcccgcacaccctcactctgccagggcagtgctagtgagctgggcatggtaccagccctggggctgggccccccagctcaggggcagctcatagagtcccccctcccacctccagtccccctatccttggcaccaaagatgcagccgccttccttgaccttcctctggggctctagggttgctggagcctgagtcagggcccagaggctgagttttctctttgtggggcttggcgtggagcaggcggtggggagagatggacagttcacaccctgcaaggcccacaggaggcaagcaagctctcttgccgaggagccaggcaacttcagtcctgggagacccatgtaaataccagactgcaggttggaccccagagattcccaagccaaaaaccttagctccctcccgcaccccgatgtggacctctactttccaggctagtccggacccacctcaccccgttacagctccccaagtggtttccacatgctctgagaagaggagccctcatcttgaagggcccaggagggtctatggggagaggaactccttggcctagcccaccctgctgccttctgacggccctgcaatgtatcccttctcacagcacatgctggccagcctggggcctggcagggaggtcaggccctggaactc

SEQ ID NO: 15771 - DNA, 2473 bp, Artificial Sequence
  derived and/or modified sequence
agagcctggccacccagtggctccaccgccctgatggatccactgaatctgtcctggtatgatgatgatctggagaggcagaactggagccggcccttcaacgggtcagacgggaaggcggacagaccccactacaactactatgccacactgctcaccctgctcatcgctgtcatcgtcttcggcaacgtgctggtgtgcatggctgtgtcccgcgagaaggcgctgcagaccaccaccaactacctgatcgtcagcctcgcagtggccgacctcctcgtcgccacactggtcatgccctgggttgtctacctggaggtaggtgagtggaaattcagcaggattcactgtgacatcttcgtcactctggacgtcatgatgtgcacggcgagcatcctgaacttgtgtgccatcagcatcgacaggtacacagctgtggccatgcccatgctgtacaatacgcgctacagctccaagcgccgggtcaccgtcatgatctccatcgtctgggtcctgtccttcaccatctcctgcccactcctcttcggactcaataacgcagaccagaacgagtgcatcattgccaacccggccttcgtggtctactcctccatcgtctccttctacgtgcccttcattgtcaccctgctggtctacatcaagatctacattgtcctccgcagacgccgcaagcgagtcaacaccaaacgcagcagccgagctttcagggcccacctgagggctccactaaagggcaactgtactcaccccgaggacatgaaactctgcaccgttatcatgaagtctaatgggagtttcccagtgaacaggcggagagtggaggctgcccggcgagcccaggagctggagatggagatgctctccagcaccagcccacccgagaggacccggtacagccccatcccacccagccaccaccagctgactctccccgacccgtcccaccatggtctccacagcactcccgacagccccgccaaaccagagaagaatgggcatgccaaagaccaccccaagattgccaagatctttgagatccagaccatgcccaatggcaaaacccggacctccctcaagaccatgagccgtaggaagctctcccagcagaaggagaagaaagccactcagatgctcgccattgttctcggcgtgttcatcatctgctggctgcccttcttcatcacacacatcctgaacatacactgtgactgcaacatcccgcctgtcctgtacagcgccttcacgtggctgggctatgtcaacagcgccgtgaaccccatcatctacaccaccttcaacattgagttccgcaaggccttcctgaagatcctccactgctgactctgctgcctgcccgcacagcagcctgcttcccacctccctgcccaggccggccagcctcacccttgcgaaccgtgagcaggaaggcctgggtggatcggcctcctcttcaccccggcaggccctgcagtgttcgcttggctccatgctcctcactgcccgcacaccctcactctgccagggcagtgctagtgagctgggcatggtaccagccctggggctgggccccccagctcaggggcagctcatagagtcccccctcccacctccagtccccctatccttggcaccaaagatgcagccgccttccttgaccttcctctggggctctagggttgctggagcctgagtcagggcccagaggctgagttttctctttgtggggcttggcgtggagcaggcggtggggagagatggacagttcacaccctgcaaggcccacaggaggcaagcaagctctcttgccgaggagccaggcaacttcagtcctgggagacccatgtaaataccagactgcaggttggaccccagagattcccaagccaaaaaccttagctccctcccgcaccccgatgtggacctctactttccaggctagtccggacccacctcaccccgttacagctccccaagtggtttccacatgctctgagaagaggagccctcatcttgaagggcccaggagggtctatggggagaggaactccttggcctagcccaccctgctgccttctgacggccctgcaatgtatcccttctcacagcacatgctggccagcctggggcctggcagggaggtcaggccctggaactctatctgggcctgggctaggggacatcagaggttctttgagggactgcctctgccacactctgacgcaaaaccactttccttttctattccttctggcctttcctctctcctgtttcccttcccttccactgcctctgccttagaggagcccacggctaagaggctgctgaaaaccatctggcctggcctggccctgccctgaggaaggaggggaagctgcagcttgggagagcccctggggcctagactctgtaacatcactatccatgcaccaaactaataaaactttgacgagtc

SEQ ID NO: 15772 - protein, 419 aa, Artificial Sequence
  derived and/or modified sequence
MGNRSTADADGLLAGRGPAAGASAGASAGLAGQGAAALVGGVLLIGAVLAGNSLVCVSVATERALQTPTNSFIVSLAAADLLLALLVLPLFVYSEVQGGAWLLSPRLCDALMAMDVMLCTASIFNLCAISVDRFVAVAVPLRYNRQGGSRRQLLLIGATWLLSAAVAAPVLCGLNDVRGRDPAVCRLEDRDYVVYSSVCSFFLPCPLMLLLYWATFRGLQRWEVARRAKLHGRAPRRPSGPGPPSPTPPAPRLPQDPCGPDCAPPAPGLPRGPCGPDCAPAAPSLPQDPCGPDCAPPAPGLPPDPCGSNCAPPDAVRAAALPPQTPPQTRRRRRAKITGRERKAMRVLPVVVGAFLLCWTPFFVVHITQALCPACSVPPRLVSAVTWLGYVNSALNPVIYTVFNAEFRNVFRKALRACC

SEQ ID NO: 15773 - DNA, 297 bp, Artificial Sequence
  derived and/or modified sequence
atgcgagtggtcatggcaaggttgttaagcgagggcgagcagggcatccccaccgcctgcgccgcattcgctcaacagcctgcaggacccagacgtggactggccggtgttggtgagggaggtccccagtgctcctgggtcaattatcggtgcactctggaatttctagtaagcttattgggtactgacctcgctagagggaggggcaattctgcgtccggaccaaccgcccccgccgatagtaagcagcttagttgtaaaacatttatcgccgttttgagcctatctaaagagtag

SEQ ID NO: 15774 - DNA, 297 bp, Artificial Sequence
  derived and/or modified sequence
atgcgggtggtgatggcccggctgctgagcgagggcgagcagggcatcccgactgcctgcgctgcctttgcacaacagccagcaggaccgagacggggactcgcgggcgtgggagaggggggacctcagtgctcttgggtcaattaccgctgtactctagagtttctcgtgagccttctgggaacggatctggctaggggtagaggcaattcagcatctgggcccaccgcccctgccgatagcaagcagcttagctgtaaaactttcatcgcagtactgtcactgtcaaaggaatag

SEQ ID NO: 15775 - DNA, 375 bp, Artificial Sequence
  derived and/or modified sequence
atgaccctgaacgaacacgcagcgttcaaacatctgtttaacaaggcccatctggcccctcctctgattcatctgacactgtcgggccacagtacctgtttcagggagcatcgggtagggggtaaggtgacagaccaacaggaccctaaggccgaggaattctttctcgtacagaacaagatgaagtcacttccatgtttgctgctctctacccagacaggccagcccagcgactttagtatattctcacctccatttcctccattttatagcacaaagcctccacttagcagttggccgatcccaaacgagccccttggcacacctcccaggcgaggacggggacgcgcagagggactgctgacttcccagtag

SEQ ID NO: 15776 - DNA, 1260 bp, Artificial Sequence
  derived and/or modified sequence
atgggtaatcggagtaccgcagatgcagacggcctcctcgcaggccggggccctgctgctggcgcctctgctggtgctagcgctggactcgccgggcagggggcagcggctctggtcgggggtgtcttgctaattggggccgttttggctggcaacagtttagtgtgcgtcagcgtggccaccgaacgcgctctgcaaacccccacaaactctttcatcgtgtcactggcagcagccgatctcctactcgccctgctcgtacttccactctttgtctatagcgaagtgcagggcggcgcgtggttgttgagtccacggctgtgcgatgcgcttatggcaatggatgtgatgttgtgcacagccagcatattcaatttgtgcgctatctccgtagaccgcttcgttgctgtcgcagtgccattaagatataaccggcaggggggctccaggaggcagttgctcctaattggcgccacctggttgctgtccgcggctgttgccgcccccgtactttgtggactcaacgatgtgagagggagggatcctgcggtatgccgtctggaggacagggattacgtagtttactcaagcgtgtgcagttttttcttgccttgtcccctaatgctattgttgtactgggctacatttcgtgggctacagagatgggaagtggctcgaagagctaagctgcacggaagggcccctcggcgaccaagcggacctgggccaccatctcccacaccaccagctcctcggctgccacaagacccttgtgggcccgactgtgcaccacccgcccccggattgcccagagggccctgcggaccagattgtgcccccgcagcaccttcactgcctcaggacccctgtggccctgattgcgccccacctgctccggggctgccccccgatccgtgcgggagcaattgcgccccccccgacgccgtgcgggccgctgctctgccgcctcaaacacctccccagacacgccgtcgacgcagagccaaaatcaccggccgcgagcggaaagccatgcgggtgttaccagtggtcgttggtgcatttcttctttgttggaccccatttttcgttgtgcacatcacccaagccctctgcccagcctgctccgtaccgcctcggttggtgtccgccgtaacatggctgggttacgtgaactcagccttgaacccagtgatctatacggtgtttaacgctgagtttcgcaacgtgtttagaaaagcactgagagcgtgttgttag

SEQ ID NO: 15777 - DNA, 1260 bp, Artificial Sequence
  derived and/or modified sequence
atgggcaacagaagcacagcagatgctgatggcctgctggccggccggggccctgctgctggggccagcgctggggccagcgctggcctggccggccagggcgccgccgccctggtgggcggcgtgctgctgattggagctgtgctggccggcaacagcctggtgtgtgtgtctgtggccacagagcgggccctgcagacccccaccaacagcttcatcgtgtccctggccgctgctgacctgctgctggccctgctggtgctgcccctgtttgtgtacagcgaggtgcagggcggggcctggctgctgagcccccggctgtgtgatgccctgatggccatggatgtgatgctgtgcacagccagcatcttcaacctgtgtgccatctctgtggacagatttgtggccgtggccgtgcccctgcgctacaaccggcagggcggcagccggcggcagctgctgctgattggagccacctggctgctgtctgctgctgtggccgcccctgtgctgtgtggcctgaatgatgtgcggggccgggaccctgctgtgtgccgcctggaggaccgggactatgtggtgtacagctctgtgtgcagcttcttcctgccctgccccctgatgctgctgctgtactgggccaccttccggggcctgcagcgctgggaggtggcccggcgggccaagctgcacggccgggccccccggcggcccagcggccctggcccccccagccccaccccaccagccccccggctgccccaggacccctgtggccctgactgtgcccccccagcccctggcctgccccggggcccctgtggccctgactgtgccccagctgcccccagcctgccccaggacccctgtggccctgactgtgcccccccagcccctggcctgcccccagacccctgtggcagcaactgtgcccccccagatgctgtgcgggctgctgccctgcccccccagaccccaccccagaccaggagaagaagaagagccaagatcaccggccgggagaggaaggccatgagggtgctgcctgtggtggtgggcgccttcctgctgtgctggacccccttctttgtggtgcacatcacccaggccctgtgcccagcctgcagcgtgcccccccggctggtgtctgctgtgacctggctgggctacgtgaacagcgccctgaaccctgtgatctacacagtgttcaatgctgagttcagaaatgtgttcaggaaggccctgcgggcctgctgctag

SEQ ID NO: 15778 - DNA, 1260 bp, Artificial Sequence
  derived and/or modified sequence
atgggcaaccggagcaccgccgacgccgacggcctgctggccggccgcgggcctgcagcaggcgcatcagctggcgccagtgccgggctggcgggccagggagcagcagctctggttggaggagtactcctgatcggtgctgtcctggccggcaacagcttggtgtgcgtctcagttgccaccgaaagggcattgcagacccctactaacagcttcatcgtctccctggcagcggccgacctgctgctagctctgctggtgcttccactgtttgtatattctgaagttcagggaggggcgtggcttctgagcccacgcctctgtgacgccctgatggccatggacgtcatgctctgcactgcttctatttttaatctttgcgccatctccgtggacagattcgtcgccgttgctgtccccctaaggtataaccgccagggcgggagcagaaggcagctactcctcatcggagcaacctggttgctgagcgcggcagttgcagccccagtcctttgtggcctcaatgatgtgcgcggacgcgatcctgccgtgtgtagactggaggaccgggactatgtggtttactctagtgtgtgtagcttctttctaccatgccctctaatgctgttgctctactgggctacattccgcggtctacaacgatgggaggtggcccgcagagccaagctccatggtagagcaccccgacgaccttctggcccgggtcctccctcccctacacctcctgccccccggctgcctcaagacccgtgtgggcctgactgtgctccccctgcccccggattaccaagaggcccatgcgggcccgactgtgcacccgctgcgcctagtctgccccaggatccttgtggtccagactgtgctcctcctgcccccgggctgccacctgatccctgtggatccaactgcgccccccccgacgccgtgagagcagctgccctgccaccgcagacaccaccacagactcgaagacgtcggagagccaaaatcactggcagggagcgcaaagctatgagagttttgcccgttgtggtaggagccttcctcctttgctggacgcccttcttcgtcgtgcacattacccaggcattgtgtcctgcttgcagcgtccccccacgcctggtttcagccgttacctggctgggatacgtgaactccgctctgaaccccgttatatacactgtcttcaatgctgaatttagaaacgtattccgaaaagctctgcgagcctgttgctag

SEQ ID NO: 15779 - DNA, 1260 bp, Artificial Sequence
  derived and/or modified sequence
atgggaaatcgctctaccgcagacgcagatggactgctggcgggacgcggtccagccgctggcgctagcgccggagccagtgcaggacttgcaggccaaggggcagctgctttggtgggcggtgtgttgcttatcggtgccgtgctggctggaaattcgttggtctgcgtgtctgtagcgacagagcgagccctgcagactcctacaaactcttttattgtttctctagcagcggcagatttactcttggccctactggttttgcctctgttcgtgtacagtgaggtacaggggggagcatggctgctgtcacccaggctctgcgatgccctgatggccatggacgtaatgctttgtacagcatcaatcttcaatctgtgcgccattagtgtggaccggtttgtggctgttgccgtgcccttgaggtacaacaggcaggggggttcgcgtagacagcttctgctgataggggcaacttggctgctcagtgccgctgtggccgcacctgtcctgtgtggacttaacgacgtcagaggtagagaccccgctgtttgtcggttggaagatagagattacgttgtttactctagcgtctgtagcttcttcctaccatgcccccttatgctgctgctgtactgggccacctttcggggtcttcagaggtgggaagttgccagaagggcaaaattgcatggcagagctccaaggagaccctcaggcccagggcctccatccccaacaccgcctgccccaagattacctcaggacccctgcggacctgactgtgctccacctgcgccaggactgcccaggggcccttgtggtccagattgcgcccctgccgctcccagtctgcctcaggacccctgcgggcctgactgtgcccctcccgctcctgggttgccccctgacccttgtggcagcaattgcgcaccgcctgacgccgtgagggccgcagccttgccccctcaaacgccccctcagacgagacggagacgtcgtgcaaagataaccggcagagagcggaaggctatgcgggtcctgcctgtggtcgtgggtgcattcctgctgtgttggaccccgttcttcgtcgtgcatatcactcaagccctctgtcctgcctgctctgtgcccccacgtctggtctccgccgtcacctggctgggctacgtcaattctgccctgaaccctgttatctacaccgtctttaatgcagagttcagaaacgtcttccgaaaggccctgcgggcatgttgctag

SEQ ID NO: 15780 - DNA, 1260 bp, Artificial Sequence
  derived and/or modified sequence
atgggcaacagaagcaccgccgacgccgacggcctgctggccggcagaggccccgccgccggcgccagcgccggcgccagcgccggcctggccggccagggcgccgccgccctggtgggcggcgtgctgctgatcggcgccgtgctggccggcaacagcctggtgtgcgtgagcgtggccaccgagagagccctgcagacccccaccaacagcttcatcgtgagcctggccgccgccgacctgctgctggccctgctggtgctgcccctgttcgtgtacagcgaggtgcagggcggcgcctggctgctgagccccagactgtgcgacgccctgatggccatggacgtgatgctgtgcaccgccagcatcttcaacctgtgcgccatcagcgtggacagattcgtggccgtggccgtgcccctgagatacaacagacagggcggcagcagaagacagctgctgctgatcggcgccacctggctgctgagcgccgccgtggccgcccccgtgctgtgcggcctgaacgacgtgagaggcagagaccccgccgtgtgcagactggaggacagagactacgtggtgtacagcagcgtgtgcagcttcttcctgccctgccccctgatgctgctgctgtactgggccaccttcagaggcctgcagagatgggaggtggccagaagagccaagctgcacggcagagcccccagaagacccagcggccccggcccccccagccccaccccccccgcccccagactgccccaggacccctgcggccccgactgcgccccccccgcccccggcctgcccagaggcccctgcggccccgactgcgcccccgccgcccccagcctgccccaggacccctgcggccccgactgcgccccccccgcccccggcctgccccccgacccctgcggcagcaactgcgccccccccgacgccgtgagagccgccgccctgcccccccagacccccccccagaccagaagaagaagaagagccaagatcaccggcagagagagaaaggccatgagagtgctgcccgtggtggtgggcgccttcctgctgtgctggacccccttcttcgtggtgcacatcacccaggccctgtgccccgcctgcagcgtgccccccagactggtgagcgccgtgacctggctgggctacgtgaacagcgccctgaaccccgtgatctacaccgtgttcaacgccgagttcagaaacgtgttcagaaaggccctgagagcctgctgctag

SEQ ID NO: 15781 - DNA, 1375 bp, Artificial Sequence
  derived and/or modified sequence
cccgggcgcgccatggggaaccgcagcaccgcggacgcggacgggctgctggctgggcgcgggccggccgcgggggcatctgcgggggcatctgcggggctggctgggcagggcgcggcggcgctggtggggggcgtgctgctcatcggcgcggtgctcgcggggaactcgctcgtgtgcgtgagcgtggccaccgagcgcgccctgcagacgcccaccaactccttcatcgtgagcctggcggccgccgacctcctcctcgctctcctggtgctgccgctcttcgtctactccgaggtccagggtggcgcgtggctgctgagcccccgcctgtgcgacgccctcatggccatggacgtcatgctgtgcaccgcctccatcttcaacctgtgcgccatcagcgtggacaggttcgtggccgtggccgtgccgctgcgctacaaccggcagggtgggagccgccggcagctgctgctcatcggcgccacgtggctgctgtccgcggcggtggcggcgcccgtactgtgcggcctcaacgacgtgcgcggccgcgaccccgccgtgtgccgcctggaggaccgcgactacgtggtctactcgtccgtgtgctccttcttcctaccctgcccgctcatgctgctgctctactgggccacgttccgcggcctgcagcgctgggaggtggcacgtcgcgccaagctgcacggccgcgcgccccgccgacccagcggccctggcccgccttcccccacgccacccgcgccccgcctcccccaggacccctgcggccccgactgtgcgccccccgcgcccggccttccccggggtccctgcggccccgactgtgcgcccgccgcgcccagcctcccccaggacccctgcggccccgactgtgcgccccccgcgcccggcctccccccggacccctgcggctccaactgtgctccccccgacgccgtcagagccgccgcgctcccaccccagactccaccgcagacccgcaggaggcggcgtgccaagatcaccggccgggagcgcaaggccatgagggtcctgccggtggtggtcggggccttcctgctgtgctggacgcccttcttcgtggtgcacatcacgcaggcgctgtgtcctgcctgctccgtgcccccgcggctggtcagcgccgtcacctggctgggctacgtcaacagcgccctcaaccccgtcatctacactgtcttcaacgccgagttccgcaacgtcttccgcaaggccctgcgtgcctgctgctgagccgggcacccccggacgccccccggcctgatggccaggcctcagggaccaaggagatggggagggcgcttttgtacgttaattaaacaaattccttcccaaa

SEQ ID NO: 15782 - protein, 477 aa, Artificial Sequence
  derived and/or modified sequence
MLPPGSNGTAYPGQFALYQQLAQGNAVGGSAGAPPLGPSQVVTACLLTLLIIWTLLGNVLVCAAIVRSRHLRANMTNVFIVSLAVSDLFVALLVMPWKAVAEVAGYWPFGAFCDVWVAFDIMCSTASILNLCVISVDRYWAISRPFRYKRKMTQRMALVMVGLAWTLSILISFIPVQLNWHRDQAASWGGLDLPNNLANWTPWEEDFWEPDVNAENCDSSLNRTYAISSSLISFYIPVAIMIVTYTRIYRIAQVQIRRISSLERAAEHAQSCRSSAACAPDTSLRASIKKETKVLKTLSVIMGVFVCCWLPFFILNCMVPFCSGHPEGPPAGFPCVSETTFDVFVWFGWANSSLNPVIYAFNADFQKVFAQLLGCSHFCSRTPVETVNISNELISYNQDIVFHKEIAAAYIHMMPNAVTPGNREVDNDEEEGPFDRMFQIYQTSPDGDPVAESVWELDCEGEISLDKITPFTPNGFH

SEQ ID NO: 15783 - DNA, 1434 bp, Artificial Sequence
  derived and/or modified sequence
atgctgcccccaggctctaacggcacggcatacccaggccaattcgctctgtatcagcagctggcccaggggaatgcagtcggtggtagcgccggggcgcctcctctcggacctagtcaggtcgtgaccgcttgtctgttaacactgttgataatatggaccctgctgggcaatgttctcgtgtgtgccgccatcgtcaggtcaagacacctgagggctaatatgaccaacgtgttcatagttagcctggccgtaagcgatctgtttgtggcactgcttgtcatgccctggaaggccgtggccgaggtggccggctactggccattcggcgcattttgcgatgtgtgggttgcgttcgatatcatgtgcagcaccgcgagtattctgaacctctgtgtcatctcagtcgaccgttactgggcgatctccaggcccttcagatacaagcgaaaaatgactcagcgtatggcactcgtgatggtcgggctagcctggaccttgtcgattctgatttctttcattcccgtgcagctgaattggcacagggatcaggctgctagctggggaggccttgaccttccgaataatttagcgaattggacaccctgggaggaggacttctgggagccggatgtgaatgcagaaaactgcgatagctccttaaaccgtacatacgcgatttccagctctctaataagcttctatatccccgtggccatcatgatcgtcacttacacccggatttatcgtatcgctcaggttcaaatccggcgaatcagttccctcgagagggccgcagagcacgcacaatcctgcaggtcatcggcagcttgtgccccagacaccagcctccgagcgtcaattaagaaggagaccaaggtcctgaagacactctccgtgattatgggagtttttgtgtgctgttggcttcctttctttatcctgaactgtatggttccattctgctccggccaccccgagggcccaccggccggatttccctgcgtgtccgaaaccactttcgacgtgttcgtgtggttcggttgggccaactcttctttgaatccagtaatatacgccttcaatgcagacttccagaaggtatttgcgcagctcctcggttgctcgcacttctgctctcgaactcctgtggagactgttaatattagcaacgaactgatctcatacaaccaagatatcgtattccataaggagattgctgccgcgtacatacatatgatgcctaatgcagtgacacccggtaaccgggaggtcgataatgatgaggaagaaggaccgttcgaccgcatgtttcagatctatcagacatctccggacggcgacccggtggcagagagtgtatgggaactggactgtgagggagagatcagcctggacaaaatcactccatttacgcctaacgggttccactag

SEQ ID NO: 15784 - DNA, 1434 bp, Artificial Sequence
  derived and/or modified sequence
atgctgcccccaggcagcaatggaacagcctacccaggccagtttgccctgtaccagcagctggcccagggcaatgctgtgggcggcagcgctggggccccacccctgggccccagccaggtggtgacagcctgcctgctgaccctgctgatcatctggaccctgctgggcaatgtgctggtgtgtgccgccatcgtgcgcagccgccacctgcgggccaacatgaccaacgtgttcatcgtgtccctggccgtgtctgacctgtttgtggccctgctggtgatgccctggaaggctgtggccgaggtggccggctactggccctttggagccttctgtgatgtgtgggtggcctttgacatcatgtgcagcacagccagcatcctgaacctgtgtgtgatctctgtggaccgctactgggccatcagccggcccttccgctacaagaggaagatgacccagaggatggccctggtgatggtgggcctggcctggaccctgagcatcctgatctccttcatccctgtgcagctgaactggcaccgggaccaggccgcctcctggggcggcctggacctgcccaacaacctggccaactggaccccctgggaggaggacttctgggagccagatgtgaatgctgagaactgtgacagcagcctgaacagaacctacgccatcagcagcagcctcatctccttctacatccctgtggccatcatgattgtgacctacacccgcatctacagaattgcccaggtgcagatccgccgcatcagcagcctggagagagctgctgagcacgcccagagctgccgcagcagcgctgcctgtgccccagacaccagcctgcgggccagcatcaagaaggagaccaaggtgctgaagaccctgagcgtcatcatgggcgtgtttgtgtgctgctggctgcccttcttcatcctgaactgcatggtgcccttctgcagcggccaccctgagggccccccagctggcttcccctgtgtgtctgagaccacctttgatgtgtttgtgtggtttggctgggccaacagcagcctgaaccctgtgatctatgccttcaatgctgacttccagaaggtgtttgcccagctgctgggctgcagccacttctgcagcaggacccctgtggagaccgtgaacatcagcaatgaactcatctcctacaaccaggacatcgtgttccacaaggagattgctgctgcctacatccacatgatgcccaatgctgtgaccccaggcaaccgggaggtggacaatgatgaggaggagggcccctttgacaggatgttccagatctaccagaccagcccagatggagaccctgtggccgagagcgtgtgggagctggactgtgagggggagatcagcctggacaagatcacccccttcacccccaacggcttccactag

SEQ ID NO: 15785 - DNA, 1434 bp, Artificial Sequence
  derived and/or modified sequence
atgctgccccccggcagcaacggcaccgcctaccccggccagttcgccttgtatcaacagctcgctcagggaaacgccgtcggggggtctgcaggagctcctccactgggcccgagccaagtggtgaccgcatgtctgctgaccctgctgatcatatggactctgctgggaaacgttcttgtgtgtgcagctatcgtgaggtcaaggcatttgcgagctaacatgacgaacgtattcattgtgtctctggcagtaagcgacctgtttgtggccctcctcgtgatgccttggaaggcagttgcggaagttgccggctactggccatttggcgcgttctgtgatgtttgggtcgcatttgatatcatgtgttcaactgcctccattctgaacctttgcgtgattagcgtggaccgttattgggctatcagccggcccttcagatataagcgcaagatgactcagagaatggccctggtaatggtgggactggcatggaccctatccatcctaatttcattcattccagtacaacttaactggcacagagatcaggctgcctcgtggggcggtctcgacctacctaacaacctcgccaactggacgccctgggaggaagatttctgggaaccggatgtaaacgcagagaactgcgacagcagcctgaaccggacatatgcaatttcctcctcactcattagcttctatatccctgtggccatcatgatagtgacgtacacaagaatttaccggatcgcccaggtgcagattcgacgcatttccagcctagagcgtgccgccgagcatgcacaaagctgtaggtcttccgccgcatgcgcccctgataccagcctacgagcatctatcaagaaggagacaaaggttttgaagactctgagcgttatcatgggagtgtttgtctgttgctggctgccctttttcattcttaattgtatggttccattctgctccggacatccagaagggcccccggccggttttccctgcgtcagtgagactacatttgatgtctttgtctggtttgggtgggctaatagctctctgaatcccgtgatctatgccttcaacgccgatttccaaaaggtcttcgcacaattgctggggtgcagccacttttgttctcgcacaccggttgaaacagttaatatatcaaacgagctgatttcttataaccaggatatcgtttttcacaaggagattgctgctgcctacatccacatgatgccgaacgccgtgactcccggtaatcgcgaggtggacaatgatgaagaggaagggcctttcgataggatgtttcaaatttatcagacttccccagacggggacccagttgcggagagtgtttgggaactcgactgtgaaggagaaatctctttggacaaaatcacaccattcacccccaacgggtttcactag

SEQ ID NO: 15786 - DNA, 1434 bp, Artificial Sequence
  derived and/or modified sequence
atgctgccccctggatcaaatggaactgcatatcccggacaattcgccctgtatcaacagttggcccaaggaaacgctgtcggtggcagcgccggagcgcctcccttgggaccttcacaagtggtgaccgcgtgtctgctgaccctcttgatcatttggactctgctcgggaatgtactggtgtgcgccgctatagtcaggtcccgtcacctgcgggctaacatgacaaatgtttttattgtgtctctcgctgtatccgacctgtttgtagcccttttagtcatgccttggaaggcggtagccgaagtcgccggatattggccttttggtgccttttgtgacgtttgggtcgccttcgacatcatgtgctccacagcttccatcttgaatctgtgtgtcattagcgtagaccgatattgggctatctcgcgaccgttccgctacaagcgtaagatgactcagcggatggccctggtgatggtgggtctagcatggacacttagcattctgatctcctttattcctgtgcaactcaattggcatcgtgaccaggccgcttcttggggcggattggatctcccaaacaaccttgccaactggaccccttgggaggaggatttttgggaaccggacgtgaatgctgaaaattgtgattcaagtttaaatcgcacatatgccataagttcttcgctgatttccttttacatccctgtagctataatgattgtcacctacactcgtatctatcgaatcgcacaggtgcagattcgacgtatatcctcactggagagggccgctgaacacgcccagtcttgccgctcaagtgctgcatgtgctccagacacgagcctaagggcaagcatcaaaaaagagaccaaagttctcaaaacactgtctgtgatcatgggtgtttttgtatgttgttggctgcctttctttattcttaattgtatggtgcccttctgcagtggccaccccgaggggcctcctgcgggattcccctgcgtctccgagacaacctttgatgtatttgtgtggttcggctgggcgaactcctctttgaaccctgttatttatgcattcaacgctgattttcagaaggtattcgctcaattacttggttgctctcacttctgttctagaacgccagtcgagaccgtcaacattagcaatgagctgatttcctataaccaagatatcgtgttccataaggagatcgctgcagcttatatccatatgatgcctaacgctgttactccgggtaatcgtgaagtcgataacgacgaggaggaagggccatttgaccggatgtttcagatctaccagacctcaccagatggggatcctgtcgcagagagcgtgtgggagttggactgtgaaggggagatctcactggataagattacaccctttacacccaatggcttccactag

SEQ ID NO: 15787 - DNA, 1434 bp, Artificial Sequence
  derived and/or modified sequence
atgctgccccccggcagcaacggcaccgcctaccccggccagttcgccctgtaccagcagctggcccagggcaacgccgtgggcggcagcgccggcgccccccccctgggccccagccaggtggtgaccgcctgcctgctgaccctgctgatcatctggaccctgctgggcaacgtgctggtgtgcgccgccatcgtgagaagcagacacctgagagccaacatgaccaacgtgttcatcgtgagcctggccgtgagcgacctgttcgtggccctgctggtgatgccctggaaggccgtggccgaggtggccggctactggcccttcggcgccttctgcgacgtgtgggtggccttcgacatcatgtgcagcaccgccagcatcctgaacctgtgcgtgatcagcgtggacagatactgggccatcagcagacccttcagatacaagagaaagatgacccagagaatggccctggtgatggtgggcctggcctggaccctgagcatcctgatcagcttcatccccgtgcagctgaactggcacagagaccaggccgccagctggggcggcctggacctgcccaacaacctggccaactggaccccctgggaggaggacttctgggagcccgacgtgaacgccgagaactgcgacagcagcctgaacagaacctacgccatcagcagcagcctgatcagcttctacatccccgtggccatcatgatcgtgacctacaccagaatctacagaatcgcccaggtgcagatcagaagaatcagcagcctggagagagccgccgagcacgcccagagctgcagaagcagcgccgcctgcgcccccgacaccagcctgagagccagcatcaagaaggagaccaaggtgctgaagaccctgagcgtgatcatgggcgtgttcgtgtgctgctggctgcccttcttcatcctgaactgcatggtgcccttctgcagcggccaccccgagggcccccccgccggcttcccctgcgtgagcgagaccaccttcgacgtgttcgtgtggttcggctgggccaacagcagcctgaaccccgtgatctacgccttcaacgccgacttccagaaggtgttcgcccagctgctgggctgcagccacttctgcagcagaacccccgtggagaccgtgaacatcagcaacgagctgatcagctacaaccaggacatcgtgttccacaaggagatcgccgccgcctacatccacatgatgcccaacgccgtgacccccggcaacagagaggtggacaacgacgaggaggagggccccttcgacagaatgttccagatctaccagaccagccccgacggcgaccccgtggccgagagcgtgtgggagctggactgcgagggcgagatcagcctggacaagatcacccccttcacccccaacggcttccactag

SEQ ID NO: 15788 - DNA, 2375 bp, Artificial Sequence
  derived and/or modified sequence
agtgccagcctggcgcccgcgactgcctgccccagcccctcagtggcggcttgctctcttctctcgctccgaaccagacacagccgctgccgctgccgtccggcgcgctacagactcccgagaacagccctggctgtcagcgagcaccagccgcttcctgtccccatcgcggagactggaggggcgcaccacggccatggagccagaggcgcttcaggaggcaagagaagtccccgcgcgctccgcagcccggcgcagctcatggtgagcgccctctggggctcgagggtcccttggctgagggggcgcatcctcggggtgcccgatggggctgcctgggggtcgcagggctgaagttgggaccgcgcacagaccgcccctgcagtccagcccgaaatgctgccgccaggcagcaacggcaccgcgtacccggggcagttcgctctataccagcagctggcgcaggggaacgccgtggggggctcggcgggggcaccgccactggggccctcacaggtggtcaccgcctgcctgctgaccctactcatcatctggaccctgctgggcaacgtgctggtgtgcgcagccatcgtgcggagccgccacctgcgcgccaacatgaccaacgtcttcatcgtgtctctggccgtgtcagaccttttcgtggcgctgctggtcatgccctggaaggcagtcgccgaggtggccggttactggccctttggagcgttctgcgacgtctgggtggccttcgacatcatgtgctccactgcctccatcctgaacctgtgcgtcatcagcgtggaccgctactgggccatctccaggcccttccgctacaagcgcaagatgactcagcgcatggccttggtcatggtcggcctggcatggaccttgtccatcctcatctccttcattccggtccagctcaactggcacagggaccaggcggcctcttggggcgggctggacctgccaaacaacctggccaactggacgccctgggaggaggacttttgggagcccgacgtgaatgcagagaactgtgactccagcctgaatcgaacctacgccatctcttcctcgctcatcagcttctacatccccgttgccatcatgatcgtgacctacacgcgcatctaccgcatcgcccaggtgcagatccgcaggatttcctccctggagagggccgcagagcacgcgcagagctgccggagcagcgcagcctgcgcgcccgacaccagcctgcgcgcttccatcaagaaggagaccaaggttctcaagaccctgtcggtgatcatgggggtcttcgtgtgttgctggctgcccttcttcatccttaactgcatggtccctttctgcagtggacaccccgaaggccctccggccggcttcccctgcgtcagtgagaccaccttcgacgtcttcgtctggttcggctgggctaactcctcactcaaccccgtcatctatgccttcaacgccgactttcagaaggtgtttgcccagctgctggggtgcagccacttctgctcccgcacgccggtggagacggtgaacatcagcaatgagctcatctcctacaaccaagacatcgtcttccacaaggaaatcgcagctgcctacatccacatgatgcccaacgccgttacccccggcaaccgggaggtggacaacgacgaggaggagggtcctttcgatcgcatgttccagatctatcagacgtccccagatggtgaccctgttgctgagtctgtctgggagctggactgcgagggggagatttctttagacaaaataacacctttcaccccgaatggattccattaaactgcattaagaaaccccctcatggatctgcataaccgcacagacattgacaagcacgcacacacacgcaaatacatgcctttccagtgctgctccctttatcatgtgtttctgtgtagtagctcgtgtgcttagaaacctcaccccattgattggtagttcgaagaattggcagaagcagttgcaataaactcagtcaaatgtacccagcctaccagagatggaccaacgatcctatgagagaagagagtatggtgctgggtccttaaaaaaaaaaatgatacttggtccttaaaaaatatgctctcccctccctttttaaacaaatggcttgttcagtcacttgtttgtgtttgaattgatttttaaacagcaggttgtgtgtgtgtgcagtgatgtggtgggagcacagctttcctgggtctggattcccgtggctttgtgcttatgtcatttcttctctctgtgctggtgggggcctctttaccatagcttaagaagtatccctgatttattctggtgtctaataaacacagattatttgt

SEQ ID NO: 15789 - protein, 193 aa, Artificial Sequence
  derived and/or modified sequence
MGVHECPAWLWLLLSLLSLPLGLPVLGAPPRLICDSRVLERYLLEAKEAENITTGCAEHCSLNENITVPDTKVNFYAWKRMEVGQQAVEVWQGLALLSEAVLRGQALLVNSSQPWEPLQLHVDKAVSGLRSLTTLLRALGAQKEAISPPDAASAAPLRTITADTFRKLFRVYSNFLRGKLKLYTGEACRTGDR

SEQ ID NO: 15790 - DNA, 725 bp, Artificial Sequence
  derived and/or modified sequence
gggaaataagagagaaaagaagagtaagaagaaatataagagccaccatgggagtgcacgagtgtcccgcgtggttgtggttgctgctgtcgctcttgagcctcccactgggactgcctgtgctgggggcaccacccagattgatctgcgactcacgggtacttgagaggtaccttcttgaagccaaagaagccgaaaacatcacaaccggatgcgccgagcactgctccctcaatgagaacattactgtaccggatacaaaggtcaatttctatgcatggaagagaatggaagtaggacagcaggccgtcgaagtgtggcaggggctcgcgcttttgtcggaggcggtgttgcggggtcaggccctcctcgtcaactcatcacagccgtgggagcccctccaacttcatgtcgataaagcggtgtcggggctccgcagcttgacgacgttgcttcgggctctgggcgcacaaaaggaggctatttcgccgcctgacgcggcctccgcggcacccctccgaacgatcaccgcggacacgtttaggaagctttttagagtgtacagcaatttcctccgcggaaagctgaaattgtatactggtgaagcgtgtaggacaggggatcgctgataagctgccttctgcggggcttgccttctggccatgcccttcttctctcccttgcacctgtacctcttggtctttgaataaagcctgagtaggaag

SEQ ID NO: 15791 - DNA, 794 bp, Artificial Sequence
  derived and/or modified sequence
caagcttttggaccctcgtacagaagctaatacgactcactatagggaaataagagagaaaagaagagtaagaagaaatataagagccaccatgggagtgcacgagtgtcccgcgtggttgtggttgctgctgtcgctcttgagcctcccactgggactgcctgtgctgggggcaccacccagattgatctgcgactcacgggtacttgagaggtaccttcttgaagccaaagaagccgaaaacatcacaaccggatgcgccgagcactgctccctcaatgagaacattactgtaccggatacaaaggtcaatttctatgcatggaagagaatggaagtaggacagcaggccgtcgaagtgtggcaggggctcgcgcttttgtcggaggcggtgttgcggggtcaggccctcctcgtcaactcatcacagccgtgggagcccctccaacttcatgtcgataaagcggtgtcggggctccgcagcttgacgacgttgcttcgggctctgggcgcacaaaaggaggctatttcgccgcctgacgcggcctccgcggcacccctccgaacgatcaccgcggacacgtttaggaagctttttagagtgtacagcaatttcctccgcggaaagctgaaattgtatactggtgaagcgtgtaggacaggggatcgctgataagctgccttctgcggggcttgccttctggccatgcccttcttctctcccttgcacctgtacctcttggtctttgaataaagcctgagtaggaaggcggccgctcgagcatgcatctaga

SEQ ID NO: 15792 - DNA, 767 bp, Artificial Sequence
  derived and/or modified sequence
taatacgactcactatagggaaataagagagaaaagaagagtaagaagaaatataagagccaccatgggagtgcacgagtgtcccgcgtggttgtggttgctgctgtcgctcttgagcctcccactgggactgcctgtgctgggggcaccacccagattgatctgcgactcacgggtacttgagaggtaccttcttgaagccaaagaagccgaaaacatcacaaccggatgcgccgagcactgctccctcaatgagaacattactgtaccggatacaaaggtcaatttctatgcatggaagagaatggaagtaggacagcaggccgtcgaagtgtggcaggggctcgcgcttttgtcggaggcggtgttgcggggtcaggccctcctcgtcaactcatcacagccgtgggagcccctccaacttcatgtcgataaagcggtgtcggggctccgcagcttgacgacgttgcttcgggctctgggcgcacaaaaggaggctatttcgccgcctgacgcggcctccgcggcacccctccgaacgatcaccgcggacacgtttaggaagctttttagagtgtacagcaatttcctccgcggaaagctgaaattgtatactggtgaagcgtgtaggacaggggatcgctgataagctgccttctgcggggcttgccttctggccatgcccttcttctctcccttgcacctgtacctcttggtctttgaataaagcctgagtaggaaggcggccgctcgagcatgcatctaga

SEQ ID NO: 15793 - DNA, 750 bp, Artificial Sequence
  derived and/or modified sequence
taatacgactcactatagggaaataagagagaaaagaagagtaagaagaaatataagagccaccatgggagtgcacgagtgtcccgcgtggttgtggttgctgctgtcgctcttgagcctcccactgggactgcctgtgctgggggcaccacccagattgatctgcgactcacgggtacttgagaggtaccttcttgaagccaaagaagccgaaaacatcacaaccggatgcgccgagcactgctccctcaatgagaacattactgtaccggatacaaaggtcaatttctatgcatggaagagaatggaagtaggacagcaggccgtcgaagtgtggcaggggctcgcgcttttgtcggaggcggtgttgcggggtcaggccctcctcgtcaactcatcacagccgtgggagcccctccaacttcatgtcgataaagcggtgtcggggctccgcagcttgacgacgttgcttcgggctctgggcgcacaaaaggaggctatttcgccgcctgacgcggcctccgcggcacccctccgaacgatcaccgcggacacgtttaggaagctttttagagtgtacagcaatttcctccgcggaaagctgaaattgtatactggtgaagcgtgtaggacaggggatcgctgataagctgccttctgcggggcttgccttctggccatgcccttcttctctcccttgcacctgtacctcttggtctttgaataaagcctgagtaggaaggcggccgc

SEQ ID NO: 15794 - DNA, 579 bp, Artificial Sequence
  derived and/or modified sequence
atgggggtccacgaatgtcctgcttggttgtggctgttattgagtctgctgagtttgcctttggggctccccgtattgggtgcgcccccccggctgatctgcgactcacgtgtacttgagaggtacctactggaggcgaaggaagctgaaaacatcaccacagggtgcgccgagcactgcagcctcaacgagaacatcactgtgccagataccaaagtgaatttttacgcctggaaaagaatggaagtgggtcagcaagccgtcgaagtgtggcagggattagcactattgagtgaagcagtgctcaggggccaagctttgctggttaattcctctcagccatgggagcccctgcagctgcacgtggataaagccgtgtccgggcttcgttccctgacaaccttgctgagagcgctaggagcacaaaaagaagccatcagcccccctgacgcagcgagcgccgcacccctccgtacgatcactgcagacacctttcgtaagctcttcagggtttactccaattttctaagaggaaaactgaaactttacacaggcgaggcgtgtagaaccggcgaccgg

SEQ ID NO: 15795 - DNA, 579 bp, Artificial Sequence
  derived and/or modified sequence
atgggtgtgcacgagtgtccagcttggctctggctgctcctgtccctgctgagcttgccgcttggcctcccggtgctcggggctccgcctaggctgatctgcgacagccgcgtcctggagcgctacttgctggaggcaaaggaggcggagaacatcacgaccggatgtgcggagcactgctccctgaacgaaaacatcactgtgccggatactaaagtgaacttctacgcttggaagcggatggaggtcggacagcaggcagtggaagtctggcaaggactggccctgctctcggaagcggtgctgcgcggccaggcgctccttgtgaattcttcccagccgtgggaacccctgcagctccacgtcgacaaggccgtctcgggactccggtcgctcactactctgctgcgggccctcggagctcaaaaggaagccatttccccgcctgatgccgcctcagccgctcccctccgaactatcacggcggacacgtttcgcaagctgttccgcgtgtacagcaactttcttagaggcaaactgaagctgtacaccggtgaggcttgccgcacgggagataga

SEQ ID NO: 15796 - DNA, 579 bp, Artificial Sequence
  derived and/or modified sequence
atgggcgttcacgagtgcccggcatggctttggctgctgctcagcctcctgagcctgccgctgggcctgccggtgctcggagccccgcctcggttgatttgcgattcgagagtgctggaacgctatttgctggaggctaaagaagcggagaacatcaccactggatgtgcggagcattgctcgctgaacgaaaacatcactgtgccagacactaaggtgaacttctacgcttggaagcgaatggaagtgggacaacaggcggtggaggtgtggcagggtctggccctcttgtcagaagcagtgttgcggggtcaggcactcctggtcaattccagccagccttgggagccgctgcaactccacgttgacaaagccgtcagcggattgaggagccttaccaccttgctcagggccctcggggcgcagaaggaggcgatctcacctccagatgcagcgtccgctgcaccgcttcggaccatcactgcggacacctttcggaagctctttagggtgtactcgaatttcctccgcggtaaactgaagctctacacgggcgaggcgtgccgcacgggagataga

SEQ ID NO: 15797 - DNA, 579 bp, Artificial Sequence
  derived and/or modified sequence
atgggggtgcatgaatgccctgcgtggctgtggttgctgttgtcgttactgtcccttcctctaggcctccccgtactcggtgcacctccccgcctgatttgcgattccagagtgctagagcgctacctgttggaggcgaaggaagcggagaacattacaacaggatgcgcagagcattgcagtctgaacgagaacataacagtgcctgacacaaaggtaaacttttatgcttggaagaggatggaagtggggcaacaggcagtggaggtatggcaaggcttggctctcctatcggaggctgttctgcgcgggcaggccctgcttgtaaactctagccaaccatgggagccactccagttacatgtggataaagctgtgtcagggctgcgctcgctgacaactctcctcagggctctgggggctcaaaaagaggcgatttccccaccagacgcagcatccgctgctccactgagaacaatcaccgccgatacgtttcgaaaactctttcgtgtgtacagcaatttcctcagagggaagctgaagctgtataccggcgaggcgtgtagaaccggggaccgt

SEQ ID NO: 15798 - DNA, 579 bp, Artificial Sequence
  derived and/or modified sequence
atgggggtgcacgaatgccctgcttggctgtggctactcctgagcctactgtctctgcccctgggcctacccgttctgggggctccaccccgtttgatttgtgattcacgggttctggagagataccttctggaagctaaggaggcagagaacattacgacagggtgcgctgagcattgctcattgaacgaaaatattactgtgcccgacacaaaagtaaacttctacgcttggaagcggatggaagtcggccagcaggcggtggaggtgtggcaggggcttgccttactttcagaagccgtgctgagggggcaggcactgcttgtcaatagtagtcaaccatgggagcccctgcaacttcacgtggacaaagccgtgtctggcttgcgatctctgacaacacttttgagggctctaggggctcagaaagaagcaatctcccctcctgatgccgcttccgccgcccctcttaggactatcaccgccgatactttccggaaacttttccgggtgtactctaatttcctgcgtggaaaactgaagctgtacactggggaagcctgtagaactggtgatcga

SEQ ID NO: 15799 - DNA, 579 bp, Artificial Sequence
  derived and/or modified sequence
atgggcgtgcatgagtgtcctgcatggctttggctgcttctttccctgctgtcgctcccattggggctgccagtgcttggagcgccgccccggctgatctgtgattcaagagtcctggagaggtacttgctcgaagctaaggaggcggaaaacataaccaccggatgcgctgaacattgcagccttaacgagaatatcactgtgcctgataccaaggtgaacttttacgcatggaagaggatggaagtcggacaacaggcagtggaagtctggcagggactggcactcctctctgaagctgtgctgagaggtcaagccttgcttgtgaactcatcacagccctgggagcctcttcaacttcatgtggacaaagcagtctcgggtctgagaagccttaccaccctgctccgggcactgggagcgcaaaaagaggcaatttcccctcctgatgctgcatccgcggcaccactgcggaccattactgcagacacgtttaggaagttgttccgggtgtattccaattttcttagaggaaaacttaaactgtatactggtgaggcatgtagaaccggtgatcgg

SEQ ID NO: 15800 - DNA, 579 bp, Artificial Sequence
  derived and/or modified sequence
atgggtgttcatgaatgtcccgcctggctttggctactcctctccctgttgtcgcttccgttaggcctgccagttctgggtgctccccctcgccttatctgtgattcgcgagtgctcgaaagatatttgctggaagcaaaggaggccgagaatatcacgaccggctgtgctgagcattgcagtctcaatgaaaacatcaccgttcctgacacaaaggtcaatttttacgcatggaagcgtatggaagtgggtcagcaggcggtcgaagtctggcagggccttgcactcctgagtgaagctgtccttcgcgggcaagctctgttggtcaactcgtcgcagccgtgggagcccctgcagttgcatgtggacaaagcggtgtcgggcttacgtagtctgacgacccttctgagggcacttggagcccagaaggaggcgatttcgccaccagacgccgcctcggcagcgccacttagaaccatcacagccgacacttttcgaaagctattcagagtgtactccaatttcctgcgtggtaagctgaagctttatacaggcgaggcctgccgtaccggagatcga

SEQ ID NO: 15801 - DNA, 579 bp, Artificial Sequence
  derived and/or modified sequence
atgggcgtccatgagtgccccgcctggctgtggctgctcctgagtctcctgagtctgccactgggtctccccgtgttaggcgcgcccccgagactcatttgtgattcccgggttctggagcggtatctgctggaggccaaggaggcggagaacatcacgacaggctgtgctgaacactgctcgctaaacgagaatattacggtacccgataccaaggtgaatttttatgcctggaagcgcatggaggttggtcagcaagccgtggaagtgtggcagggactggcattactctccgaggctgtgttgagaggtcaggcactgctggttaactcctcccagccttgggagcctttgcagttgcacgtggataaggctgtttctggacttcgatcgttaactacgctcctgcgcgctctaggcgcgcagaaagaggccatttccccacccgacgccgccagcgctgccccgttgcgtacgatcacggccgataccttccgcaaactcttccgggtttacagtaacttcctgaggggcaagcttaagctctacaccggagaggcctgtaggaccggtgatcgg

SEQ ID NO: 15802 - DNA, 579 bp, Artificial Sequence
  derived and/or modified sequence
atgggcgtgcacgaatgccccgcatggctgtggctgctgctgtcactgctctccttgcctctgggactgccggtccttggtgccccaccacgccttatctgtgacagccgcgtgctggaaaggtacctcctggaggccaaggaagccgaaaatatcaccactggatgcgcagaacactgctcccttaacgagaacattactgtgccagacactaaggtgaatttttacgcctggaagcgaatggaagtggggcaacaggcggtcgaggtttggcagggactcgcactccttagcgaagccgtcttgagaggacaggccctgctggtcaactcgtctcagccgtgggagccgttgcaactccatgtggataaggctgtgtccgggctccgcagcctgactactctcttgcgggcgctcggagctcaaaaagaggcgatctcacctccggacgcggcctcggcagccccgctgcggaccatcacggcggacaccttcagaaagctgttccgggtgtactcgaacttcctgaggggcaagctgaaactctacaccggcgaggcttgccgcaccggagatcgg

SEQ ID NO: 15803 - DNA, 579 bp, Artificial Sequence
  derived and/or modified sequence
atgggagtgcacgagtgtccagcatggctgtggctgctcctctccctcctgtccttgcccctgggtctccctgtgctcggcgcgcccccccgcctgatctgcgacagtagggtcttggagcgctatttgcttgaagccaaagaggcggaaaatatcaccacgggatgcgctgagcactgctctcttaatgaaaacatcactgtcccggataccaaagtaaatttctacgcctggaagagaatggaggtgggacaacaggctgtggaggtttggcaaggcctggccctccttagcgaagccgttctgagaggacaagccctgctggttaacagctcacagccgtgggagcctctgcagcttcacgtcgataaagctgtgagtggccttcgctctcttaccacactcttgagagcgctcggtgcccagaaagaagccatctccccgccagatgctgcctccgccgctcctctgagaaccatcacggccgacacctttaggaagctgtttagggtctactcaaactttctgagaggaaagctcaagctctacactggagaggcctgtaggaccggtgatcgc

SEQ ID NO: 15804 - DNA, 579 bp, Artificial Sequence
  derived and/or modified sequence
atgggggtccacgagtgccccgcttggctctggctcctcctttccttgctttcgctcccactgggactgccggtcctgggggctccgccccgcctgatctgtgacagccgggtcctggaacggtaccttctggaggctaaagaggctgagaacattacgaccggatgcgcagagcactgttccttgaatgagaatatcactgtgccggatactaaagtgaacttctacgcgtggaaaagaatggaagtgggacagcaagcagtggaggtttggcagggactggcgcttctgagcgaagcagtcctgcggggccaagccctgctggtgaactcgtcccagccatgggaaccgcttcagctccacgtcgacaaggcggtgtccggactccggtcactgactaccctcctgagggctctcggtgcgcagaaggaggcgatttccccaccggatgccgcgtccgcagccccgcttaggactatcactgctgatactttcagaaagctgttcagggtgtacagcaatttcttgcgaggaaagctcaagttgtatactggagaagcgtgccggaccggcgaccgt

SEQ ID NO: 15805 - DNA, 579 bp, Artificial Sequence
  derived and/or modified sequence
atgggcgtgcatgaatgccccgcctggctctggctcttgctgagtttgttgtctctgccgctcggacttcccgtcctcggggctccgcccaggctgatttgtgatagccgcgtcctcgagcggtatctcttggaggccaaggaggctgagaatatcactacggggtgtgccgagcattgttccctgaacgagaacatcacggtcccagacactaaggtcaacttctacgcatggaaaaggatggaagtgggccagcaagccgtggaagtctggcaaggtctcgccctcctgagtgaggccgtactgcgcggacaggcacttttggtgaactcaagccagccatgggagcccctgcagctccacgtggacaaagctgtcagcggactgcgaagcctgaccacgctgttgcgagcactcggggctcaaaaggaggccatatccccgcctgacgctgcgtccgctgccccacttagaacaataacagcggacacgtttcgaaagttgttcagagtgtactcaaacttcctgcgcggaaagctcaagctctatactggcgaagcttgcaggaccggagaccgc

SEQ ID NO: 15806 - DNA, 579 bp, Artificial Sequence
  derived and/or modified sequence
atgggagtgcatgagtgtcctgcttggctctggctcctcctgagtcttttgtcgctgccactggggctgccagtgctgggtgcgccccctcggctcatctgtgatagcagagtgctcgagcgttatctgctcgaggcaaaggaagcagaaaacatcactacgggatgcgccgaacactgtagcctgaatgagaacattactgtgccagacactaaggttaacttctacgcctggaagcgtatggaggtgggtcaacaggctgtcgaagtgtggcaaggactcgcccttctctccgaagcagtgctgcggggacaagcacttctcgtcaattcgtcacaaccctgggaacctcttcagctgcatgtggacaaagcggtatcggggctcaggagcttgactacccttctcagagcgcttggggcccagaaggaggctatttcaccacctgacgcggcttcggcagccccactcagaaccatcaccgcagatacctttcgcaaattgtttcgcgtctacagcaacttcttgcggggcaaattgaaactgtacaccggcgaggcctgccggacgggagatcga

SEQ ID NO: 15807 - DNA, 579 bp, Artificial Sequence
  derived and/or modified sequence
atgggcgtgcacgagtgcccggcatggctgtggcttcttctctccctgctgagcctgcctcttgggctgccagtgctgggagcaccaccaagactcatttgtgattccagagtcctcgaacgatacctccttgaagctaaagaagcggaaaacatcacgaccggctgcgcagagcactgctctctgaatgaaaacattaccgtgcccgatacgaaggtcaacttttacgcatggaagagaatggaagtcgggcaacaagccgtggaagtctggcaaggactggcactcctgtcagaagccgtcctccggggacaggcccttttggttaactcgtcacagccttgggagccgctgcagctgcacgtcgataaagcagtctccggactccgctcactgaccaccctgcttagggcgcttggcgcacaaaaggaggcaatctccccacccgacgccgcatccgctgcaccacttcggactattactgcagataccttccgcaagctcttccgcgtctactcaaactttcttcggggtaagctgaaactttacaccggagaagcatgtagaaccggggataga

SEQ ID NO: 15808 - DNA, 579 bp, Artificial Sequence
  derived and/or modified sequence
atgggagtgcatgagtgtccggcctggttgtggttattactttccctgctttctcttccgcttggcctccccgtcctgggtgctccgccgcgtttaatatgtgacagtcgggtcctggaacgttatctcttggaagccaaggaagctgagaatatcacaacgggctgcgctgagcactgctctcttaacgagaacatcacggtcccggatactaaagtgaacttttacgcttggaaacggatggaagtcggacaacaggctgtcgaagtatggcaaggactcgctctgttgtcagaagcggttctccggggacaggcactgcttgttaattcatcacaaccttgggaaccgttacaacttcatgtggataaggccgtttctggtcttaggtcactgactactcttctgcgtgcgcttggagcacagaaagaagccattagtccaccagatgctgcaagcgccgctccccttagaaccattacagcagacacctttcgcaaactgtttcgggtatattcaaacttcctccggggtaaactcaagctatataccggagaagcgtgtcgtactggggatcgc

SEQ ID NO: 15809 - DNA, 579 bp, Artificial Sequence
  derived and/or modified sequence
atgggggtccacgagtgcccagcatggctttggcttctactgtctctgctgagcctgcccctgggcctgcccgtgctgggcgctcctccgagactgatttgtgactcccgagtgctcgagcgttatctgctggaagccaaggaagcggaaaacattacaacaggatgcgccgagcactgctcgctgaacgagaacatcacagtgccggatacgaaggtcaacttttacgcctggaaacggatggaggtggggcaacaggctgttgaggtttggcaagggttggctctcttatcagaggccgtgttgcgggggcaggcacttcttgttaactcttcccagccctgggagccccttcagctgcacgtggataaggctgtgagcgggttgaggtcactgacgactcttctacgcgctctcggcgctcaaaaggaggcgatctcgccccccgatgccgctagcgcggcaccattaaggactattaccgccgatacattcagaaagctgttcagggtctactctaatttcctcaggggcaagctcaaattatataccggggaagcctgcagaacgggagatcgt

SEQ ID NO: 15810 - DNA, 579 bp, Artificial Sequence
  derived and/or modified sequence
atgggagtgcatgaatgtccagcctggctctggctcctgctgagtctattgagcctacccttgggtcttcccgtccttggcgctccgccccgcctcatttgtgattcacgggttttggaacgatatctcctggaagccaaagaggccgaaaacattacgacgggatgcgcggagcattgctctcttaacgagaacatcaccgtcccagatacgaaagtaaacttttatgcatggaaaagaatggaggtgggccagcaggcagtggaggtctggcagggcttggctctgctgtctgaggcagtgctgcggggacaggcactgttggtgaattcgtcacagccgtgggagccactacaattgcacgtggacaaggccgtttctggcctccgcagtttgaccactcttcttcgggcactcggggcacagaaggaagccatttctccccctgacgcggctagtgcagctccactacgaaccattaccgcagacacgttcagaaagctgttccgagtctattcaaattttctcagaggtaagttaaaactgtacaccggcgaagcctgcaggacaggcgatcgc

SEQ ID NO: 15811 - DNA, 579 bp, Artificial Sequence
  derived and/or modified sequence
atgggagtacacgaatgccccgcatggctgtggctgctcttgagtctgctgtccctaccactcggactgcctgtgctcggagccccaccacgcctgatttgcgactcgagggtcctggagcgttacctgctggaggccaaggaggctgagaatataaccaccggttgtgcggaacactgtagtctcaacgaaaatatcactgtacccgacacaaaagtaaatttttacgcctggaagagaatggaggttggtcaacaggccgtggaagtgtggcagggacttgccctgctctcggaagcagtgcttcgtgggcaggcactcctagttaatagctcacagccgtgggagccccttcaactacatgtcgacaaggccgtctccggactacgctctctgacaacgctgctccgggccctgggtgcccagaaggaagctatttcccccccagacgccgcaagtgccgccccattgaggacgataacagccgatactttcaggaaactcttccgtgtgtattccaatttccttcgggggaaactgaagctttatacaggtgaggcatgtaggaccggggaccgg

SEQ ID NO: 15812 - DNA, 579 bp, Artificial Sequence
  derived and/or modified sequence
atgggagtgcacgaatgtccagcatggctgtggctcctgctgagcctcctgtctctcccactcggcctgcccgttctcggcgccccgccgcgtttaatttgcgattctagagtactggagaggtacttgcttgaggccaaagaagcggaaaatataactacgggatgcgcggaacactgcagtctcaacgaaaatatcacagtgcccgacacgaaggtcaatttttacgcatggaaaaggatggaggttgggcagcaagctgtagaggtttggcaagggttggccctgctgtcggaggcagtgctgcggggccaagccctcctcgtgaactccagccagccatgggagccactacaactccacgtcgataaagctgtgagcggactacgcagtctgacaacactgctacgtgcactgggggcgcagaaggaggcaatcagccctccggacgcagcttcggctgcacctctcagaactatcacagccgacacctttaggaagctctttagggtgtacagcaactttctgcgcgggaaactgaaactttatacaggggaagcatgtaggaccggagacaga

SEQ ID NO: 15813 - DNA, 579 bp, Artificial Sequence
  derived and/or modified sequence
atgggagtgcacgaatgcccggcgtggctgtggctgcttctgtcactgctttcactgcctctgggactccctgtcctgggtgcgccaccgaggctgatctgtgactcaagggtgctggaacgctatctgctggaagccaaagaggcagaaaacattaccactggatgcgccgagcattgctcgctcaacgagaatatcaccgtccccgacactaaggtgaacttctacgcctggaagcggatggaagtcggacagcaggccgtggaagtgtggcaagggttggcgctcctctccgaggccgtgcttcgtggccaggcccttctcgtgaactcgtcacaaccatgggagcctcttcaactgcatgtggataaggcggtgtccgggctccggtcgctgacgactctccttcgggccttgggagcccagaaggaggcgatctcgccgccggacgctgcatcagccgcgccgctgagaaccatcactgcagatacgttcaggaaactgtttcgcgtgtactcaaatttccttcggggaaagttgaaactgtacactggtgaagcctgcagaactggggatagg

SEQ ID NO: 15814 - DNA, 579 bp, Artificial Sequence
  derived and/or modified sequence
atgggcgtccacgaatgcccagcttggctctggctattgttatccttattgtctctcccactgggcctgcctgtattgggcgccccccccagactgatttgtgactccagagtgctcgagagatatctgctggaagcaaaggaagccgagaatataacaactggctgtgctgagcactgcagtctcaatgaaaacattacggtgccggacacaaaagttaacttctatgcctggaaacggatggaagtcggccaacaagccgtggaggtgtggcaaggccttgcattgctgtcagaagcagtgcttagaggacaggcgctccttgtgaattcatctcagccctgggagcccttacagttacacgtggataaggccgtctcgggcttacgcagtttaactaccctgttaagagccctgggcgctcaaaaggaagctatttccccccccgatgctgccagtgctgctcccctcagaacgatcaccgcagatacctttcgtaagctgttccgtgtgtattccaattttctcagagggaagctgaaactctacactggtgaggcatgtcgaaccggcgataga

SEQ ID NO: 15815 - DNA, 579 bp, Artificial Sequence
  derived and/or modified sequence
atgggagtccacgaatgtcctgcatggctctggcttctgctgtcgctgctgagcctgccacttggactgccggtgcttggtgcacccccaagactgatctgtgattcacgggtcctggaacggtaccttttggaagcaaaggaagccgagaatatcaccaccggttgcgcggaacattgttcactgaatgagaacataaccgtgccagatactaaagtcaatttctacgcatggaaaaggatggaagtcggtcagcaggccgtggaggtgtggcaaggtctggcactcctgtccgaagcagtgctcagagggcaggccctgctcgtcaactcctcgcaaccgtgggaacccctgcaactccatgtggataaggcagtgtcggggctgaggtccttgactaccctgctgcgtgctctcggagcacagaaggaagctatttcgccccctgacgcagcatcggccgcaccactgagaactattaccgcggacacctttagaaaactttttagggtctactcgaactttctccggggtaagctcaagctctacaccggggaagcctgccgcaccggagatagg

SEQ ID NO: 15816 - DNA, 579 bp, Artificial Sequence
  derived and/or modified sequence
atgggagtgcacgagtgcccagcttggctgtggctgcttctgtctctcctttcacttcccctcgggctacccgtgctcggggctcccccccggctgatatgcgactcgcgcgtgttagaaaggtaccttctcgaagccaaggaagcagagaacattactacaggatgcgctgaacactgctcccttaatgaaaacattacagtcccggacacaaaggtgaatttttacgcttggaaacggatggaagtgggacagcaggccgttgaggtgtggcagggactcgccctcttgtcggaggcagtcttgaggggccaggcgctgctggtgaattcatcacagccatgggaaccactgcagcttcacgtggataaagctgtatctggtcttaggtccttgacaactttgttacgggcgttaggagcacagaaagaggctatctcacctccagacgccgcctctgccgctcccctaagaaccataacggccgacacgtttcgtaaattgttccgtgtgtactcaaacttcctgcggggaaaattaaaactgtacaccggcgaggcatgccgcacgggggataga

SEQ ID NO: 15817 - DNA, 579 bp, Artificial Sequence
  derived and/or modified sequence
atgggagtccatgagtgccccgcatggctgtggctgctgctcagcctgctttcgctgccgctcggactccccgtgctcggagcaccaccacgcctgatttgcgacagtcgggtgctggaacggtacctcttggaagcgaaggaagctgagaacatcaccactggctgcgcggaacattgttcgctcaacgaaaacatcactgtccccgatactaaggtgaacttttacgcctggaagcgcatggaggtgggacaacaggccgtggaagtgtggcagggtctggccctgctgtccgaggcagttctgaggggacaggccctcttggtgaactcgagccaaccatgggaaccgctgcagctccacgtggataaagcggtgtccggattgagatccctcacgaccctgctgcgagctctgggagcgcagaaggaggcgattagcccgccagatgcggcctcggcggccccattgcgcaccatcaccgccgacacctttcggaagctgtttagagtctacagcaacttcctccggggtaagctcaaactgtacaccggggaagcatgccgcaccggcgataga

SEQ ID NO: 15818 - DNA, 579 bp, Artificial Sequence
  derived and/or modified sequence
atgggcgtgcacgagtgcccagcctggctctggctgttgctgtccctcttgtccctgccactgggattgcctgtgcttggcgctcctcctcgcctgatttgcgactccagggtcttggagcgatacctgctggaagccaaagaagcggaaaatataaccaccggctgcgccgagcactgctcattgaacgagaacatcaccgtgcccgacaccaaggtgaatttttacgcatggaagaggatggaagtaggccagcaggcagtcgaggtgtggcaggggctggctctcctgagcgaagccgttcttagggggcaggcgctgcttgtgaattcaagtcagccgtgggaaccactgcagctgcacgtggataaggccgtaagcggcctcaggagtctcacaactctcctccgagcgctgggagcccagaaggaggctattagtccccccgacgccgcctctgctgccccgctcaggactatcaccgccgatacattccgaaagctctttagagtctatagtaactttctgcgcggaaagcttaagctgtacacaggtgaggcctgtcggacaggggatcgg

SEQ ID NO: 15819 - DNA, 579 bp, Artificial Sequence
  derived and/or modified sequence
atgggggtgcatgaatgcccagcgtggctgtggttgcttctgtccctgctgtctctgcctctgggcctgcctgtgttaggtgcccctccccggttgatctgtgacagtcgggtgctagaacgctatctgcttgaagccaaggaagcagaaaacatcaccaccggctgcgccgagcattgctctttaaacgagaacatcacagtccctgacacaaaagtgaatttttacgcttggaagcgaatggaagtaggtcagcaagcagtggaagtttggcaagggctggcacttctgtccgaagccgttttgcgcggccaagcactcctggtcaactcttcccagccctgggaacccctgcaactgcatgtcgataaggccgtctccggcctgaggtccctgaccacactgctcagggcactgggtgcgcaaaaggaggccatcagtccaccagatgccgccagtgctgcgccactccgcaccataactgcagacacgttccgaaagctttttcgcgtgtatagtaattttttacgcgggaaattgaaactatataccggagaggcctgtcggacgggagacaga

SEQ ID NO: 15820 - DNA, 579 bp, Artificial Sequence
  derived and/or modified sequence
atgggcgtgcatgagtgtcccgcatggctctggctgcttctgtcccttctttctcttcctctgggactcccagtcctcggtgcacctccaaggctgatttgtgattcacgagtcctggaaagatacctgcttgaagcaaaggaagctgaaaacattaccactggatgcgctgagcactgtagcctgaacgaaaacataactgtgccagataccaaggtgaacttttacgcctggaagcgaatggaagtggggcagcaggccgtggaagtttggcaaggtctggcccttttgagcgaagcagtgcttagggggcaagcacttcttgtcaactcaagccagccgtgggaaccactccaactccacgtggataaggctgtcagtggactgagatcgctgaccactcttctgcgggcactcggagcccagaaagaagcaatatcgccccccgacgccgcatcggccgctccccttcggactatcacggcggatacctttcggaagctgtttcgggtgtactcaaacttcttgcgcggtaagttgaagctgtacactggagaggcgtgccgcacgggagataga

SEQ ID NO: 15821 - DNA, 579 bp, Artificial Sequence
  derived and/or modified sequence
atgggagtacacgaatgtcctgcctggctgtggctgctgttaagcctgctttcactcccgctggggctgccagttttaggtgccccgcctcggttgatatgcgatagccgcgttttggaacgctatcttcttgaagcgaaagaggccgagaatatcaccaccggctgcgctgaacactgttctctcaatgaaaatattaccgtgccggacactaaagtcaatttctacgcttggaagcgaatggaggtcggccagcaggcggtggaagtgtggcagggtctggccctgctgagcgaggcagttttgcgcggccaggctctgctggttaactcaagccaaccgtgggagccgctgcagctgcacgttgataaagccgtctccggcctccgctccctgactactctgctgcgcgctctcggcgctcagaaagaagcaatcagccctccggacgcggccagcgcagcaccactgagaaccatcaccgcggacacatttcgcaagctgtttcgcgtttacagcaatttcctgcgtggcaagctaaagctctacacgggtgaggcctgtcgcaccggggaccga

SEQ ID NO: 15822 - DNA, 579 bp, Artificial Sequence
  derived and/or modified sequence
atgggcgtccacgaatgtccagcatggctgtggctgttgctctccctcttgagcctgccgcttggcttgcctgtgttgggtgcgcctcctcggctgatctgcgactcccgggtcctcgaaagatacctgctcgaagccaaggaagctgaaaacatcaccaccggatgcgcagaacattgctccctgaatgaaaacattaccgtgccggacaccaaggtgaatttctatgcctggaagcggatggaggtgggccagcaggcggtcgaggtctggcagggtctggccctgttgtccgaggccgtcctgcgcgggcaggccctgctggtgaactcgtcgcagccgtgggagccactgcagctgcatgttgataaagcagtgtctgggctcaggtccctgaccaccctgttgcgcgcgcttggagcccaaaaggaggctatctcacccccagacgctgcgtccgccgcaccgcttaggaccatcactgccgataccttcaggaaattgtttcgggtgtactccaacttcctgcggggtaagctgaagctgtacaccggcgaggcgtgccgcactggcgatcgt

SEQ ID NO: 15823 - DNA, 579 bp, Artificial Sequence
  derived and/or modified sequence
atgggtgtgcacgagtgccctgcatggctctggctattgctgtctttactgtccctgcccctaggtctgcctgtgttgggggcccccccgaggctcatttgtgattcaagagtcctagagcggtacctcctggaggctaaggaggccgagaatattactacagggtgcgccgaacattgctccctgaacgaaaacattacggtgccagacacaaaagtgaacttctacgcatggaagcgaatggaagtgggccagcaggcggtggaggtctggcagggcttagcgttgctgtccgaggccgtactgcgcggacaggctctcctcgttaattctagccagccatgggaaccgctgcaactccacgtagacaaagccgtatcggggctgagaagtctgaccaccctgctgcgggcactgggagctcagaaagaagctatttcaccccctgatgcggccagcgcggcacccctgcggacgattaccgccgacactttccgcaaactgttccgagtttatagtaactttctccgaggaaagctgaagctgtataccggtgaagcctgcagaaccggtgatcgg

SEQ ID NO: 15824 - DNA, 579 bp, Artificial Sequence
  derived and/or modified sequence
atgggagtccacgaatgtccagcttggctgtggctcctgctctccctactctctcttccattagggctccccgtattaggggctccacccaggctgatatgtgattccagggttttggaaagatatctgctggaagctaaagaagctgaaaacataactactggatgtgccgagcattgctctctcaatgaaaatatcacagtaccagatacaaaggtaaacttttatgcatggaaacggatggaagtggggcagcaagctgtggaagtatggcaggggcttgcccttctctctgaagccgtccttcgggggcaggccctactcgttaactctagtcagccatgggaacccctacagctccacgtcgataaagcagtatccgggctccgtagtcttacaacattattaagagctcttggggcacaaaaggaagccatcagtccacccgatgctgcgagtgccgcacccctccgaactattactgcagatacattcagaaagctttttcgggtgtattccaatttcctgaggggaaaacttaagttgtatactggagaagcttgccggactggagatcgg

SEQ ID NO: 15825 - DNA, 579 bp, Artificial Sequence
  derived and/or modified sequence
atgggcgtccatgagtgccccgcatggctctggctcctgctttctctgctgagtctaccgctcggcctgcccgtcctgggcgcccctcctcgcttgatatgcgattcccgcgtgttggaaagatacctgcttgaagccaaggaggccgagaacattaccactggctgcgccgagcactgctccctcaacgagaacatcaccgtcccagacactaaggtgaatttctacgcctggaagcgcatggaggtggggcagcaagccgtcgaagtttggcagggtctggcattgctgagtgaggcggtcctgcggggacaggcccttctggtgaactcatcccagccctgggagccgctgcaacttcacgtggataaagcggtgtccggccttagaagcctgaccaccctactccgagcattgggagcccagaaggaggccatttccccgccggacgccgcttcagcggcccccctacgaacaataactgcggatacttttcgcaagctcttccgggtgtattccaactttctgagagggaagctaaaactttacaccggggaagcatgcagaactggagatagg

SEQ ID NO: 15826 - DNA, 579 bp, Artificial Sequence
  derived and/or modified sequence
atgggtgtgcacgaatgtcctgcatggctgtggttgttactgtcactgctgagcctccccctcggactccccgtgctgggggcgcctcccaggctgatctgcgactctagagttttagagaggtacctgctagaagctaaggaggctgagaacatcaccacaggttgtgcggaacactgcagccttaatgagaatataactgtccccgataccaaggttaacttttatgcctggaagcggatggaagtaggacagcaagccgtggaagtgtggcaaggcctggctctgctaagcgaggcagtgcttcgagggcaggccctcctggtcaactcttcccagccttgggaacctctacagttgcatgtggacaaagcagtgagcggcttgaggtctctgacaaccctgttgcgggccctgggggctcagaaggaagccatttcaccccccgatgcggcgagtgctgctccactgaggaccatcacagcagatacgttcaggaaactttttagggtgtacagcaacttccttcgtggaaagctgaaactgtatacgggcgaggcctgtagaaccggggatcgt

SEQ ID NO: 15827 - DNA, 579 bp, Artificial Sequence
  derived and/or modified sequence
atgggtgtgcatgaatgccctgcttggctgtggctgctgttgtctctgttatccctgccacttggcctgcccgtgttgggggctccccccaggttaatctgcgattcacgtgtgcttgagcggtatctgctggaggctaaagaggcggagaacattaccaccggatgcgccgagcattgtagtctgaatgaaaatatcactgtgcctgacactaaagtgaatttctacgcctggaagagaatggaggtgggacagcaggcagtagaggtatggcagggcctggccttattgtcagaagccgtgctgagaggacaagcactgctggtgaactctagccagccttgggagcccttgcagctgcacgttgacaaagcagtgagcggtctgaggtccttgaccactcttctccgagctctgggagcccaaaaggaggctattagtcctccagacgccgccagcgccgcaccactgcgaacaattactgcagacacatttcgtaagctctttcgggtctacagcaactttctccgtggtaagttgaagttatatacaggggaagcatgccgtaccggagatcgg

SEQ ID NO: 15828 - DNA, 579 bp, Artificial Sequence
  derived and/or modified sequence
atgggtgtacatgaatgtccggcgtggctatggctactattatcgctactatcgctaccgctaggtctaccggtattaggtgcgccgccgcgattaatatgtgattcgcgagttttagaacgatatttattagaagcgaaagaagcggaaaatataacgacgggttgtgcggaacattgttcgttaaatgaaaatataacggttccggatacgaaagttaatttttatgcgtggaaacgtatggaagttggtcaacaagcggtagaagtatggcaaggtttagcgctattatcggaagcggttctacgaggtcaagcgctattagttaattcgtcgcaaccgtgggaaccgctacaattacatgtagataaagcggtttcgggtttacgatcgttaacgacgctactacgagcgttaggtgcgcaaaaagaagcgatatcgccgccggatgcggcgtcggcggcgccgctacgtacgataacggcggatacgtttcgtaaattatttcgtgtttattcgaattttctacgaggtaaattaaaactatatacgggtgaagcgtgtcgtacgggtgatcga

SEQ ID NO: 15829 - DNA, 579 bp, Artificial Sequence
  derived and/or modified sequence
atgggtgtgcacgaatgccctgcatggctgtggctgctgctgtcactgctgtctcttccgctcggactgccggtcttgggtgctccaccaaggctgatttgcgattcgcgggtgctggaacggtacctgttggaagctaaggaggctgaaaacataaccaccggatgcgccgaacattgttcgcttaatgaaaacattaccgtgccagacaccaaagtcaacttttatgcctggaaaagaatggaggtggggcagcaagcagtggaggtgtggcagggcttggccctcctctctgaggcggtcctccgcggacaggccctcctggtcaattcgagccagccgtgggaaccgctccaacttcacgtggacaaggcggtaagcggactccgcagtttgacgaccttgctgcgggcactgggcgcacagaaagaggctatctccccgcctgacgccgcctcggccgcacctctccgaactatcactgctgacactttcagaaagctgttccgcgtgtattccaatttcttgcgcggcaagctgaagctgtacactggggaagcctgccggacgggagatcgg

SEQ ID NO: 15830 - DNA, 579 bp, Artificial Sequence
  derived and/or modified sequence
atgggagttcacgaatgtccagcgtggttatggctcctgctcagtctgttatccctgcctctcgggctaccagtgcttggcgcgcccccaagattgatttgcgattcacgggtgctcgaacgatatcttcttgaggcgaaggaggccgagaatatcactacgggctgtgcagaacactgtagccttaacgaaaacattacagttccagacactaaagtgaatttctacgcttggaagaggatggaagtgggccagcaggcagtggaggtgtggcagggactggcgctgctatccgaggctgtgcttcggggacaagccctattagtgaattcaagccagccatgggagcccctccagctgcatgtggacaaagccgtctctggtctcagatctctgaccacccttctaagagctctgggagcacaaaaagaggcgatctctccacccgatgctgcctctgcagcgcctctcagaaccattacagcggacacatttcggaaactatttagggtgtattctaactttctgagaggcaagctgaaactgtacacaggcgaggcttgtagaaccggggacagg

SEQ ID NO: 15831 - DNA, 579 bp, Artificial Sequence
  derived and/or modified sequence
atgggcgtgcatgaatgtccagcttggctgtggttgctcttgtcccttctatctttacctctgggtctcccggtgctgggagcgccccctcgactgatctgcgattcaagggtcctcgaacgttatttactggaagctaaggaagcggagaacatcactactgggtgtgctgaacactgcagtcttaacgaaaacatcacagtcccggacactaaagtgaatttctacgcctggaagcgcatggaagtggggcagcaggcagtggaggtctggcaggggcttgctctactcagtgaggccgtcctcagaggtcaggcactgttggtcaactctagtcagccttgggagcccttacagttgcacgttgataaagctgtgagcggcttgaggagtctgacgactctgctccgcgcactcggcgcccaaaaggaagcaatctcccctccggatgcagcttccgccgccccgctgaggaccattactgctgatacatttcggaaattattccgagtgtattccaactttctgcggggcaaacttaagttgtacactggggaagcctgccgcacaggggatcgg

SEQ ID NO: 15832 - DNA, 579 bp, Artificial Sequence
  derived and/or modified sequence
atgggagtccacgaatgcccggcgtggctctggttgttgctctcactgctcagccttccactgggactgcctgtgttgggagctccaccgcgcctgatttgtgattcacgcgtcctcgagaggtacctgttggaagccaaggaggcggagaatatcaccacgggatgtgcggaacattgctccctgaatgagaacatcaccgtcccggacaccaaggtgaacttttacgcctggaaaagaatggaagtgggacaacaggcggtggaagtgtggcaagggctcgccttgctgtccgaggcagtgctgaggggacaggcgctgctggtgaattccagccagccgtgggagcccctgcaactgcacgtggataaggccgtgagcggtctgcgatcactgactaccctgcttcgcgccctgggtgcccaaaaggaggccatctcgcccccagacgcggcatcagccgcccctctccgcaccatcaccgctgatactttccggaagctcttcagagtctactcgaatttcctgcgcggaaagctcaagctgtacactggtgaagcgtgccgcaccggtgaccgc

SEQ ID NO: 15833 - DNA, 579 bp, Artificial Sequence
  derived and/or modified sequence
atgggcgtgcatgagtgtcccgcatggctgtggcttttattgtccctcctgagcctcccacttggcctgcccgtgctgggtgcacctccgagactgatatgcgattctcgagtgctggagcgatacctactcgaagccaaggaggccgaaaacataacaacagggtgcgccgaacactgctcactgaacgagaatattacagtgccggataccaaggtgaacttctacgcatggaaaagaatggaagtgggacagcaagcagtcgaagtttggcagggtctcgctctgttatctgaggctgttctgcgagggcaggctcttctcgtcaattcatcccagccgtgggaacccctgcagctacacgttgacaaagcagtgtctggcctgcgctcacttactaccttgttgagggcccttggggctcaaaaagaagccatctcgccccctgatgctgcgtcagccgcgccgttaaggaccatcactgcagatacattccgcaaactgtttcgcgtgtactcaaactttctgagaggaaagctgaagctgtatacaggggaggcatgccggaccggagaccgg

SEQ ID NO: 15834 - DNA, 579 bp, Artificial Sequence
  derived and/or modified sequence
atgggcgttcacgagtgccctgcttggctttggctgctgctctcgctcctcagcctgccgctcggcttgcctgtgctgggagccccgccacgtctcatctgcgattctcgggttcttgagcggtatcttcttgaagccaaggaagccgaaaacatcacgactggatgcgcggaacactgcagcttgaacgagaatatcaccgtgcccgacaccaaggtgaacttttacgcgtggaagagaatggaagtcggccagcaggccgtggaggtctggcaggggctggccctgctgtcagaggcagtgctgcgcggacaagccctgctcgtcaattccagccaaccctgggagccgctgcaattgcatgtggataaagcggtttcgggactccgttcacttaccacccttctccgtgcactcggtgctcagaaagaagctatttccccaccagacgctgcttctgcggcgccgctgcgcactatcaccgcagacactttccggaaactcttccgggtgtactcgaacttcctgcgaggcaagttgaagttgtacacgggagaagcatgtcgcactggcgacagg

SEQ ID NO: 15835 - DNA, 579 bp, Artificial Sequence
  derived and/or modified sequence
atgggggttcatgaatgcccggcttggctttggctgctgttgtccctcctgtccctgccgctcggactgcctgtgctgggagcacccccgagactgatctgcgattcaagggtgctcgagcggtacctgctcgaggcaaaagaagccgagaacatcaccactggctgcgcggaacattgtagcctcaacgagaatatcacggtcccagacaccaaagtgaatttctacgcctggaagagaatggaggtgggacagcaggccgtggaggtgtggcagggactcgcgcttctgtccgaagccgtgctgcggggacaagcgctgctggtgaattcatcccagccttgggagccgctgcagctgcatgtggacaaggctgtgtcgggactgagaagcctgacgaccctcctgcgcgcgctgggagcacagaaggaagcgatctcgccaccagacgccgcctcagccgctccactcagaaccatcactgccgataccttccggaagttgttccgggtgtactctaacttcttgcgcggaaaactgaagctctacaccggcgaagcctgccgcactggtgatcgc

SEQ ID NO: 15836 - DNA, 579 bp, Artificial Sequence
  derived and/or modified sequence
atgggcgtgcacgaatgtccggcatggctctggctgcttctttctctcctgtctctgccgctgggactgcctgttctcggcgcaccacccagattaatttgtgacagtcgagtgctggaacgatatctgctggaagccaaggaggctgagaacattacaaccgggtgcgcagaacactgttcgttgaatgaaaacataacggtacctgacactaaggtcaacttttacgcctggaagcgaatggaagtcgggcagcaggccgtcgaggtgtggcaggggctggctctcttgtctgaggctgtcctgaggggacaggccctgctagtcaatagctcacagccttgggagcccctccagctgcacgtggataaagcagtgtccggtttgcgatcccttacgactctcctgagagccctgggggctcagaaggaggctatttctccaccagacgccgcatcagccgcaccactgagaacaattacagctgatactttcaggaaactgttcagagtctattcaaatttcctgaggggaaagctgaaactgtatacaggagaggcttgcagaacaggcgaccga

SEQ ID NO: 15837 - DNA, 579 bp, Artificial Sequence
  derived and/or modified sequence
atgggtgtgcatgaatgtcctgcctggctctggctgctgcttagtctgctgtcactgccactggggttgccagtgctcggcgcacctcctagactgatatgcgattctagggtactggaacgctacctgctagaagcaaaggaagccgagaatataaccaccgggtgcgctgaacactgctctctgaacgaaaatatcactgtgcccgacactaaagtgaatttctatgcttggaaacgaatggaggtaggccagcaggctgttgaagtgtggcaggggctggccctactgagcgaggcagttctgaggggccaggccttactggtgaacagcagccagccatgggaacccctgcagctgcatgtggataaggctgtgtccggcctgcgctctctgacaaccctgctcagggctctgggcgctcagaaggaggcaatcagcccccctgacgccgcctccgccgcccccctgcggacaattacagctgatacatttcggaagctttttcgggtgtacagcaactttctgaggggtaagctcaagctgtatactggggaggcctgtcgcactggtgaccga

SEQ ID NO: 15838 - DNA, 579 bp, Artificial Sequence
  derived and/or modified sequence
atgggtgtgcatgaatgtcctgcttggctctggttgcttctctctctcttgagcctcccgttgggactacctgttcttggggctccccctcgattgatttgcgatagtcgtgtgctggagaggtatcttttagaagccaaggaagccgaaaatattaccaccggatgcgccgaacattgcagtttaaacgaaaacataaccgttcccgatacaaaggtaaatttctatgcatggaaaaggatggaagtcggtcaacaggctgttgaagtttggcagggacttgccctcttaagtgaagcagtcttaaggggacaggcattacttgttaattcgtcacaaccttgggaaccactccaacttcatgtcgacaaggcagttagtggtctgcgatcattgacaacactacttagggccttgggcgcacaaaaggaggctatctcacctcccgatgcagcgtctgcggccccgctcagaactattaccgctgatacattccgaaagttgtttagagtttattccaatttcctccgtggaaaactcaagttgtatacaggagaggcttgtcgtaccggtgataga

SEQ ID NO: 15839 - DNA, 579 bp, Artificial Sequence
  derived and/or modified sequence
atgggcgtgcatgagtgtcctgcatggttgtggctgctgcttagccttctctcacttccacttggactgcctgtgttgggagcacctcctcgtcttatttgtgattcccgagtcctcgaaaggtacttgctcgaagcgaaggaagcagagaacatcactactggttgtgcagagcattgctcgctgaatgagaacattacggtcccggacactaaggttaacttttacgcatggaaaagaatggaagtgggtcaacaggcagtcgaagtgtggcagggattggcgcttctgtccgaggcagttctgagaggacaagcgcttttggtgaatagctcgcagccgtgggaaccactgcaacttcacgtggataaagctgtgtcagggctccgatctctgacgacccttctgcgggcgcttggtgcgcaaaaggaagctatatcgcccccggatgctgcatccgcagcaccactgagaaccatcaccgcagatactttccggaagctctttcgtgtgtacagcaacttccttcgcggtaaactgaagctctacaccggagaagcgtgcagaaccggggaccgg

SEQ ID NO: 15840 - DNA, 579 bp, Artificial Sequence
  derived and/or modified sequence
atgggcgttcacgaatgccccgcgtggctctggctcttgctgtctttactcagcctgccactgggcctcccagtcctgggagccccaccaaggctcatctgtgactcccgagtgcttgagaggtatctgctggaggctaaagaggccgaaaacatcactacgggatgcgctgaacattgctccctgaacgagaacataacggtgcccgacaccaaggtaaatttctatgcctggaagagaatggaggtaggccagcaagcagttgaggtgtggcaagggttagccctcctgtctgaggcagttttaagagggcaggctctgctggttaatagcagtcagccgtgggaaccgcttcagttacatgtggacaaggccgttagcggcctaaggtccctgaccaccctcctgcgggcactgggagcgcagaaagaggcgatcagcccacctgatgccgcctcagccgcacccctcaggaccataacagctgataccttccgaaagctttttcgcgtgtactccaacttccttcgaggaaagctcaagctgtatacaggggaagcctgcaggactggcgacaga

SEQ ID NO: 15841 - DNA, 579 bp, Artificial Sequence
  derived and/or modified sequence
atgggtgttcatgaatgccccgcatggctgtggctccttctcagcctgctgtcattacccctgggcctacctgtactgggcgccccccccaggttgatctgcgattctcgggtgcttgagaggtatcttctcgaagctaaagaggccgagaatataacaacgggctgcgcagaacactgtagcctgaacgaaaacatcacagtcccagatactaaagtcaacttctatgcctggaagagaatggaagtaggccaacaagcagttgaggtgtggcagggactggctctcctgtcagaggccgtcctccgggggcaagcgctgctagttaacagttctcaaccatgggagcccctgcagctgcacgtcgataaggcagtgagtggactgcgaagtctgaccaccttgttaagagccctgggtgctcagaaagaagccataagcccccccgacgctgcctctgcggctcctcttaggaccataacagcggacacatttcgcaaactattcagggtttacagtaattttttacgggggaaactgaagctttacactggcgaagcctgccggactggagataga

SEQ ID NO: 15842 - DNA, 579 bp, Artificial Sequence
  derived and/or modified sequence
atgggagtgcatgaatgtcccgcatggctttggctccttctctcgctgttgtcgcttccacttgggctgccggtgcttggtgcccctccgcggctgatctgtgattctcgagtgctggaaagatatctccttgaagccaaggaagccgaaaacattactaccgggtgtgccgagcattgctctctcaatgaaaacattaccgtgcctgacaccaaggtcaacttttatgcttggaagcgtatggaagtgggacagcaagcagtggaggtttggcaaggactcgccctcctttccgaggctgtgctccggggtcaggccctgctggtgaattccagccaaccttgggagcctcttcaactccacgtggataaagcggtgtccggtctgagatcgcttactacgctcctgcgcgcgttgggggcacaaaaagaggcgatttccccacctgacgcagcaagcgccgccccactgcgcactatcactgctgatacgtttcgcaagctgtttagagtttactcaaactttcttagaggtaaacttaagctctacaccggcgaagcgtgtcggactggtgaccgg

SEQ ID NO: 15843 - DNA, 579 bp, Artificial Sequence
  derived and/or modified sequence
atgggcgtgcacgagtgtccagcatggctctggctgctcctctccctccttagcctgcccctgggactgcccgtcctcggagccccgccccggcttatatgtgatagtagggttttagagagatatctgctcgaagccaaggaggccgagaatatcaccaccggctgcgccgagcactgttcccttaatgaaaacataactgtgcctgacacaaaagtgaatttctacgcctggaaaaggatggaggtgggccagcaggccgtggaggtttggcagggcttggcactgctctcggaggctgtccttcgagggcaggctctcctggtgaatagtagtcagccttgggagcccctgcagctgcacgtggataaggctgtaagtgggctgagaagtctcactacattactgagggctctaggcgcacagaaggaggctatctcacccccagatgctgcctctgcagccccgttgaggaccatcacagctgacacttttaggaagttgtttagagtgtacagtaatttcctgcgggggaagcttaaactgtacactggagaagcttgtcgcaccggcgacagg

SEQ ID NO: 15844 - DNA, 579 bp, Artificial Sequence
  derived and/or modified sequence
atgggcgttcacgagtgtcccgcctggctttggctcctgctttcccttctgtcattgccactcggcctcccagtactcggtgcaccaccccgtctgatctgcgacagcagggtgcttgaacgctacttattagaagccaaagaggctgaaaatataaccaccggatgtgctgaacattgttcattgaacgaaaacatcacagttcccgacacaaaagtgaatttctatgcctggaaaagaatggaggtcggacagcaagccgtggaagtttggcagggcctggccctgctgagcgaagcagtgctgcgaggccaggccctcttggtaaattcaagccaaccatgggaacccctccaactgcacgtcgataaagccgtgagcgggctgcggtctttgaccacccttcttagggcactaggagcccaaaaggaggcaatcagtccacctgatgctgccagcgccgcgcctctgagaacaattacagcggacacttttcggaaattattccgcgtgtatagcaacttcctcagagggaaattgaagctgtacaccggcgaagcttgtagaactggggacagg

SEQ ID NO: 15845 - DNA, 579 bp, Artificial Sequence
  derived and/or modified sequence
atgggcgtgcatgagtgtcctgcgtggctctggcttctgctttccctcctgtccctgccactggggctgcccgtcctcggagccccaccacgtcttatctgcgactcccgcgttcttgaacggtatcttctggaagcaaaggaagcagagaacataaccactggctgcgccgaacattgttcactcaacgaaaacatcactgtgcctgacacgaaggtcaacttttacgcgtggaagagaatggaagtgggtcaacaggcagtggaagtctggcaaggtcttgctcttctgagcgaagcagtgctgcggggtcaggccctgctcgtgaactcctctcagccgtgggagcccttgcagctgcacgtggacaaggctgtctccggactcagaagcctcactactctccttcgagcccttggagcccaaaaggaggcaatttcgcctcccgatgccgcatcggccgcgccactgaggacgattactgcagacaccttccgcaagctgtttcgcgtgtattctaatttcctccgcgggaaacttaaactgtacactggagaggcgtgtaggaccggggatagg

SEQ ID NO: 15846 - DNA, 579 bp, Artificial Sequence
  derived and/or modified sequence
atgggagtgcatgagtgccccgcgtggctgtggctcctgctctcactcctgtccctgccactgggtctcccagtgctcggtgccccaccacgtctcatttgcgattctcgggtactggagcgctatctgctggaagccaaagaagccgaaaacataaccaccggctgcgctgaacactgcagcctcaacgagaacattaccgttcccgacaccaaggtaaacttctacgcctggaagcgcatggaggtgggacagcaggctgtggaggtttggcagggcttggcccttttgagtgaggctgtcttaaggggccaggctcttctggttaattcatcacagccatgggagcccttacagcttcacgttgacaaggctgtgtccggtctgcgttccctgacaactcttctccgggcattaggcgctcaaaaggaggcgatctcgccccccgacgcggcctccgccgcccccctacgcacgataactgcagatacattccggaagctattcagagtgtatagcaactttctccgggggaagctgaaattgtatacaggagaggcttgccgcaccggcgaccga

SEQ ID NO: 15847 - DNA, 579 bp, Artificial Sequence
  derived and/or modified sequence
atgggcgtccatgagtgccccgcgtggttgtggctcctgctttcgctgctttcactgcctctcggcctgccagtgctcggagccccgcctcggttgatctgcgattcgagagtactggaacggtacctccttgaggcgaaggaagctgaaaacattactactggatgtgcagagcactgcagcctcaacgagaacatcaccgttcctgataccaaggtgaacttttacgcatggaagcgcatggaagtcggacagcaggctgtggaggtgtggcagggactggccctgctctcagaggcagtcctgcgcggacaggccctgctggtgaacagctcccagccctgggagccactgcagttgcacgtcgataaggccgtctcgggcctgagatcgctgacgactcttctcagagcgctgggagcccaaaaggaggccatctcgccgcctgacgctgcctccgctgctccactgcgaactatcacggccgacactttccggaaactgttccgcgtgtattctaacttcctgcggggcaaactcaaactctacaccggagaagcctgccgcaccggagatcga

SEQ ID NO: 15848 - DNA, 579 bp, Artificial Sequence
  derived and/or modified sequence
atgggagtgcatgagtgcccagcctggctctggctgcttctctcgctgctttccctgccccttggccttcctgtgttgggggcaccgcccagactgatctgcgactcacgtgtcttggagaggtacctgttggaagcaaaagaggcggagaatatcaccaccggttgcgccgagcactgcagccttaacgaaaacattacggtgccggacactaaggtcaacttctacgcgtggaagcggatggaagtgggccaacaggcggttgaagtatggcaggggctggctctgctttccgaagccgtgctcagaggacaagctctcttggtcaactcgtcgcagccttgggaaccgctgcagctgcacgtggataaggccgtgtcaggcttgcgatccctgaccaccctgctgcgggccctgggagcacaaaaagaagcaatctcaccgccagacgcagcttctgcggcgccgctgcgcaccatcaccgccgacacttttcgcaagttgttccgtgtctacagtaatttcctccgcggaaagctgaaattgtacacgggagaggcatgtcgcactggtgatcgg

SEQ ID NO: 15849 - DNA, 579 bp, Artificial Sequence
  derived and/or modified sequence
atgggcgtgcacgagtgtcccgcctggctttggttgcttctgtcgctccttagccttcctctcggcctgccggtgttgggtgcacctccacgtcttatctgcgattcacgggtgctcgaacgatacctgttggaagcaaaagaggccgagaacattaccactgggtgtgcagaacattgttcgctgaatgagaatatcaccgtgcctgacaccaaagtcaacttttacgcatggaagcgaatggaagtgggccagcaagctgtggaggtgtggcaaggtttggccctcctgtccgaggcagtgcttaggggacaggcactgcttgtgaactcctcgcaaccttgggaacctctgcagctccacgtcgataaggcagtctccggcctgcggtcgctcacgaccctgctgagagccctcggcgcccaaaaggaagcaattagccctccggatgccgcctcggctgccccgcttcggactatcaccgcagatacgttccggaagctgtttcgagtgtacagcaactttctcagaggtaaattgaagctgtacacgggagaagcctgcagaactggtgacaga

SEQ ID NO: 15850 - DNA, 579 bp, Artificial Sequence
  derived and/or modified sequence
atgggcgtccacgaatgtcctgcctggttgtggctcctcctgtctctacttagcctacctctcggcttacctgtcctgggcgcaccacctcgcctgatttgtgacagccgcgtgctcgagcggtatctactagaggcaaaggaggccgagaacattaccaccggatgcgccgagcactgttccctaaacgaaaacattacagtgccggataccaaggtgaacttctatgcctggaagaggatggaagtggggcaacaggccgtggaggtgtggcagggactcgctctcctgtcagaagcagtgctccgaggtcaggcactacttgttaacagctctcagccatgggagccactccagctgcatgtggacaaggctgtgtcgggcctccgctccctcacgacgttactgagggcgcttggcgcccagaaggaagctataagcccacctgacgcagcctctgcggcccctctcagaactatcactgccgacactttcaggaagctctttcgcgtgtattcaaattttttgcgaggtaagttaaaactatatacaggcgaagcctgccggaccggcgaccgg

SEQ ID NO: 15851 - DNA, 579 bp, Artificial Sequence
  derived and/or modified sequence
atgggcgtgcacgagtgccctgcatggctctggctgctcctttccctgctttccctgcctctgggcctccctgtgcttggagccccgccccgcctcatttgcgattccagagtgcttgaacgataccttcttgaggcaaaggaggcggaaaacatcaccaccgggtgtgcagaacactgttctctgaatgaaaacatcactgtgcccgatacgaaggtgaatttctacgcttggaagcgaatggaagtgggacaacaggcagtcgaagtgtggcaaggacttgccctgctctccgaagcggtgcttagaggccaggcactcctggtcaactcatcgcagccctgggaacctcttcagctgcatgtggataaggccgtgtcaggcctgcgctcgctgactaccctgctcagagcattgggcgcacagaaggaggcaatatcgccaccggacgcagcaagcgcagcccccttgagaacgatcactgccgacacctttagaaaactctttagagtgtatagcaacttcttgagggggaagctcaagctgtacacgggtgaagcctgccgcaccggagataga

SEQ ID NO: 15852 - DNA, 579 bp, Artificial Sequence
  derived and/or modified sequence
atgggtgttcatgaatgtcctgcatggctttggttgttgttaagtttattatctttacctttaggtttacctgtattaggtgctcctcctagattaatatgtgattcaagagttcttgaaagataccttttagaagcaaaagaggctgaaaatattacaactggatgcgctgaacattgttcattaaatgaaaatattacagttccagatactaaagtaaatttttatgcttggaaaagaatggaagttgggcaacaagcagttgaagtttggcaaggacttgcattactttcagaagctgttttaagaggacaagctttacttgttaattcttctcaaccatgggaacctctacagttgcatgtagataaagctgtttctggacttcgaagtcttacaactcttcttagagctttaggagcacaaaaagaagctatttcaccaccagatgccgcttcagcagctccattaagaacaattacggctgatacatttagaaagttatttagagtttatagtaattttcttagaggtaaattaaaattatatactggggaagcatgtcgaacaggtgacaga

SEQ ID NO: 15853 - DNA, 579 bp, Artificial Sequence
  derived and/or modified sequence
atgggcgtgcacgagtgtcctgcatggttgtggctactgttgagcctgctgtccctccctctgggccttcctgtgctgggcgccccccctcgattaatctgtgattctagggtactcgagaggtaccttttagaagctaaggaagctgagaacattaccacagggtgcgctgagcactgcagcttaaatgagaacattacagtccccgataccaaggtgaacttctatgcctggaagagaatggaggtgggccagcaggccgttgaagtctggcagggattggcgctgctctctgaagctgtgctgcgcgggcaggctcttctagtaaacagcagtcagccttgggaacctctccaattacatgtcgacaaggcagtctcagggttgaggagtctgactacattgctcagggccctcggggcacaaaaagaggctatttcgccgcccgatgctgcctccgccgcacctctgcggacgatcactgcggatacattccgcaaactgtttcgcgtctatagtaacttcttgcggggcaaattaaaactgtataccggagaggcctgccggaccggcgatcgt

SEQ ID NO: 15854 - DNA, 579 bp, Artificial Sequence
  derived and/or modified sequence
atgggagtgcatgaatgcccagcgtggctgtggctcctcttgagcctcctgtcgctgccgctcggcctgcctgtgctgggcgcaccgccacgccttatctgcgactcccgggtcctggaacgctacctgctggaggccaaggaggcagaaaacattactaccggatgcgccgaacactgcagcctgaatgaaaacatcactgtgccggacaccaaggtcaacttttacgcttggaaaaggatggaagtcggtcagcaagcagtggaggtctggcagggactcgccctgctgtccgaagcagttcttcggggtcaagcactgctcgtgaacagctcccagccgtgggagccgcttcaactgcatgtcgacaaggctgtctccggcctgagatccctcactaccctgctgcgcgctttgggagcacagaaggaggcaatctcacctccggatgccgcgagcgccgcgccgctgaggactattacggcggacaccttccggaagctgtttcgggtgtacagcaactttctgcgcggaaaactgaagctgtacactggagaagcatgccggactggagatcgc

SEQ ID NO: 15855 - DNA, 579 bp, Artificial Sequence
  derived and/or modified sequence
atgggggtgcatgagtgtcctgcctggctgtggctcctgttgagtttgctcagtctgcctttgggtctcccagtcctcggggcccctcctaggctcatctgcgactccagagtcctggaacggtacctgctggaggccaaggaagcggaaaacattacaaccggatgtgcagagcactgctctctcaatgaaaacatcactgtgcccgacacaaaagtgaatttttacgcgtggaagagaatggaagtgggccagcaagccgtggaggtctggcaggggttggcgctgttgtcagaagctgtcctgagaggtcaggcattgctagtgaactcttctcagccctgggaacctttgcagctgcacgtggacaaggccgtctctgggctgagatccctgaccacactgttgagagcattgggggcccagaaagaggcgatctctccacccgacgccgcctctgccgcgccattaaggaccatcaccgccgatacttttaggaagctgtttcgcgtctactcaaattttctgagaggaaagttgaagctatacacgggggaagcctgccgcacaggcgacaga

SEQ ID NO: 15856 - DNA, 579 bp, Artificial Sequence
  derived and/or modified sequence
atgggggtgcacgagtgtcccgcttggttgtggcttctgctctcccttttgtctctgccgctgggcctgccggttcttggtgcccccccccggctgatatgcgactctagagtcctagaacgctatctcctggaggctaaggaggcagagaacattacgactggctgcgctgaacattgtagtctgaacgaaaatatcaccgttccagatacgaaggtgaacttctacgcgtggaagaggatggaggtggggcaacaagccgttgaagtgtggcaagggctggctttgctctccgaagccgtccttaggggacaagcactgttggtcaactcatctcagccatgggagcccctccagcttcatgtcgataaggccgtgagtggcttgaggtcactcacaacgttgttgagggccctgggtgcgcagaaggaggcaatcagtccacctgatgccgcctctgcagccccactgcgaaccattaccgcagatacatttaggaagctcttcagggtctactctaactttttgagagggaagctaaagttatataccggtgaagcctgcagaaccggcgatagg

SEQ ID NO: 15857 - DNA, 579 bp, Artificial Sequence
  derived and/or modified sequence
atgggcgtgcacgaatgccccgcttggctttggctcctgctatctctgttgtcgctgcccctaggactgcctgtgctcggagcaccacccagacttatctgcgattctcgagtgcttgaaaggtatctgctcgaggctaaggaagctgagaatatcacaaccggctgcgccgagcactgcagcctcaacgagaacatcactgtgcctgacactaaagtgaacttctacgcatggaaacgcatggaggtggggcaacaggctgtcgaagtctggcagggtctggcgctgctgtccgaagccgtgctcagaggacaagctctgctcgttaacagctcccaaccgtgggagcctttgcaattgcacgtcgacaaagctgtctccggattacgctctctcactactctcctgcgggctctcggcgcccagaaagaagctatatcccctccagatgctgcttcagcagcccccctcaggaccattacagccgacacatttagaaaactttttagggtgtacagcaacttcctgcggggaaaacttaagctctatacaggagaagcttgtaggacaggcgaccgg

SEQ ID NO: 15858 - DNA, 579 bp, Artificial Sequence
  derived and/or modified sequence
atgggcgtgcacgagtgtcctgcatggctgtggttgttgttgagcctgctgtcattgccactgggcctccctgtgctgggtgctccacctcgtttgatttgtgacagccgcgtgctggagcgctatctcttggaagccaaggaagccgagaacatcacaacaggatgtgccgaacactgctcactcaacgagaatattaccgtaccagacaccaaggtgaatttttacgcctggaagaggatggaagtgggtcagcaggccgtcgaagtttggcagggtctggctttgctcagcgaggcagtactgagaggtcaggccctcctggtaaatagctcccaaccctgggagcctctccagttgcacgtcgacaaggctgtgtctggtctcagatccttgacaacccttcttagggctctgggcgctcagaaagaagctatcagcccccccgacgctgcttccgctgctccactccgcactatcaccgctgacacttttaggaaactctttcgtgtttactctaacttccttcgcggtaagcttaagctgtatacaggtgaggcctgcagaaccggtgacagg

SEQ ID NO: 15859 - DNA, 579 bp, Artificial Sequence
  derived and/or modified sequence
atgggggtccacgagtgcccggcgtggttatggctgttgctgtcactcctgagccttcctctcggtctgcctgtcctcggcgctccccctcgcctgatttgtgatagcagggtgctggaaagatatctcttggaagctaaggaagccgagaacatcactactggttgcgcagagcactgtagcctgaatgagaacatcacggttcccgataccaaggtaaatttttatgcatggaagcgaatggaagtcggccaacaagccgtcgaggtgtggcagggtctggcattattatcggaggccgtgttgagaggtcaggcactgctggttaatagcagccaaccatgggagcctctgcaactgcacgttgacaaagctgtgtctggcctgcgttccctgaccactctgctccgggcactcggcgcacaaaaggaagcaatcagccctcctgatgctgcctctgccgcccccctgcgtactataaccgccgacacattccgcaagctttttcgggtttacagtaacttcctacgcgggaaactgaagctctatacgggcgaagcttgccggacaggcgataga

SEQ ID NO: 15860 - DNA, 579 bp, Artificial Sequence
  derived and/or modified sequence
atgggagtccacgagtgcccagcctggctgtggctgctgctgtccctcctgtccttgccgttgggactgccggtcctgggcgcaccgcctagactcatctgcgattcacgcgtgctggaacggtaccttttggaagcgaaggaagccgaaaacatcaccactggatgcgccgaacattgcagcctgaatgaaaacattactgtgcctgacactaaggtgaacttttacgcctggaagcggatggaggtgggacaacaggccgttgaggtctggcaggggctggctctcctgagcgaggcggtccttcgcggccaggccctgctggtaaacagcagccagccgtgggagccgcttcagctccatgtggacaaggccgtctcaggattgcgatcactgacgaccctgctccgggctctgggagcccaaaaggaagccatttctccaccggatgccgcctcggcagcgcctctccgcactatcactgccgacacgtttaggaaactttttcgggtgtactcgaatttcctgcggggaaagctgaaactttacaccggcgaagcgtgtagaaccggcgatagg

SEQ ID NO: 15861 - DNA, 579 bp, Artificial Sequence
  derived and/or modified sequence
atgggtgtgcatgaatgccccgcctggctgtggctgttgctgtcccttttgtccctgccacttggactccccgtgcttggggccccacctcgtttgatttgtgactctcgtgtgcttgaacgttacctgctcgaagcaaaggaggcagaaaacattaccaccggatgtgctgaacactgctcgcttaatgaaaacattacggtccccgatactaaggtgaatttctatgcatggaagagaatggaagtgggtcaacaggccgtggaagtttggcaaggcctggcccttctgtcggaggccgtcctccggggacaagcacttcttgtgaactcgagccagccgtgggagccacttcaactgcacgtggataaagcagtgtccgggttgagatcccttaccaccctccttagggcactgggggcacaaaaagaagcaatctccccacctgatgcagctagcgcggcaccacttcgaactattaccgcagatacgtttagaaaactttttcgcgtgtactccaacttccttcggggaaaacttaaactttacactggtgaagcatgtcggactggcgacaga

SEQ ID NO: 15862 - DNA, 579 bp, Artificial Sequence
  derived and/or modified sequence
atgggagtccatgaatgtcccgcttggctctggcttctcctttcgctgctttcattgccgctcggactgccggtgctgggcgcaccgcctcgactgatttgcgactcgcgggtgcttgaaagatacctgctggaagcaaaggaggcagaaaacatcacgaccgggtgcgctgagcattgtagccttaacgaaaacatcactgtgccagatactaaggtgaatttctacgcatggaagaggatggaggtcggtcagcaggcagtggaagtctggcaaggactcgcacttctgtccgaagcagtcttgcgtggccaagccctgcttgtgaatagctcgcaaccttgggaacccctgcaacttcacgtcgataaagctgtgtcaggtctgaggtccctcactactcttctcagagctttgggcgcacagaaagaggcgatttcgccacctgacgccgcatcggccgccccccttcgcaccatcaccgccgatacgttccgtaaacttttccgggtgtacagcaacttcctgcggggtaaacttaagctgtacactggagaggcatgccggaccggagatagg

SEQ ID NO: 15863 - DNA, 579 bp, Artificial Sequence
  derived and/or modified sequence
atgggtgtccacgaatgtcctgcgtggctttggcttttgctttcgctgctgagcctgccactcggccttcccgtgttgggagctccaccaaggctgatatgcgattcacgcgtccttgaaaggtatcttcttgaggcaaaagaagccgaaaacatcactaccgggtgtgcagaacactgtagcttgaatgaaaacattactgtgccggacaccaaggtgaatttctatgcgtggaagcgaatggaggtcggtcagcaagcagtggaggtgtggcaaggactggcactgcttagcgaggcagtgctgagaggacaggcactgttggtcaactcctcgcagccttgggaaccacttcaactccacgtagacaaagctgtctcaggtttgagatcgctgacgaccctgctgagagcacttggggcacaaaaggaggcgatttcaccccccgacgcagcatcggcagcgcctctgcggaccattaccgccgatacttttcgcaagttgtttagagtgtactccaactttctgcgaggaaagctgaaattgtacactggagaggcatgccgtacgggcgatagg

SEQ ID NO: 15864 - DNA, 579 bp, Artificial Sequence
  derived and/or modified sequence
atgggggtgcatgagtgcccagcttggctttggctgttgctctcgctgctgtccctgcctctgggccttcccgtgcttggcgcccctccaaggcttatttgcgattccagagtgttggaacgataccttctggaagcgaaggaggcagagaacattactacggggtgcgcagagcattgttcgctgaacgaaaacattaccgtgccagataccaaggtcaacttctacgcatggaagagaatggaagtgggacaacaagccgtcgaagtgtggcagggcctggctttgctcagcgaagcggtcttgcgcggccaagcactgctcgtgaattcttcccagccctgggaaccactgcaactgcatgtcgacaaggccgtgtcaggcttgcgaagccttaccactcttcttcgcgcccttggagcccaaaaagaggccatttccccgcctgatgcagcctccgccgcacctctccgcactatcaccgcagacacctttaggaagctgtttcgcgtgtacagcaattttctccgcggtaagctcaagctctatacgggcgaggcatgcagaaccggagatcgg

SEQ ID NO: 15865 - DNA, 579 bp, Artificial Sequence
  derived and/or modified sequence
atgggagtccacgagtgtcccgcttggctgtggctgttgctttccctcctctcccttcctcttggtctgccggtgctcggtgcgccaccgagactgatttgtgacagcagagtgttggaaaggtacctgttggaagctaaggaggcagagaacatcaccaccggttgtgccgaacattgctccctgaacgaaaacatcactgtgccagataccaaggtcaatttctacgcctggaagaggatggaagtcggccagcaagctgtggaagtgtggcagggcctggcgctcctgagcgaagccgtgctgcggggacaagccctcctcgttaactcaagccagccctgggaaccgctgcagctgcatgtggataaggcagtgtcgggactccgctcgctgaccactctcctgagggcacttggagcgcagaaagaggccatctcgccacccgacgccgcctctgcagccccactccggaccattaccgcggacactttcaggaaactcttccgggtgtacagcaactttctgaggggtaagttgaagctctacactggcgaggcctgtcgaactggggaccgc

SEQ ID NO: 15866 - DNA, 579 bp, Artificial Sequence
  derived and/or modified sequence
atgggagtgcatgagtgtccagcatggttgtggctgcttttgtctcttctgtcactcccgcttggcctgcccgtgctgggggcacctcctagactgatttgtgattcacgggtcctggaacgataccttctggaagcaaaggaggcagaaaacattacgacgggttgcgcggaacattgttcgctgaacgagaacatcactgtgccagacaccaaggtgaacttctacgcatggaagcgtatggaagtgggacagcaagcagtcgaagtgtggcagggtcttgcattgctttccgaggcagtccttagagggcaagccctgctggtcaactcgtcgcaaccatgggaaccccttcagctgcatgttgacaaggcagtttccggactgcgcagccttaccactcttcttagagcactcggtgcacagaaggaagcaattagccctcccgacgccgcatcagcagcacccctccggaccatcaccgcggataccttcaggaagctcttcagagtgtattcgaactttttgagagggaaactcaagctgtacactggggaagcctgtcggacgggagatcga

SEQ ID NO: 15867 - DNA, 579 bp, Artificial Sequence
  derived and/or modified sequence
atgggagttcatgaatgtccagcttggctatggctcttgctctctttgttgtcattaccacttggcttaccagttctgggagcacctccaagacttatttgcgactctcgtgtgttggaacgttatcttcttgaggctaaagaggcggaaaatataacaactggatgtgcagaacattgttcgcttaacgaaaacattacagtgccagatacaaaggttaatttttatgcttggaaacggatggaagttggacaacaagctgtggaggtttggcaaggccttgcgctcctttcagaagcagtattaagaggccaggcactacttgttaatagttctcagccatgggagccacttcaactccatgtggataaagccgtcagtggattacgttcgcttactacacttcttcgcgctctcggagcccagaaagaggccatttcacctcctgatgcagcctcagccgctccgttgagaacaattacagcagataccttccggaagttattccgtgtctattcaaattttttgcgtggaaaactgaagctctatacaggagaagcttgtcgcactggagaccgt

SEQ ID NO: 15868 - DNA, 579 bp, Artificial Sequence
  derived and/or modified sequence
atgggcgtgcatgaatgtcctgcctggctatggcttctcctcagcctgctgagtctccccctgggcttaccagtgttgggcgccccccctcgcctgatatgtgatagtcgggtcctagaacgataccttctcgaggccaaggaagcggaaaacatcaccacagggtgtgcagagcattgctctttgaacgaaaatataaccgtgcctgatacaaaggttaatttctatgcatggaagcggatggaggtcggacagcaggccgtagaggtgtggcaggggctagccttgcttagtgaggcagtgctgcgcggacaggctctgctggtgaacagctcgcagccatgggagcccttgcagctgcatgtggacaaggccgtatccggcctgcgttccttgaccacccttctcagagccctgggcgctcagaaggaggcaatctctcccccagatgccgcctccgccgctcctttgcggactatcacagcagatacgtttcggaagcttttcagagtgtactcaaactttctgaggggaaagcttaagctctacacaggggaggcgtgtcgcacaggggatcga

SEQ ID NO: 15869 - DNA, 579 bp, Artificial Sequence
  derived and/or modified sequence
atgggggttcatgaatgtcccgcgtggctgtggttgctcctgagcctcctctctctgccactagggttgcccgttctgggggctcctccaaggttgatatgcgactcccgggtgcttgagcggtacttgctagaggctaaggaggctgaaaatattacgaccggctgcgcagagcattgtagcctcaatgaaaacataacagtaccagatactaaggtgaatttttatgcatggaagcgtatggaggttggccaacaggcggtcgaagtctggcaggggcttgcacttttatccgaggcggtgctcaggggtcaggctctgctcgtgaattcaagccagccgtgggagcctctgcagttgcatgtggacaaggccgtgtccggacttcgctctttgacaaccctgctccgggccctaggagctcagaaggaggctatttctcctcctgatgcagctagcgccgctcctctcaggacaattaccgcagatacattcagaaagttgttcagagtgtattcaaacttccttcgtgggaagctgaaactgtatacaggagaggcatgtagaacgggtgataga

SEQ ID NO: 15870 - DNA, 579 bp, Artificial Sequence
  derived and/or modified sequence
atgggtgtgcatgagtgcccggcttggctctggttgctgctgagtctgctgagtctcccactgggtctgcccgttcttggtgctccgccacgcctcatttgcgactcccgcgtcttggaacgttacctcctggaggccaaggaggccgaaaacatcaccaccggctgtgctgagcattgttctctcaatgagaacattacagtcccggataccaaggtcaacttctacgcgtggaagcgcatggaggtcggccagcaggccgtcgaggtctggcagggtctggccctgctgtctgaggcggtcctccgtggccaagccctcttggttaactcctcccaaccgtgggagcctttgcagctgcacgtagataaggcggtcagtggcctgcggtcgctgaccaccctgttgcgtgctctgggcgctcagaaagaggccattagcccgcccgatgctgcctccgccgccccactccgtactatcactgccgacacgtttcgcaagctcttcagggtctatagcaacttcctgcgtggcaaacttaagttgtacacaggtgaggcgtgtcgcaccggagaccga

SEQ ID NO: 15871 - DNA, 579 bp, Artificial Sequence
  derived and/or modified sequence
atgggtgtgcatgagtgtccggcatggctctggctcctcctctcactgctgagcttgccactgggactgcccgtgctgggggcgccgcctcgcttgatctgcgacagcagagtgctcgagagataccttcttgaggcgaaagaagccgagaacatcactaccggttgcgccgaacactgctcccttaacgagaacataaccgtgccggatactaaggttaacttctacgcatggaagcgcatggaggtcggacaacaggccgtggaggtgtggcagggactggcgctgttgtcggaagccgtgctgagaggacaagcactgctggtgaattcatcgcagccctgggaaccactccagcttcacgtggataaggcggtcagcggcctgagatcgctgacgactctgctgcgcgctttgggagcccaaaaagaagctatctcgccgcccgacgccgcctctgcggcccccctcagaaccatcactgcagataccttccggaagctgtttcgggtgtactcgaacttcctgagaggaaagctgaagctgtacacgggcgaggcgtgcaggacgggcgatcgg

SEQ ID NO: 15872 - DNA, 579 bp, Artificial Sequence
  derived and/or modified sequence
atgggtgtccatgagtgtcccgcttggctctggcttttactgtctcttctctctttacccctggggctgccagtgcttggtgcaccgccaaggctaatatgtgactctcgggtgctggaaaggtacctgttagaagctaaagaagccgagaacatcacaactggatgtgctgaacattgctccttgaacgagaacatcacagttccagatacaaaagtgaacttctatgcttggaagaggatggaggttggacagcaggccgtcgaggtttggcaggggctcgcactgctcagtgaggcggtgctacgcggtcaggccctgttagtcaactcctcccagccctgggagccactgcaattgcacgtggacaaggcagtgagcggattaaggagccttaccacgctactgcgcgctctgggggctcagaaagaggcgatctctcctcctgacgctgcaagcgctgcccccctgagaaccatcacagcggacacattcaggaagttgttccgcgtgtatagtaattttcttcgggggaagctcaaactgtacaccggcgaggcctgtaggactggagaccgg

SEQ ID NO: 15873 - DNA, 579 bp, Artificial Sequence
  derived and/or modified sequence
atgggtgtccacgagtgtccggcctggctgtggctgctcttgtcgctcctctcactgccactgggcctgccggtcctcggagccccacctagactgatttgtgactcccgggttctggaaaggtaccttctcgaagcgaaggaggccgagaacattactaccggatgcgccgagcactgctccctgaacgagaatatcaccgtcccagataccaaggtgaacttttacgcctggaagagaatggaagttggacagcaggcggtggaggtgtggcagggactggcattgctctcggaggccgtgctgcgggggcaggcgttgctggtcaactcatcacagccgtgggagccactgcagcttcatgttgacaaagcagtgtccggacttcgatcgctgactactttgctgcgggctctgggcgcgcagaaagaagcaatctccccgcccgacgcagcgtccgctgccccgctccgcactatcactgcggacacttttagaaagttgttcagagtgtactcgaacttcctgcgaggtaaacttaagctgtacaccggagaagcgtgccggactggcgatcgc

SEQ ID NO: 15874 - DNA, 579 bp, Artificial Sequence
  derived and/or modified sequence
atgggagtgcatgagtgtccagcctggctgtggctgctgcttagtcttctgagcctgccgctcggcctgccggtgttgggggccccccctcgactcatatgtgattctagagttctggagaggtacctcctggaggccaaagaggcggaaaatatcactacaggttgtgctgagcattgctccctgaacgagaacataacagtgcctgacacaaaggtaaacttttacgcgtggaaaaggatggaggtggggcagcaggctgtggaggtgtggcagggattggcgctgcttagtgaggcggttctccgcggacaggccctccttgtgaatagctcccaaccatgggaaccacttcagcttcacgtggacaaggccgtatctggactgcgctccctcaccacgctgcttcgggcactgggggcccagaaggaggccatcagccctccagacgcagcatctgccgccccgctgcgaaccattaccgctgatacttttcgaaaactttttagagtctattccaacttcttgaggggtaagctgaaactttacactggggaagcctgtcgaaccggggaccgc

SEQ ID NO: 15875 - DNA, 579 bp, Artificial Sequence
  derived and/or modified sequence
atgggagtgcacgaatgcccggcctggctctggcttctgctgtcccttttgtccctgccgctgggattgcccgtgctgggagctccgcctcgcctgatctgcgactcacgcgtgcttgagcgctacctgctggaggccaaagaggcggagaacatcaccactggatgcgcggagcactgtagcctgaatgaaaatatcactgtcccggacactaaggtcaatttctacgcatggaagaggatggaagtgggtcaacaagcagtggaggtctggcaaggactcgccctcttgtcagaagccgtgctgcgggggcaggcccttctcgtcaattcgtcccagccgtgggagccactgcaactgcacgtggacaaggcggtcagtggcctgcgctcgctgaccaccctcctgagggcactcggtgcgcagaaggaggcaatttcaccccctgacgccgcctcggccgctccgctgcggactatcactgctgacactttccggaagctgttccgcgtgtacagcaatttcctgagaggaaagttgaaactgtacactggcgaggcctgtagaaccggcgaccgg

SEQ ID NO: 15876 - DNA, 579 bp, Artificial Sequence
  derived and/or modified sequence
atgggggtacatgaatgccccgcctggctgtggctacttctttcacttctgagtctcccactggggctaccagttctgggggcacccccacgcctcatatgtgactccagggttctggaacgatatcttctagaggccaaagaggccgagaacataacaactggatgtgcagaacattgttcacttaacgaaaatatcacagtgccagatacaaaggtgaacttctatgcctggaagaggatggaagttgggcagcaggctgttgaggtttggcagggactggccttactgtctgaagctgttctgagggggcaggccttacttgttaattcatcacagccttgggagccactgcagctccatgtagataaagcagtgagtggattacggagtctgactacactccttcgcgctttaggggcccagaaagaagccatctccccccctgatgccgcctctgccgcgcccctccggacaataacagcagatactttcaggaaactgttccgcgtttattcaaacttcctgagaggaaaactgaaactttatacaggggaggcctgccggacaggggatagg

SEQ ID NO: 15877 - DNA, 579 bp, Artificial Sequence
  derived and/or modified sequence
atgggagtccatgaatgtccagcctggctctggctcttgctctcccttctctcactgccacttggactgccggtgctcggtgcaccgccccggcttatctgcgattcgcgtgtcctggagagatacctgctcgaagccaaggaagctgagaacataaccaccggttgcgcagagcactgctcccttaacgaaaacatcaccgtccccgatactaaagtgaacttctatgcatggaaacgaatggaagtgggacaacaagcagtcgaggtgtggcagggacttgcacttcttagcgaagcagtgctcagaggtcaggcactgctggtgaatagctcacagccttgggagccactccaactgcatgtggacaaggcggtgtccgggctgaggtccctcacgactcttcttcgcgcccttggagctcagaaagaagcgatctcgcctcccgacgcagcctcagccgcaccgctcagaaccataacggcagacacgtttaggaagctgtttagagtgtactctaatttcctccgaggtaaacttaagctgtacactggagaagcatgtaggaccggagatagg

SEQ ID NO: 15878 - DNA, 579 bp, Artificial Sequence
  derived and/or modified sequence
atgggcgtccatgagtgcccagcctggctgtggctgcttctttcgcttctttccctgcccttgggactgcccgttctgggagcaccaccccggcttatatgtgattcgagagtgctcgagcgttacctgctggaggcaaaggaagctgaaaacattactactgggtgcgcagaacactgtagcctcaacgaaaacatcaccgtcccagatactaaagtgaacttctacgcgtggaagcgaatggaagtgggacagcaggcagtggaagtgtggcaagggctcgcccttctttcagaagcagtgctcagaggtcaagcccttcttgtcaactcttcgcagccatgggagcccctgcagctgcacgtggataaggcagtgtctggtctgagatccctgactactctgctgagggccctgggagcacaaaaggaagcaatttccccgcctgatgctgcatctgctgcaccccttcgtacgattaccgcagatacctttagaaagctcttccgcgtctattcgaattttctccggggcaaactcaaactgtacaccggagaggcctgtcgcactggggaccga

SEQ ID NO: 15879 - DNA, 579 bp, Artificial Sequence
  derived and/or modified sequence
atgggcgtgcacgaatgccccgcttggttgtggctcctgttatccctgctgagcttaccactggggctccccgtcctgggcgcccctccaagactgatctgcgattcaagggtacttgagcgatacctgctcgaggccaaggaagccgagaacattactaccggctgcgctgaacactgttccctgaacgagaatattacggtgcccgatacgaaggtgaacttctatgcctggaagcgtatggaggtcgggcagcaagcagtggaggtttggcagggccttgcattactttctgaggcggtcctgcgaggacaggccctccttgtcaacagctctcagccatgggaaccccttcagctgcacgtggacaaagctgtgtctggccttcggtctctcactacattgttacgggcactgggagctcagaaagaggcaattagtccaccagatgccgcctccgccgcaccactgcgcaccatcaccgccgatactttcagaaaactgtttcgcgtatatagcaacttcctacgaggcaagttgaagctttatactggtgaagcttgcaggacgggagatcga

SEQ ID NO: 15880 - DNA, 618 bp, Artificial Sequence
  derived and/or modified sequence
atgtgtgagcctgctccccctaagcccacacaatctgcttggcatagcttcccagagtgcccagccctgctgctcttgctgtctctcttgcttcttcccctggggctcccagtgctgggagccccaccacggcttatatgtgactccagggtcctggaaaggtatattctcgaggcaagagaagctgaaaacgtgaccatgggctgtgcccaaggctgcagcttctccgaaaacatcaccgtgcccgatacaaaggtgaatttctacacctggaaaaggatggatgttggacagcaggcgctggaggtatggcaggggttagcactccttagcgaagctatcctcagggggcaagctctcctcgcaaatgccagccagccaagcgaaacaccacaactccatgtggacaaggccgtgtcaagcctgagatcgttgacgtctttgttgagagctctgggagcacagaaagaagccatgagcctgccggaagaggcctctccagccccactccggacttttacggtggataccctgtgtaaactttttcggatctattcaaactttctgcgtggaaagcttactctgtacacaggcgaagcgtgcaggcgcggagatagg

SEQ ID NO: 15881 - DNA, 618 bp, Artificial Sequence
  derived and/or modified sequence
atgtgtgagcctgcgccacccaagcctacgcaaagcgcatggcactccttccccgagtgtccggcacttcttctgctgctctctctgctcctccttccactgggccttcctgtcctcggtgcccctccaagattgatctgtgacagccgtgtcttggagcggtacatcctggaagccagagaagcagaaaacgtgactatgggatgcgcacaggggtgcagtttttctgagaacattaccgtgcctgacaccaaagtgaacttttacacctggaaacgtatggatgtggggcagcaagccttggaagtttggcaaggacttgcacttctttcagaggcaattctgcgcggtcaggctcttctggcaaacgcctcgcaaccatccgagactccccagcttcatgtagacaaggcggtgtcgtcgctccggtcgcttacgtcccttcttcgcgcactcggtgcacaaaaggaagccatgagcttgcctgaagaagcatctcccgcgccactgcgaacttttactgtggataccctctgtaagctgttcagaatttactccaacttcctgcgtggaaagctgactctctacaccggagaagcgtgtcggcgtggcgataga

SEQ ID NO: 15882 - DNA, 618 bp, Artificial Sequence
  derived and/or modified sequence
atgtgtgaaccagcccccccgaagccaacacagagtgcttggcactcctttccagaatgccccgctctgttgctgttgctctcccttctgttgctgcccctgggcctgcccgtgttgggcgccccccctcgcttgatctgtgattctcgcgtattggaacggtatattctggaagcgcgagaagctgagaacgttacgatgggatgcgcccaaggctgtagtttttctgagaacattaccgtccccgacactaaagtgaatttctacacctggaagcgaatggacgtaggacagcaggcgttggaggtgtggcagggacttgcactcctgtctgaagccatcctgcgggggcaggccctcctggctaacgcctctcagccctccgagacaccccagctccacgtggacaaggctgtctctagcctgaggtcactgacttctctgctcagggcactcggggcccagaaggaggctatgagcctccccgaagaagcaagtccggccccattgcggactttcaccgttgatactctttgcaagctctttcgcatttattctaactttctgcgggggaaactgacattgtataccggggaggcctgcaggaggggagataga

SEQ ID NO: 15883 - DNA, 618 bp, Artificial Sequence
  derived and/or modified sequence
atgtgtgagccagcccctccgaaacctacgcaatcggcctggcattcctttcccgaatgtccagcgctgctgcttctcctctcactgctccttcttccgttgggactgccagtgctgggagcgcctcccagattgatttgtgactcgcgggtgctcgaaagatacattcttgaggccagggaagcagaaaacgtgacgatgggttgcgcacaaggttgttcattcagcgagaacatcactgtccccgacaccaaggtcaacttctatacctggaagaggatggatgtggggcaacaggccctggaggtgtggcaggggcttgctctgctttcggaagcgattctccgcggccaagcactgctggcaaacgcctcccagccaagtgaaaccccacagctccatgtggataaggcagtctcctcactccgctccctgacgtcactccttcgggcgcttggggcgcaaaaggaggcaatgtcgcttccagaagaagcatcacctgcaccacttagaacctttactgttgacaccctgtgtaaactgttcaggatctactcaaatttcctgagaggtaaactgactctttacaccggggaggcatgccgcagaggtgacagg

SEQ ID NO: 15884 - DNA, 618 bp, Artificial Sequence
  derived and/or modified sequence
atgtgtgaaccagcaccccctaagccgacccagtcagcatggcatagcttcccagagtgcccagctctcctgctcctgctttccctgctcctcctgccactgggactgccagtgctcggagctccgccgcgcctgatctgcgattccagagttctggaaagatacatcctggaggcacgcgaagcagaaaacgtcaccatgggatgcgcccaaggatgcagcttctcggagaacattactgtgccggataccaaggtgaacttctacacttggaagcggatggatgttggtcagcaggctctggaggtgtggcagggcctcgctctgctctccgaggcgattctgcgcggacaagccttgctcgcgaatgcttcccagccatccgagactccgcagctgcacgtggacaaggccgtgtcgtcgctgcgctcgctgactagcctcctgcgcgcgctgggagcgcagaaagaggccatgtcgctgcctgaggaagcctcgccagcgcctctgcgcacttttaccgttgatactctctgcaagctgttccggatctactcaaacttcctgcgcggaaaactcaccctgtacaccggcgaagcctgtcggagaggagacagg

SEQ ID NO: 15885 - DNA, 618 bp, Artificial Sequence
  derived and/or modified sequence
atgtgtgagcctgctcccccgaagcctactcaatccgcttggcacagcttccccgagtgtccagctctgctgctgttactgtcactgctccttctccctctcggtctgcccgtgctgggcgctccacctaggttgatctgcgattcgcgagtgctcgaacgctatatcctggaggcacgcgaggccgaaaatgtgactatgggttgcgctcagggctgctccttcagtgagaacatcactgtgcctgacacgaaagtgaacttctacacctggaaaagaatggacgtgggtcaacaggcgctggaagtctggcaggggctggccctcctctccgaggctattctaagaggccaagccctgctggccaacgcgagccaacctagcgaaacccctcagctccatgtagataaagctgtctcctctctgagatccctgactagtctattgagggctcttggagcacagaaggaggctatgtctctgccagaggaagcttcaccagcgcccctccgtaccttcaccgtcgatacactctgtaagttattccgaatttattctaacttcctgaggggaaagctcaccctgtataccggggaggcttgtcggcggggggacagg

SEQ ID NO: 15886 - DNA, 618 bp, Artificial Sequence
  derived and/or modified sequence
atgtgtgagccagcgccgccgaagcccacccaatcagcctggcactcattcccggagtgcccggcacttctgctgcttctgtccctgctgctgctcccactcggtttgccagtcctcggtgcgccacctaggcttatctgcgacagccgcgttctggagcggtacatcctcgaagcgagggaggccgaaaatgttaccatgggatgtgcccagggctgctcgttctcggaaaacatcaccgtgcccgacaccaaagtgaatttctacacctggaagcgaatggacgtgggacaacaggcccttgaggtgtggcaaggactggccctcctctcggaagcaatcctgcgagggcaggccctgctggccaacgccagccaaccgtcggaaaccccccaattgcacgtggacaaggccgtgtcgtctttgcgcagcctgacttcactcttgagagcactcggagcacagaaggaagccatgtcgctgccggaagaggcgagtcctgctccgctgcgcactttcactgtggacactctgtgcaagctgtttaggatctactccaatttcctgcgcggcaaactgactctgtacactggagaagcctgtcgccgcggtgaccgg

SEQ ID NO: 15887 - DNA, 618 bp, Artificial Sequence
  derived and/or modified sequence
atgtgcgagccggccccgcccaaaccgactcagtccgcatggcacagcttccctgaatgcccggcactcctgctcctgctttctctgttgctgctgccactgggcctgccagtcctcggagctccgccgcgcctcatctgcgactcgcgtgtgttggaacgctacatcctcgaggctagggaagcggagaacgtgaccatgggatgcgcacagggatgtagcttttcggagaatatcaccgtgccggataccaaagttaacttctacacgtggaaaagaatggatgtcggacagcaggccctggaagtgtggcagggactggccctcctctccgaagcgattctgcgcggccaagctcttctcgcgaacgcctcacagccctcggagactccccagctccacgtggacaaagccgtgagctcgctcagaagcctgaccagcctgctgcgggcactgggggcacaaaaagaagccatgtcgctgccagaagaggcgtctccggcgccattgagaacgttcaccgtggataccctctgcaagctgtttcggatctactcgaatttcctgcggggcaagctgaccctgtacaccggagaggcgtgccgccgcggggaccgc

SEQ ID NO: 15888 - DNA, 618 bp, Artificial Sequence
  derived and/or modified sequence
atgtgtgagccagcaccacctaagcctacgcaaagcgcatggcactcctttccagagtgtccagctctcctgttgttgctcagcttgctgctgctgcccctgggcctgcctgtactgggagcacctcctaggctcatttgtgactcacgcgtactcgaacgctatattctggaagcacgcgaggctgagaacgtgaccatgggatgtgctcaggggtgctctttctccgagaacataactgtcccagatactaaggtgaatttttatacctggaagagaatggatgtagggcagcaggcactggaagtgtggcagggcttggccttgttgagtgaggcaattctgagggggcaggctctgctggctaacgcgtcccagccctcagagacaccgcagctgcacgtggataaggctgtaagttctctgaggtctcttaccagcctgcttagagcactgggagcacagaaggaggccatgtcactgccagaagaggcgagccccgcacccctgcgcactttcactgtggacaccttgtgtaagctgttcaggatttactctaactttctgaggggtaagcttactctttataccggagaggcctgccgacgcggggaccgc

SEQ ID NO: 15889 - DNA, 618 bp, Artificial Sequence
  derived and/or modified sequence
atgtgtgaaccagcaccaccaaagccgactcagtcagcctggcattcatttcctgagtgtccagctctactcctgcttctttccttgttactgctgcccctcggactgccagtactcggcgcacctccccgactgatctgcgattcaagggtcctggaaagatacatcctcgaggcgagagaagctgagaacgtgaccatggggtgcgcacagggctgttcatttagcgaaaacatcaccgtgccagacactaaggtaaatttttatacgtggaagcggatggacgtgggacagcaggccctcgaggtgtggcaaggcctggctctgttgagcgaagctatccttcgaggtcaggcgctgttggcaaatgcgagtcagccgtctgaaactcctcagctccatgtggataaggcggtgagttcgctccggtctttgacgtctctcctgagggccctgggggctcagaaggaagctatgtctctgcctgaggaggccagcccagctcctcttcgcacctttaccgtcgacaccttgtgcaaactcttcaggatctattcaaacttcctgaggggcaagctcactctgtacactggagaggcttgcaggcgaggtgatagg

SEQ ID NO: 15890 - DNA, 618 bp, Artificial Sequence
  derived and/or modified sequence
atgtgtgaacctgccccccctaagccgacacagtccgcctggcatagctttcctgagtgtcccgcgcttttattgttgctatcgttgctgttactccccttgggcctgcccgtgttgggcgctcccccgcgcctgatttgcgattcccgcgtacttgagagatatatcctggaagcaagagaagccgaaaacgtcaccatgggctgcgcacagggctgctccttcagcgagaacatcacagtccccgacaccaaggtaaacttttacacctggaagaggatggacgttggacagcaggcattggaagtctggcaaggcctggctttgctcagtgaggcgatactgaggggtcaagcccttctcgccaacgcttcacaaccctccgaaaccccccagttgcatgtggacaaagctgtgtcatccctgcgaagcctgacgagcttgctgcgggccctaggggcccagaaagaagcaatgagcctgcccgaagaggcgtctccagctcctctgcgaaccttcaccgtggacacactttgtaagctcttccggatttattccaactttctgaggggaaagctgacgctgtacaccggcgaagcgtgtaggagaggagaccgc

SEQ ID NO: 15891 - DNA, 618 bp, Artificial Sequence
  derived and/or modified sequence
atgtgcgaacctgcccctcctaaacctacccaaagcgcgtggcacagctttccggaatgcccggcgcttctgctcctgctgagcctcctgctcctaccactgggactgccagtgttgggtgcgccgcctcggctgatttgtgacagccgagtactggagcggtatatcctggaggctcgcgaagctgaaaatgtcaccatgggctgtgcacagggatgcagcttctccgagaacattaccgtcccggacaccaaagtcaatttctacacttggaaacggatggatgttggtcagcaggcactggaagtgtggcaaggactcgcccttctgagcgaggcgatcctgcgcggccaggcattgctggcaaatgcttcacaacctagcgagactccgcagctgcatgtggataaagccgtgagctcactgcgtagcctgaccagcctgttgcgtgcgctgggcgcccagaaggaggcaatgagcctgccggaagaagccagtcccgcgcctctgcgcacctttacagttgacacactctgtaaactgttccggatctattctaacttcttacgcggtaaactgaccctgtacaccggcgaagcctgccggcgcggcgacagg

SEQ ID NO: 15892 - DNA, 618 bp, Artificial Sequence
  derived and/or modified sequence
atgtgtgagcctgcgccccccaagcccacccaatcggcgtggcacagcttccctgaatgccccgctctccttctgttgctgtcacttctgctgctccccctcggcctcccggttttgggcgcccccccacggttaatttgcgattcccgcgttttagagcgctatatcttggaggcccgggaggctgagaatgtcactatgggttgtgcgcagggttgctcctttagcgagaacattaccgtacccgacacaaaggtaaacttctacacatggaagcgcatggatgtgggacagcaagcgctggaggtctggcaggggttagctctgctctccgaggctatcctgcggggccaagctctgttggctaacgcttcgcaaccgtctgagaccccccaactgcacgtggacaaggctgtgtcgtcactacgctcccttacaagtcttctccgcgcactcggagcccaaaaggaggctatgtccctcccagaagaagcctcccccgcccctctccgcaccttcaccgttgataccctttgcaaactgttcaggatctacagcaactttctccggggcaagttgactctctacaccggtgaggcttgcagacggggtgaccgg

SEQ ID NO: 15893 - DNA, 618 bp, Artificial Sequence
  derived and/or modified sequence
atgtgtgagcctgctccccctaaaccaactcaatctgcatggcactctttcccagaatgccctgctctgctgctgctcctgtcactcctcttactgcccctgggcctgccggtgcttggggcaccaccgcgcctgatttgcgattctagagtgctggagaggtatatactagaagctcgggaagccgagaacgtaaccatgggttgtgcccaaggatgtagtttctccgagaacattaccgtgcctgatacgaaggtaaatttctatacatggaagcggatggacgtcggacagcaggcactggaggtttggcaaggccttgctttgctgagtgaagcgatcctgaggggacaggcgttgctggccaatgcaagccaaccttcagagactcctcagctgcatgtggataaagcagtcagcagtctgagatcactgactagcctgctacgcgccctcggagcccagaaagaagcgatgagccttcctgaagaggcatctcccgcacccctgcgcacctttacagtcgataccctctgtaaacttttccggatttactctaatttcctgagaggcaagctgaccctgtatacaggtgaggcgtgtcgtcgaggcgatcga

SEQ ID NO: 15894 - DNA, 618 bp, Artificial Sequence
  derived and/or modified sequence
atgtgtgaaccggcgccgccgaaaccgacgcaatcggcgtggcattcgtttccggaatgtccggcgttactattactattatcgctactattactaccgttaggtttaccggtattaggtgcgccgccgcgattaatatgtgattcgcgtgttctagaacgatatatattagaagcgcgtgaagcggaaaatgtaacgatgggttgtgcgcaaggttgttcgttttcggaaaatataacggttccggatacgaaagtaaatttttatacgtggaaacgaatggatgttggtcaacaagcgctagaagtttggcaaggtctagcgctattatcggaagcgatactacgaggtcaagcgctattagcgaatgcgtcgcaaccgtcggaaacgccgcaactacatgttgataaagcggtatcgtcgttacgttcgttaacgtcgctactacgtgcgttaggtgcgcaaaaagaagcgatgtcgctaccggaagaagcgtcgccggcgccgttacgaacgtttacggtagatacgctatgtaaattatttcgtatatattcgaattttctacgaggtaaattaacgctatatacgggtgaagcgtgtcgtcgtggtgatcgt

SEQ ID NO: 15895 - DNA, 618 bp, Artificial Sequence
  derived and/or modified sequence
atgtgtgaacccgctcctccgaagccaactcagagcgcctggcacagtttcccagaatgccccgcacttttgctgctgctctctcttctgctcctgcccctgggccttcctgtgctcggagcccccccccggctgatttgtgactctagagttcttgagcgatatattcttgaagcccgggaggcggagaatgtgaccatgggctgcgcacaaggctgttctttcagcgagaacatcaccgtcccggacacaaaggtaaacttttatacttggaagaggatggatgttggacagcaggccctcgaggtgtggcagggcctcgccctgttaagcgaagccattctgcgggggcaagcacttctggctaatgcctcccaacctagcgagactcctcagttgcacgtcgacaaggcggtaagcagtttgcgcagtctgacaagcctgttgagggcactgggcgctcagaaagaagcgatgtccttgccagaggaggcaagccccgccccgctgcgaaccttcacggttgacaccctctgcaagctttttcgaatctactcgaactttcttcgaggcaaattgactctatatacaggcgaagcgtgcaggcggggtgaccgc

SEQ ID NO: 15896 - DNA, 618 bp, Artificial Sequence
  derived and/or modified sequence
atgtgcgaaccagcacctcctaagccaacccaatccgcatggcatagctttccagaatgtcctgcactcctgcttttgctttcgctccttttgcttccactgggccttcctgtgctgggcgctccgcctcgcctgatttgtgattcccgtgtgctggagagatacatactggaagcgcgtgaagccgagaacgtcaccatgggatgcgcacagggatgtagcttttcggaaaacatcactgtgcctgacactaaggtcaacttttacacttggaagaggatggatgtgggacagcaagcactggaagtgtggcagggacttgcgctcctttcggaggcaattctgagaggccaggctctgctggcaaacgcgtcccaaccatccgagactcctcaactccacgtggacaaggcagtctcctctcttcgctcacttacctccctgctgcgggcactgggtgcacaaaaagaggccatgtctctgcctgaggaagcctcccctgcacctctccgcacttttactgtggacaccctgtgcaaactttttagaatctactccaactttcttcgcggaaagttgaccctgtacaccggagaagcctgcagacggggtgacagg

SEQ ID NO: 15897 - DNA, 618 bp, Artificial Sequence
  derived and/or modified sequence
atgtgtgaacctgcgcctccaaagcccactcagtcggcatggcattcctttccagaatgtcctgcactgctcctccttctgtccctgcttctcctcccgttgggattgccagtccttggtgcgccaccaagactcatctgtgattcaagagtccttgagaggtatattcttgaagcacgggaagcagaaaacgttactatggggtgtgcacaaggttgcagcttcagcgaaaacatcaccgtgcctgacaccaaggtgaacttttacacgtggaagcgcatggatgtgggacaacaggccctcgaggtgtggcagggactggcattgttgtcggaagccattcttagaggccaagccttgctcgcaaacgcatcgcaacctagtgaaacgcctcaactccacgtcgataaagcagtctcatccctccgctccctcacttcgcttttgcgggcacttggtgctcaaaaggaggcgatgtcccttccagaagaggcctcccctgcaccactgaggactttcaccgtggataccctctgtaagctctttaggatctacagcaattttcttcgggggaaactcacgctgtacactggagaagcgtgccgaaggggagatagg

SEQ ID NO: 15898 - DNA, 618 bp, Artificial Sequence
  derived and/or modified sequence
atgtgtgagcccgcgccacctaaaccaacccagagcgcatggcattctttcccggagtgccccgctcttttgctgctcctctcactcctgctgcttcccctgggcttgccagtgctgggtgcccctccgcgacttatttgcgactcgagagtgctggaacgctacatcctggaagctcgcgaggcggaaaacgttaccatgggctgcgctcagggatgctccttctccgaaaacattactgtgccggacactaaagtgaacttttacacttggaaacgtatggatgtcggacaacaagccctcgaagtgtggcagggcctggcgctcctctcggaggccatcctccgcgggcaagcactgcttgccaatgcgtcgcaaccatccgaaactccacagctgcacgttgataaggccgtctccagcttgcggagcctcacctcgctgctcagggcactcggtgcccagaaagaagctatgagtctgccggaagaggcctcaccggctcctctgcgtaccttcaccgtagacactttgtgcaagctgtttaggatctattccaatttccttagaggaaagctgacgctttacaccggagaggcgtgtcggaggggggatcgg

SEQ ID NO: 15899 - DNA, 618 bp, Artificial Sequence
  derived and/or modified sequence
atgtgcgaacccgcaccgccaaagcctacccagtcagcctggcattcgtttcctgagtgccctgcacttctgttgcttctcagccttctgctgcttccactgggactgccagtgcttggggctccccccagactgatctgtgactccagagttttggaaagatacatactggaagcgagggaggcagaaaacgtcacgatgggttgtgcgcagggatgctcattctccgagaatatcacggtcccggatacgaaggtgaacttttacacttggaaaagaatggatgtcgggcaacaggcactcgaagtgtggcaagggctcgcactgcttagcgaggcaatactgcggggccaagcgctccttgccaatgcaagccagccgtccgagactccgcagctccatgtggataaggcggtgtcctcgctcagatccctcacttccctccttagagcactgggtgcccagaaagaggcgatgtccctgcctgaagaagcatccccagcacccctgcgcacgtttaccgtcgataccctttgtaagttgttcaggatctactcaaactttctgcgcggcaaattgaccctttacaccggagaagcatgtcgacggggggaccgt

SEQ ID NO: 15900 - DNA, 618 bp, Artificial Sequence
  derived and/or modified sequence
atgtgtgagccagctcctccaaagccaacccagtcagcctggcacagctttcccgagtgccctgctctcctcctgcttctgtctttgctgctcctgcccctgggactgcccgtccttggcgctccccctcggcttatttgcgacagcagagtccttgaaagatacatcctcgaggccagggaagcggagaacgtcaccatgggatgcgcacaggggtgtagctttagtgaaaacatcaccgtgcctgataccaaggtgaacttctacacatggaagagaatggacgtggggcagcaggctcttgaggtgtggcagggcttggctttgctgtcagaggctatactcagggggcaggctctgctcgctaatgccagtcagcccagcgagacgcctcagctgcacgtggataaggccgtcagttcccttaggagcctcactagtcttctcagagctcttggggctcagaaggaggcgatgtccctgccagaagaggcctccccagcccccctgcgcacgttcactgtcgatacactgtgcaaactgtttaggatatattccaattttcttagaggaaaattgacattgtatacaggagaggcttgcaggcgaggcgatcgc

SEQ ID NO: 15901 - DNA, 618 bp, Artificial Sequence
  derived and/or modified sequence
atgtgtgaaccagcgcccccaaaaccgacacagagtgcatggcattcgttcccagaatgtcctgcactccttcttttgttaagtctgcttctccttcccttgggactgcccgtccttggcgcccccccacgcctgatttgcgattcgagagttctggaaagatatatcctcgaggcgcgtgaagctgaaaatgttaccatgggctgcgcacagggatgttcattttccgagaacataaccgtgccagacaccaaggtgaacttctatacgtggaagcggatggatgtgggccagcaggctcttgaagtatggcagggtcttgcgctactgagtgaagccatcctgcgtggtcaggccctactggccaatgctagtcagccctccgagactccgcagttgcatgtggataaggcagtgtcttctctgcgctccctgacttcccttttgagagccctgggtgcccagaaagaggctatgtcgctgcctgaagaagcaagccccgctcctctgagaacctttactgttgatacgctgtgcaagctgttcaggatctatagcaactttctgcgggggaagctgacgctctacaccggcgaagcctgtcggcgtggggatcgt

SEQ ID NO: 15902 - DNA, 618 bp, Artificial Sequence
  derived and/or modified sequence
atgtgcgaacctgcaccgccaaagccaacccagtcagcttggcacagcttccctgagtgtcccgcactgctgctgctccttagcctgttgctgctcccccttggactgccagtcctgggagctccgccacgacttatctgtgacagccgggtgctcgagcggtacatccttgaggcacgcgaggccgaaaatgtgaccatgggttgtgctcagggatgttcattttccgaaaacattaccgttccagataccaaagtgaacttctatacctggaagcgaatggatgtgggacaacaggcactcgaagtgtggcagggcctcgctctgttgtctgaagcaattctccggggacaggccctgctggcaaacgcgtctcaaccaagtgaaactcctcaactccatgtggataaggccgtgagctcgcttcgttcgctgacctcgctgcttcgtgcgctgggtgcacaaaaggaggcaatgtcgctgccagaagaagcatcccctgccccacttcggacgtttaccgtggatacgttgtgcaagttgtttagaatttactcgaattttctcagaggtaaacttaccctttacactggggaagcgtgtagacggggtgatcgg

SEQ ID NO: 15903 - DNA, 618 bp, Artificial Sequence
  derived and/or modified sequence
atgtgtgagcccgcacctccaaagccgacacaatccgcatggcacagctttccagaatgccctgcactgctgctgctgcttagcctgctgctgctcccactcggtctccccgtgctcggtgcccccccgcggctgatctgcgattcccgcgtgcttgaacgctatatacttgaagcacgagaggccgagaacgtcaccatggggtgcgcacaggggtgctcctttagcgaaaacataactgtacctgataccaaggtgaacttctacacatggaagcgcatggacgtgggacagcaggctctggaggtgtggcagggtcttgcactcttatctgaagctattctgagggggcaggcgctgctggccaacgcgtcccagccaagcgagacaccccagctgcacgttgataaagcggttagctctctgcggtcactcactagcctgctgcgagctctgggtgcgcaaaaagaggcaatgtctctgcctgaggaggcatctcccgccccgctgcgcacgttcactgtggataccctgtgcaagctgttcaggatctacagcaactttcttagaggaaagttaacactgtacaccggtgaggcttgcagaagaggcgatcgt

SEQ ID NO: 15904 - DNA, 618 bp, Artificial Sequence
  derived and/or modified sequence
atgtgtgagcctgctccaccgaagcccacgcagtctgcctggcacagttttcctgagtgtcccgccttgctgctcctcctgagcctgttgctcttgccactaggtctcccagtgttgggagcccctcctcgtctgatttgtgattctcgcgtcctggagagatacattcttgaggctcgcgaggcagagaacgtgactatgggatgtgctcagggctgttcattttccgaaaacatcacagttcccgacacaaaggtgaatttttatacctggaaaagaatggacgttgggcagcaagcgcttgaagtatggcagggactcgcgctgctttccgaggcgatactgagaggacaggctctcctggcaaacgcttcacagcccagtgagactccccaactacatgtcgataaggctgtctcttcactgagatcactgacctcgctgctcagagcactcggagcccagaaggaagctatgtcgctgccggaggaggcgagtcctgctccccttagaacatttaccgtggacaccctgtgtaagcttttccggatatactccaacttcctgcgtgggaagctcactctgtataccggcgaggcgtgcagaagaggcgatcgt

SEQ ID NO: 15905 - DNA, 618 bp, Artificial Sequence
  derived and/or modified sequence
atgtgcgaacctgcgccaccaaaacctacacagtccgcctggcattccttccccgaatgccccgccttgctccttcttctgtccttgttgcttctgcccttgggcctccctgtgctaggcgccccccctaggctaatttgcgactccagggtgctggaacgatatatcctggaagctcgagaagccgagaacgtgactatggggtgcgcacagggttgcagcttctccgagaacataactgtgcctgatacaaaggtaaatttttatacgtggaaacgcatggacgttggacagcaggcacttgaggtgtggcaggggttggcccttttatctgaagccattttgcgcggtcaggctctgctcgcaaatgcgtctcagcctagtgagacacctcagttacacgttgataaagccgtaagtagcttaagaagcctcacttccctgttgcgagcactgggtgctcaaaaggaagctatgagtctcccagaagaagctagtccagctcccctgaggacttttacagtagatactttatgcaagctgtttcgaatctatagcaacttccttagaggtaagctgacactgtacaccggtgaggcttgcagacgcggcgacaga

SEQ ID NO: 15906 - DNA, 618 bp, Artificial Sequence
  derived and/or modified sequence
atgtgtgaacccgcccctcctaagcccactcaatctgcatggcacagttttcccgaatgcccagcactgctactcttgctttcactgctattgctgccactggggcttcccgtgctgggggccccaccacgcctaatctgtgattcgcgggttctagagaggtatattttggaggcgcgggaggcagaaaacgtgactatgggttgtgcccaggggtgtagcttttcagagaacataacggtcccggacactaaagtgaatttctatacctggaagagaatggacgtagggcagcaggccctcgaggtgtggcagggactcgctctgctgagcgaagcgatcttgcgcgggcaggctctgctcgcgaatgcaagccaacccagcgaaacacctcagctgcacgtggataaggccgtgtctagtctcaggtccttaacttcattgctgcgagccctaggggcacaaaaggaagccatgtcactgcccgaggaggcatcgccagcacccctcaggacatttaccgttgatacactgtgtaaactattcaggatctacagtaattttcttcggggtaagctgaccttgtacacaggcgaggcctgtcggaggggcgaccgt

SEQ ID NO: 15907 - DNA, 618 bp, Artificial Sequence
  derived and/or modified sequence
atgtgtgaaccggcaccaccaaagcctacccaatccgcctggcattcctttcctgagtgcccggccctgctgcttctgctctcgctcctgctgctcccgctgggactccctgtgcttggtgcacctccaaggttgatttgtgattcgagagtcctggaacggtatattctcgaggcgcgggaagcagaaaatgtgactatgggatgtgctcagggatgttcatttagcgaaaacattactgtgcccgacacgaaggtcaatttctacacgtggaagcgaatggacgtcggacaacaggcactcgaagtgtggcaggggctcgcacttctttctgaggcgattttgcggggccaagcccttcttgcaaacgcatcacaaccctctgagactcctcagcttcacgtggacaaggcggtgtcgtcacttagatcgctgacctccctgctcagagcactgggagcacaaaaggaggcaatgtcgcttccagaggaagcgtcaccggcaccactcagaacgttcaccgtggacactctttgcaaactttttcgcatttactccaactttctccgtgggaaacttactctttacactggcgaggcatgccgtcgaggtgaccgg

SEQ ID NO: 15908 - DNA, 618 bp, Artificial Sequence
  derived and/or modified sequence
atgtgcgaaccagcacccccaaaacctacccaatcggcctggcattcgtttcccgagtgccccgcactgcttcttctgctgagcttgctgctgctgccactcgggctccccgtccttggcgcgccacctagactgatatgcgactcccgtgtgcttgaacgttacatactggaagcacgggaggctgaaaacgtgactatgggatgtgcacaaggttgttcgttctcggaaaacataaccgtccctgatactaaagtgaacttttacacgtggaaacgcatggacgtgggtcaacaagcacttgaagtgtggcagggcctcgcacttctctcggaggccatccttcgggggcaggccttgctggccaatgcctcacagccatcggaaacccctcagctccatgtcgataaggcagtgtcaagccttcgctcacttacttcgttgctgagagcacttggagcacaaaaggaggctatgtccctccctgaggaggcctccccggccccgctgcgaacgttcaccgtcgatactctgtgcaagttgtttcggatttactcgaactttctccggggcaagctgactctgtacactggggaagcatgcagacggggtgataga

SEQ ID NO: 15909 - DNA, 618 bp, Artificial Sequence
  derived and/or modified sequence
atgtgtgagcctgcaccgccgaaacccacccagtcggcgtggcacagctttccagagtgcccagcactgcttcttcttctcagccttctgctgctgcctctgggtttgccggtgttgggagcacctccacgcctgatctgcgattccagagtgctggagagatatatccttgaagcacgtgaagccgagaatgtgaccatgggctgtgcccaaggttgttccttcagcgagaacattacggtgccggatactaaggtcaacttctacacctggaaaagaatggatgtgggacagcaagcgttggaagtgtggcagggactggccctgctgagcgaggcaattctccggggacaggcactgcttgctaacgcaagccagccatcggaaactcctcagcttcatgtcgataaggcggtgtcaagccttcgatccctcacctccctgctgcgggcactgggggcccagaaggaagcaatgagcctgcccgaagaagcatccccggcccctttgcggacttttaccgtcgatactctttgtaagctctttaggatttactccaactttctccgaggaaagctcaccctgtacaccggggaagcatgcagaaggggcgaccga

SEQ ID NO: 15910 - DNA, 618 bp, Artificial Sequence
  derived and/or modified sequence
atgtgtgagccagccccaccaaagccgacccaaagcgcatggcattctttccctgaatgtccagcgctcctcctgcttctctcgcttctgcttctgccactcggacttcctgtcttgggtgctcctccccggctcatatgcgatagcagagtgcttgagcgctacatccttgaagcacgagaggcagaaaacgtgactatgggatgtgcacagggttgctcgttttccgagaacataactgtgccagataccaaagtgaacttttacacctggaagcgtatggatgtcggtcagcaagcattggaagtgtggcagggactggcactgctcagcgaagcaatcctgaggggtcaagcactgttggccaatgcatcccaaccgagcgaaacccctcaactgcatgtggataaggccgtgagctcacttcggtcgctgacgtcgttgcttagggcgcttggcgctcaaaaggaagcgatgagcttgccagaagaggcatcacccgcgccacttaggacctttaccgtggataccctgtgcaagctgtttagaatctattcgaactttctccgcggaaaacttaccctgtacaccggagaagcctgccgcaggggcgataga

SEQ ID NO: 15911 - DNA, 618 bp, Artificial Sequence
  derived and/or modified sequence
atgtgcgaacccgccccacctaagccaacacagtccgcatggcattcttttccagaatgtccagccctcttgttgctgctgtccctcctcctgctccctctcggacttcctgtcctgggcgcaccccctaggctcatctgcgactccagagttctcgagaggtacattctggaagcaagggaggctgagaacgtcaccatgggatgtgcccagggatgctcatttagcgaaaatattacagtgcccgacactaaggtcaacttctacacctggaagcgcatggatgtcggtcagcaggccctggaggtctggcaaggcctggctctgctctccgaggccattctccgcggacaggctttgcttgcaaacgcttcacagccttctgagacccctcaattgcatgtcgataaggcagtcagctcactcaggagtttgacctctctgctccgcgctctcggtgctcagaaagaagcaatgtcccttccagaagaagcttcacccgcaccactgagaacctttactgtggataccctgtgtaagcttttcaggatctattctaacttcttgagaggcaagctcaccctgtacaccggcgaggcctgccgtagaggtgatcgc

SEQ ID NO: 15912 - DNA, 618 bp, Artificial Sequence
  derived and/or modified sequence
atgtgcgagccagctccccctaagccaacccaaagcgcatggcatagcttcccagaatgcccagcactgctccttctgctttcattactgctactgccacttggcttgccagttctgggagccccaccaaggctcatctgcgatagtagagtgctggagaggtacatcctggaggctagggaggcagaaaacgtgacaatgggctgcgcacaaggttgcagcttcagtgaaaatattacagttcccgacacaaaagtgaatttctacacttggaagcgcatggacgtgggccagcaggccctggaggtgtggcagggactggctctgttgagtgaggccattttgagagggcaggccttactggccaacgctagccaaccctctgagacaccacagctccacgtcgataaagcagtatcatccctaaggtctctgacaagtctgctgagggcgctgggcgcgcagaaggaggccatgtcactccctgaagaggcctcccccgcacctctacgtacttttaccgtagacaccctctgcaaactttttaggatctattcaaattttctgcgggggaaactaactctctacactggagaggcttgtcgtcgtggagatcgt

SEQ ID NO: 15913 - DNA, 618 bp, Artificial Sequence
  derived and/or modified sequence
atgtgcgaacccgctcccccgaagccaacacagagcgcgtggcactcatttccggagtgtcccgcccttctgctgttgctgagtctgctccttctgccgcttggcctgccagttctgggagctccaccgcgcctcatctgcgactctagagtcttggaaagatacatcctggaagctagagaggctgagaatgttacaatgggatgcgctcaggggtgtagcttcagcgaaaacattactgtgcccgatactaaggtgaacttctatacctggaagaggatggacgtgggacagcaggcattggaggtgtggcaaggtctggcactgctgtctgaagcaatcctgaggggacaagctctgctggcaaacgcctcacaaccttccgaaaccccccagcttcacgtcgataaagccgtgtcatcgttgcggtcactgacgagcttgctgagagcgctcggagcccagaaggaggcgatgagcctcccggaagaggccagccctgcccctcttcgtacattcaccgtcgatacactgtgcaagttgttccgcatctattcaaactttcttagagggaaactcacactctacacaggggaagcttgtcggcgcggagaccgc

SEQ ID NO: 15914 - DNA, 618 bp, Artificial Sequence
  derived and/or modified sequence
atgtgtgagcctgccccaccaaagccaacccagagcgcttggcattcgttccctgagtgtcctgccctgctgctactgctatcattgcttctcttgccattgggactgcccgtacttggggcccctccacggctgatctgtgacagccgggtgctggagcgctatatactcgaagcccgggaggccgaaaatgtgactatgggatgcgcccagggctgctctttcagcgagaacatcaccgtgccagacaccaaggtaaatttctatacgtggaagcggatggacgtcgggcagcaggcgcttgaagtttggcagggcttggcccttttgtctgaagccatcctgcgggggcaggctctgctagcaaacgcctcccagccatcagaaaccccacagctacacgttgataaagccgtctcttctttgcgatcactaaccagtctgctgagagctctgggagcccagaaggaggctatgagccttcctgaagaagcctcaccggcgccactcagaaccttcacagtggacaccttgtgtaagctatttaggatctattcaaatttcctgcgaggcaagctcaccctttataccggagaagcttgtaggcggggggaccgt

SEQ ID NO: 15915 - DNA, 618 bp, Artificial Sequence
  derived and/or modified sequence
atgtgtgaacccgcaccccctaagccaacccagtcagcttggcattcgttccccgagtgcccagcattgctgctgctcctgagcctgctgcttcttcctctgggtttgcctgtgcttggagcaccccctcgtttgatttgtgacagccgcgtgcttgagaggtatattctggaagcacgcgaagcggaaaacgtgactatggggtgtgcacaaggctgctcattttccgagaacattaccgtgccagataccaaggtcaatttctacacttggaaacgaatggatgtgggtcagcaggcactggaagtgtggcaggggcttgcactgctctccgaagcgatacttagaggccaggcacttctcgcaaatgcatcgcaaccatccgaaacccctcaactccacgtcgataaagcggtgtcctcgctgagatcgctgaccagccttctcagagctcttggagctcaaaaggaagctatgtcactgccggaggaagcatcacctgccccactgaggactttcaccgtcgacactctttgtaagttgtttaggatttactctaactttctccgcggaaagctgacgctttatactggagaggcatgtaggcgcggtgaccga

SEQ ID NO: 15916 - DNA, 618 bp, Artificial Sequence
  derived and/or modified sequence
atgtgtgaacctgctcccccaaaacccacgcaaagtgcctggcactcatttcctgaatgtcccgccctcctcctcctgctgtctctgttgctgctgccgctgggattgcccgtgctcggagccccccctagactgatctgtgactctagagttttggaacgctatattctggaggcccgggaggctgagaatgttacaatgggctgtgcacagggatgttccttctccgagaatattactgtgccggacactaaggtgaacttttacacatggaaacgcatggacgtagggcagcaagccctggaggtatggcaaggtttagcattgctgtcagaggcaattcttcgcggccaagcacttctggctaacgcgtcgcagcccagcgaaactccccaactccacgtcgacaaggccgtgtcatccctaagatccctgacttctcttcttcgggctctgggtgcccagaaagaagcgatgtctctgcccgaggaagcctctccggcgccactaagaacgtttactgtggataccctgtgcaaacttttccgcatctattccaactttctgcgcggcaaactaacactgtacaccggcgaagcatgcagacggggagaccgg

SEQ ID NO: 15917 - DNA, 618 bp, Artificial Sequence
  derived and/or modified sequence
atgtgcgaaccagcccctccgaaacctacccagtctgcatggcacagcttcccagaatgtccggccctgctgctgctcctgtcgctgctcctcctcccgcttgggcttccggtgcttggcgcaccaccaaggcttatctgcgactcgcgggtccttgaaagatacatactcgaagctcgagaggccgagaacgtgactatgggatgcgctcaaggctgtagcttctcagagaacatcacggtcccagacactaaggtgaatttctacacttggaagcgtatggacgttggtcagcaggcattggaggtctggcaaggactggccctgctttccgaagcgatcctccggggccaggccttgttggctaacgcgtcacagccttccgaaaccccgcagttgcatgtggataaggcggtgtcctccctgcggtccctcacctcattgctgcgggctctgggagcccaaaaggaagcaatgagcctgcccgaggaggcttcgccggcgcctctgcgcactttcacggtggataccctgtgcaagctctttcgcatctactcgaattttctgcgcggcaaattgacgctctacaccggggaagcatgccgacgcggagacaga

SEQ ID NO: 15918 - DNA, 618 bp, Artificial Sequence
  derived and/or modified sequence
atgtgtgaaccagctccccctaaaccaacccagtcggcatggcactcgttcccggaatgtcccgccttactgctgctgcttagtctgctgctgctgccactaggcctgccggtgttaggcgcccccccgagactgatctgcgacagccgggttttggagaggtatattcttgaagctagggaggccgagaatgtgactatgggttgcgctcagggctgctcttttagcgagaacataaccgtgcccgacaccaaggtgaacttttacacatggaaacgaatggacgtcggacagcaggctcttgaggtttggcaagggctcgccctactgagcgaagctatcctgcgcggtcaggccttgctcgcaaacgccagtcagcctagtgaaacaccccagctacatgtcgataaggctgtcagctctcttagatctctaacctccctcttgcgagctctaggggcccagaaagaggccatgtctctcccagaggaggcgtctcccgccccattgagaacttttaccgttgacactctgtgcaaattatttcggatatactcgaatttcctacgaggaaaattaacactctatacgggtgaggcgtgccgccggggggaccgc

SEQ ID NO: 15919 - DNA, 618 bp, Artificial Sequence
  derived and/or modified sequence
atgtgtgagcctgcgcccccaaagccgacccagtccgcatggcactctttccccgaatgcccagcactcctcctgctcttgagtctgctccttctgccgctgggactgccagtcttgggcgcaccaccaaggttgatttgcgacagcagggtcctcgaaaggtatatcctggaagccagggaagccgagaacgtgactatgggttgcgcccagggttgttccttttctgagaacatcacggtgcccgatacaaaggtgaacttttacacctggaagagaatggacgtcggccaacaggccctcgaagtgtggcagggtctcgctctgctgtccgaggccatcctcaggggacaagcgcttttggccaatgctagccagccctcagagactccccagctgcacgttgacaaagcggtctctagtctccgcagtctcaccagtctgttgagggcactgggagcccaaaaagaagctatgagtcttccagaagaggcctctcccgcccccctgagaaccttcacagttgacaccctctgtaaactcttcaggatctattctaattttctgagaggaaaattgacactctacaccggtgaagcttgtagacgcggtgacagg

SEQ ID NO: 15920 - DNA, 618 bp, Artificial Sequence
  derived and/or modified sequence
atgtgtgaaccagcaccaccaaaaccaactcaatctgcttggcattcttttcctgaatgcccagcactccttttacttcttagtcttcttcttttacctttaggacttcctgtcttaggtgcaccaccacgtcttatttgtgattcaagagtattagagagatatatattagaagcaagagaagctgaaaatgtgactatgggatgtgcacaaggttgttctttttcagaaaatattactgttcctgatactaaagttaatttttacacatggaaacgtatggatgtaggacaacaagcccttgaagtttggcaaggtttagcattattaagtgaagctattttaagaggacaagctttattagcaaatgcaagtcaaccaagcgaaacaccacaactacatgttgataaggcagtttcatctttaagatcattaacaagtttacttcgtgctttaggagcccaaaaagaagcaatgtcacttccagaggaagcatcaccagcaccacttagaacattcactgtcgatacactttgtaaattattccgaatttattcaaattttttaagaggtaagttaactctttatactggtgaagcttgtagaagaggtgataga

SEQ ID NO: 15921 - DNA, 618 bp, Artificial Sequence
  derived and/or modified sequence
atgtgcgagccagcgccgcctaagcctactcagtcggcttggcattccttccctgagtgcccggccctgcttctgctgctgtcactgttgctgctgccgctggggctccccgtgctgggggccccacccagattgatctgcgactcccgggtgctcgaacgctatatcctcgaggccagagaagccgaaaacgtgaccatgggctgtgctcagggatgctccttttccgagaacatcactgtgcccgacaccaaggtgaacttttacacctggaagcggatggatgtgggacagcaggcccttgaagtgtggcaaggacttgcgctgctcagcgaagcgatcctgcggggacaagccctgctggctaatgccagccagccctcggaaactccccagcttcacgtcgacaaggccgtgtcctctctgcgctccctgacgtcgctgctccgcgctctgggagcacagaaagaggcaatgtcgctccctgaagaggcctcgcctgctcccttgaggaccttcaccgttgacaccctgtgcaaactgttccgcatctacagcaacttcctcagaggcaagctcacgctgtataccggagaggcctgtcgcagaggagatcgg

SEQ ID NO: 15922 - DNA, 618 bp, Artificial Sequence
  derived and/or modified sequence
atgtgcgaacccgctccccctaagccaacccagagtgcatggcactctttcccagagtgcccggccctgttgctcctactatcgctcctgcttctgcctctcggtctaccagtcttaggcgctcccccaaggctcatctgtgactcaagggtgctggaacgatacatcttggaagcgcgagaggccgaaaacgtaactatgggatgcgcacaggggtgtagcttcagcgagaacatcactgtccctgacaccaaggtcaatttctatacctggaaacgaatggacgtcggccagcaggccttggaagtatggcagggactcgcactgctgagtgaggctatcctccggggccaggcgttgctggcaaacgctagtcagccttccgagactccccagcttcatgtggataaagccgtcagttcccttagaagtttaacgtcattactgcgtgccctgggcgctcagaaggaggcaatgtccttgccagaagaagcttcacccgcccctctcaggaccttcaccgtggacactttatgcaagctttttcgcatctatagcaacttcttgcgaggaaaattaaccctgtatacgggcgaggcttgtaggcgaggtgataga

SEQ ID NO: 15923 - DNA, 618 bp, Artificial Sequence
  derived and/or modified sequence
atgtgcgagccggctcctcctaagccaactcagagcgcttggcattcttttcctgagtgcccagcactcttgctgctgctgagcctactgttactgcccttagggctgcctgtcctcggagcaccccccagattaatctgtgacagccgagttttggagcgatacattcttgaggcacgcgaggcggagaatgtaactatgggttgtgctcaggggtgttctttttccgagaacattaccgtgcccgataccaaggtcaatttctatacttggaagcgaatggacgtcggccagcaggcgctggaagtgtggcaaggtctggcactcctgagcgaggccatcctgcggggtcaagccttactggctaatgcctctcagcccagcgagacgcctcagctgcacgtggacaaagctgtgtcttcattacggtcattgacctcgttgcttagagctctcggagcgcagaaagaagccatgtctcttccagaagaagctagccctgcccctctccgtaccttcaccgtggacaccctatgcaaattatttcgtatctacagcaatttcttgcgggggaaactgacactgtataccggcgaggcttgcagacgcggtgaccgc

SEQ ID NO: 15924 - DNA, 618 bp, Artificial Sequence
  derived and/or modified sequence
atgtgtgagccggcaccaccaaaaccaacacagtctgcctggcactcattccctgaatgtccggcgcttcttttgctgctttcactgctgctgctgcctctgggcctgcccgttctcggcgcgccccctcggttgatctgtgacagccgggtgctcgagcggtacattctagaagcaagggaggcagagaatgttacgatgggttgcgctcaaggatgctccttcagtgagaacatcacagtgcctgatactaaagtgaacttttacacatggaagcgtatggatgtcgggcagcaagccctcgaggtctggcagggtttggctctgctttctgaggccatcttgcggggccaggccctgttggctaatgccagtcagccctcggagacccctcagctccacgtggacaaggcggtgtcttctctgcgttccctaacttctctactgcgggctctcggagctcagaaggaagccatgtcacttcctgaggaagccagccccgcacctcttcgtactttcacggtggacaccctttgtaaactgttcaggatctattctaattttttgagaggaaagttaactctctacacaggggaggcttgcagaaggggcgataga

SEQ ID NO: 15925 - DNA, 618 bp, Artificial Sequence
  derived and/or modified sequence
atgtgcgaacccgcccccccaaaacctacacagagcgcgtggcacagtttcccagaatgtcccgccctcctgcttttactctctctgctgctgctgcctttggggctgcccgttctaggtgccccaccccgtctgatctgcgactctcgcgttttggagcgctatattctggaggccagggaggccgagaatgtaaccatggggtgtgcacaagggtgctcttttagtgagaacattacagtgcctgacacaaaagtaaacttttacacatggaaacggatggatgtaggacaacaggccctggaggtgtggcaggggctggcacttctctcggaggctattctcaggggacaagctctcctggccaacgccagccagccatcagagacacctcagctgcacgtcgataaggccgtgtcttcccttagaagcctaacttctttgctgcgcgcactaggagcacagaaggaggccatgtccttgccagaggaggccagccctgccccgctgcgcacattcaccgtcgacaccctctgtaagttatttagaatttactcgaatttcctgcgtggtaagctgaccctgtacaccggagaggcctgccgaaggggagatcgg

SEQ ID NO: 15926 - DNA, 618 bp, Artificial Sequence
  derived and/or modified sequence
atgtgcgaaccggccccccccaagccaacccagtcagcctggcactcatttccagagtgcccggctcttttgcttctcctgtccctgctcctgctgccactgggcttgcctgtgctgggagcacccccccggctaatctgtgacagtcgcgttcttgaacggtatatacttgaagcccgcgaagctgagaacgttaccatgggatgtgcgcaaggttgcagtttttccgagaacatcacagttccagatactaaggtgaacttctacacttggaagcgaatggacgtgggacaacaggctcttgaagtctggcagggcctagcacttctgagcgaggctattttgcgcggtcaggccttgttagctaatgcgagtcagccctctgaaacgccccaactacatgtcgacaaggcagtcagtagcctacggtcgcttacttccttgctgcgggccctgggtgcacaaaaagaggctatgtctcttcctgaagaggcctccccagcgcccctcagaacgttcactgtggacactctctgcaagctgtttcgcatttatagcaactttctgagggggaagttgacgctgtacacgggcgaggcgtgtaggcgtggcgatcgc

SEQ ID NO: 15927 - DNA, 618 bp, Artificial Sequence
  derived and/or modified sequence
atgtgtgaacccgcaccgcctaagccgactcaaagcgcgtggcattcgttccccgaatgtccagcactccttttgctgttgtcattgttgcttctgcctctgggccttcccgtccttggtgcacctcctcgcctcatctgcgatagcagagtgttggaaaggtacattcttgaagcacgcgaagcggaaaacgtgactatgggatgcgcccaaggatgttcgttctcagagaacataaccgtcccagataccaaggtgaacttttacacttggaaaagaatggatgttgggcaacaggcgctcgaagtgtggcaggggctggctctgctgtccgaggcaattcttcggggacaggcactgttggcaaatgcatctcaaccatcggagacgccacaactgcacgtggacaaggcagtgtcgagccttagaagcctgacttcactgctccgtgcgctcggtgctcagaaggaagccatgtccttgccggaggaagcctcgcctgcgcctcttcgcacgttcaccgtcgacaccctctgtaagctgtttaggatctactcgaattttctgcgtggcaaacttactctgtacactggtgaggcgtgccgtcggggggaccgg

SEQ ID NO: 15928 - DNA, 618 bp, Artificial Sequence
  derived and/or modified sequence
atgtgcgagcctgccccccctaagcccacgcaatccgcctggcacagttttccagagtgcccagccctgctcctcctacttagtcttctgctgctccccctggggttgccggtgctgggcgcaccacctagacttatttgcgactccagggtgctagaacgctacattttggaagcacgggaagccgaaaacgtgactatggggtgcgcgcagggctgtagtttttcagagaacatcaccgtacctgacacgaaggtgaatttctacacatggaagaggatggatgttgggcaacaggctctagaggtatggcagggcttggcactgctttctgaggctatcctcaggggacaggcactcctggctaacgccagccaacctagtgaaacaccacagttgcatgtggacaaggccgtgagctctttgcgaagcctgactagtttgttacgtgcattgggggctcaaaaggaggcaatgtctctgcctgaggaggcttcccctgccccacttcggacctttaccgttgataccttatgcaaactgtttcgtatctacagcaacttcctaagagggaagttaactctctatactggtgaggcatgcaggcgtggcgataga

SEQ ID NO: 15929 - DNA, 618 bp, Artificial Sequence
  derived and/or modified sequence
atgtgcgagcccgctcccccaaaaccaacgcagtctgcatggcattcgttccctgaatgtcccgccctccttttattgctgtccctcctgctcctgccactgggcctcccggtactcggcgccccacctcgcttgatctgcgactcacgtgtcctggaacggtacatcctcgaagctcgagaagccgagaatgtaactatgggttgcgcccagggttgcagcttcagtgagaacataacggtgcctgacactaaagtgaatttctacacctggaagaggatggatgtcgggcagcaggcactggaggtctggcaagggctggccctgctatccgaagcgattctgagaggtcaggccttactggcgaatgcaagtcagccgagtgagacccctcaattacatgtcgataaagccgtgtcaagcctccgcagcctgacctccctgttgagagccttgggggcacagaaggaggccatgtcactccccgaagaggcgtctcccgccccactccgaaccttcacagttgataccctgtgtaagctgttcagaatttattcgaattttctgaggggaaaactcacactgtatactggagaggcgtgccgacggggggaccgg

SEQ ID NO: 15930 - DNA, 618 bp, Artificial Sequence
  derived and/or modified sequence
atgtgcgaaccagcccctccgaagcctactcaaagcgcttggcatagcttccccgagtgcccggccctgctcctgctcctgtccctgctgctgctgcccctggggcttccggtgttgggagctcccccgcgattgatctgcgactcgcgggtcctggaaagatatatcctcgaggccagggaagccgaaaatgtcactatggggtgcgcgcaggggtgttccttttcagagaacattaccgtgccagacaccaaagtgaacttctacacttggaagaggatggacgtcggacagcaagccctcgaagtgtggcagggactggccctgctgtccgaggcgatcctcaggggtcaagccctgttggcgaacgcctcacaaccgtcggagactccgcaactccatgtggacaaggcagtctcgagcttgcgctccctgacttccctcctgagagcgctgggagcgcagaaggaggcgatgtcgctgccggaagaagcctcgcccgcgccactgcggaccttcaccgtcgataccctgtgcaagctcttccgtatctacagcaatttcctgcggggaaaactgactctgtacactggagaagcatgcaggcgcggagacaga

SEQ ID NO: 15931 - DNA, 618 bp, Artificial Sequence
  derived and/or modified sequence
atgtgtgagccagcaccccccaagcctacacaatcggcctggcactcatttccagagtgtccagcactgctgttgctcctgagtctactgctgctgccgctcgggctgcccgttctgggcgctccacccaggttgatctgcgattcacgcgtgttggagaggtatatcttggaggccagggaagcagagaacgtgaccatgggctgtgcgcaggggtgcagcttctctgaaaatatcactgtgccagacactaaggtgaacttttacacttggaaaaggatggatgtaggacagcaggcactcgaagtttggcagggcttagcactactgagcgaggctattctgcgagggcaggcactgctggcaaatgcatctcagccttccgagaccccgcagttgcatgtcgataaggccgtgtccagcctgcggtccctgacatcactactgcgggctctcggggctcaaaaagaggcaatgagcctgcctgaggaggcgtctccggctccactgaggacctttactgtagacactctctgcaagctttttcgcatttatagcaattttctcagaggaaaactaacactgtacaccggagaggcgtgccggcggggtgatagg

SEQ ID NO: 15932 - DNA, 618 bp, Artificial Sequence
  derived and/or modified sequence
atgtgtgagccagccccaccaaagcctacgcaatcggcctggcattcattccccgaatgtccggcacttctcctcctcctttcactgttgcttctgccactcgggctccccgtcttgggtgctccgcctagacttatttgtgattcgcgcgtgctcgaacgttacattctggaggccagggaagcagagaatgtcactatgggttgtgctcaaggatgttcgttttcggagaacatcaccgtgcctgacaccaaggtcaacttttacacctggaagcggatggatgtgggacaacaagccctcgaggtctggcagggacttgcactcctgagcgaagcaattctgaggggacaggcgctcctcgcaaacgcctcgcaaccctccgaaacgccacaacttcatgtggataaggcagtctcgtcccttagaagcctcacctcgcttctgcgggcacttggagctcagaaagaagcaatgtctcttcctgaagaggcttcgcctgcaccgttgagaacttttactgtggataccctttgtaagctgttccggatttactccaacttcctgaggggtaagttgactctttacactggtgaagcatgtcgccggggtgaccgt

SEQ ID NO: 15933 - DNA, 618 bp, Artificial Sequence
  derived and/or modified sequence
atgtgcgagccagcacccccaaagccgactcagtccgcatggcactcctttccggagtgcccggccctcctgctgctcctctcgttgcttcttctgccactgggtctgccggtgctcggtgccccgccgcgcttgatctgtgacagtcgggtgttggaaaggtatatcctggaagctagagaggccgaaaacgtgaccatgggttgtgcacagggatgtagcttctcggagaatatcaccgtgccagacaccaaggtgaacttctacacgtggaagagaatggacgtcggccagcaggccctggaggtgtggcaggggctcgccctgctgagcgaagcgatactcagaggccaggccctgctggcaaatgcatcccagccttcggaaactccacagctgcatgtcgataaagcagtgtcaagcctgcgcagcctgaccagcctgttgcgcgcgctgggagcccaaaaggaagccatgtcgctgccggaggaggcctcacccgcacctttgcggacgttcactgttgacaccctgtgcaaactcttccggatctacagcaacttcctgcggggaaaactgaccctgtacaccggagaggcttgccggcggggggaccgc

SEQ ID NO: 15934 - DNA, 618 bp, Artificial Sequence
  derived and/or modified sequence
atgtgcgaaccggccccaccgaagcctactcagtccgcctggcattcattccccgaatgcccggccctgctgcttcttctgtccttgctgctcctcccgctgggtctgcctgttttgggagcgccaccacggctcatctgcgatagccgcgtgctcgaacgctacattcttgaagccagggaggcggaaaacgtgaccatgggatgtgcacagggctgctccttctcggaaaacatcaccgtgcccgacaccaaggttaacttctacacttggaaaagaatggacgtcggccagcaggcgctggaagtgtggcaaggactggctctcctttcagaggcgatcttgcgcggccaggccctgttggcaaatgccagccagccgtccgaaacgccgcagctgcatgtggacaaagcagtctcctcgctccgctccctcacttcgctcctccgagccctgggagcacagaaggaggcgatgtcgctgcctgaagaggcttcaccggcccccctgcgcaccttcactgttgataccttgtgtaagctgtttcggatctactcaaatttccttcggggaaagctcactctgtacaccggcgaggcctgtcgacgaggagataga

SEQ ID NO: 15935 - DNA, 618 bp, Artificial Sequence
  derived and/or modified sequence
atgtgcgaaccagctcctcctaaacccacacagagtgcttggcattcttttcccgagtgtcccgccttactattacttttatcgctgctcctgctacctctcggactgccagtgctcggggcccccccccggttaatctgtgattctagggttctggaacgttacatactcgaagcgcgagaggccgaaaatgttacaatgggatgtgcacaggggtgttcattctcagagaacatcacggtgcccgacacaaaggtcaacttttacacttggaaacgtatggatgtggggcaacaggctctggaagtctggcaggggctagccctcctatctgaagccatccttcgcggacaggctctgcttgcaaatgcctctcagccatcagagacacctcagcttcacgttgataaagcagtgtcttccctaagatctctgacttctcttcttagggcactgggggcgcagaaagaggcaatgtcactgcccgaagaagcctcccctgcccctcttcgcacattcactgttgatacactatgtaaactatttagaatctattcaaatttcctacgcgggaaactcacactgtatacaggagaagcctgtcggcggggagatagg

SEQ ID NO: 15936 - DNA, 618 bp, Artificial Sequence
  derived and/or modified sequence
atgtgtgagccagcacctccaaagcctacccagtcagcttggcacagcttccccgagtgtcctgccctgttactgctcctgtcactgctgctgctgcctctcggtctaccagtgctgggtgctcccccccgtctcatatgcgactcaagggtcctagaacgatacatactggaagccagagaagctgagaacgtgactatgggatgcgcccagggctgctcattttctgaaaacataaccgttcctgatacaaaagttaacttctacacatggaaaagaatggacgttgggcagcaggccctggaagtctggcagggcctcgcactgctgagcgaggccatactgcggggccaggcattgttagctaatgcatcccagcctagtgagaccccccaactacatgtcgataaggccgtgtcttcactgcgctccctgaccagtctgctgcgcgctctgggagcccagaaggaggccatgagcctgcccgaggaggcatcccccgctcctctgcgaaccttcactgtggacacactgtgcaagctattcaggatctacagcaactttctccgaggcaagctgactctgtatactggcgaggcttgcaggaggggggatagg

SEQ ID NO: 15937 - DNA, 618 bp, Artificial Sequence
  derived and/or modified sequence
atgtgcgaacctgcgccgcctaagccaactcagtcagcgtggcatagcttcccagagtgcccggcactcctcctgctgttgtcactcctgcttcttccattgggcctgccagtgctgggagctccgcctcgcctgatttgcgatagcagggtgctggaacgctatatcctggaagcgcgcgaagcggagaacgtgaccatggggtgcgcacaggggtgcagcttctccgaaaacattacggtgccagataccaaagtcaatttctacacgtggaaacgcatggatgtgggccaacaagctctggaggtgtggcagggactggcactgttgtccgaggccatcctgcggggacaggcactgctggcgaacgcctcacagccatcggaaactccgcagttgcacgtggataaggccgtcagctccttgcggtcacttaccagtcttctccgcgccctgggtgcgcaaaaggaagcaatgagcttgcccgaggaggcgtcccccgccccgctcagaacctttactgtggacaccctctgcaagctctttcggatctattcaaacttcctgcggggcaaactgaccctgtacactggagaggcatgccgcagaggggaccgt

SEQ ID NO: 15938 - DNA, 618 bp, Artificial Sequence
  derived and/or modified sequence
atgtgcgaacccgcgccaccaaaacccacacagtcagcgtggcattccttcccagaatgccccgcattgctcctgctcctgtcacttcttttacttcccttgggcctccctgtcctaggggcccctccccgtctaatctgcgattcgcgcgtgttggagcgatacatcctcgaagcacgtgaggcggagaatgtcacaatgggctgcgctcaaggctgttctttctcagaaaacatcacggtcccggacactaaagtgaatttctatacctggaaacgtatggatgtcggacagcaggctcttgaagtctggcaaggccttgcattactatctgaagctatcctcagaggccaagcgctccttgccaatgcatcgcagcccagcgagacccctcaacttcatgtcgataaggccgttagctctcttcgatcgctgacttcattacttcgcgctctcggcgcccaaaaggaggcgatgagcctccctgaagaagcctccccagctcctttaaggacgttcacagtggatactctgtgtaaactgtttcggatctattcaaatttcctacgtggcaagttgacactgtataccggagaggcatgtagacgaggtgatcgg

SEQ ID NO: 15939 - DNA, 618 bp, Artificial Sequence
  derived and/or modified sequence
atgtgtgagccggcacctcctaaaccaactcaatctgcttggcatagttttcctgagtgtcctgcgctgctgcttcttttatccctgctgctgttacccctcggactgcctgtgctgggtgcacctccgcgattgatttgtgactctagggtgctggagagatacatcctcgaggcacgggaggcagagaatgtgaccatgggatgtgcacaggggtgcagtttctctgagaacattactgtcccagacacgaaggtgaacttctacacctggaagagaatggacgtgggtcagcaggctctcgaggtttggcagggtctggctctcctgtcagaggccatcctccgcggccaggccctgctggccaatgcctcacagccgtcggagaccccccagctacatgtggataaggcagtatcctctctccggagcttgacctcactgctgagggccttgggagctcaaaaggaagctatgagcctcccagaagaggcctctccagcgcctctgcggacgtttaccgtcgacaccctgtgcaagttattccggatttacagcaactttctcaggggcaaactcaccctgtataccggcgaagcctgtaggcggggcgacagg

SEQ ID NO: 15940 - DNA, 618 bp, Artificial Sequence
  derived and/or modified sequence
atgtgcgagccggccccccccaaaccaacacagtccgcctggcacagctttcccgagtgtccggccttgcttctccttctatctctgcttctgcttcccctggggctgccggtgctgggagctcccccacgactcatatgtgactcccgggttctggagagatatatcctggaggctcgcgaagccgagaatgtaaccatgggctgcgcccagggatgctcctttagtgagaacattaccgtccctgacacgaaggtgaatttttatacttggaagcgaatggatgttgggcaacaggctctggaggtttggcagggtctggccctgctatccgaggcgatattgcgtggacaagcactcctcgccaacgcctctcagccatccgagacccctcagcttcatgtggacaaagcagtgtcgtccctgcgcagtctaacaagcctgctcagagcactgggagcccaaaaagaagctatgagtctgccagaagaggccagtcccgcccctctgcgaactttcacagtggacactctgtgtaaactatttaggatctactcgaatttcctacgcggaaagctgacgctatatacaggcgaggcatgtcgccgcggcgaccgc

SEQ ID NO: 15941 - DNA, 618 bp, Artificial Sequence
  derived and/or modified sequence
atgtgtgaaccggcaccaccgaagcctacgcaatcggcttggcacagcttcccagagtgtccggcactcctgctgttgctgtccctgctgctcttgcctctgggcctcccagtgcttggcgctcctccgagactgatctgcgattcgcgcgtcctggaaagatacatcctcgaagcgagggaagcagaaaacgtcaccatgggatgcgctcaggggtgttcatttagcgaaaacatcactgtccctgacaccaaggtgaacttctacacctggaagagaatggacgtcggccaacaggcacttgaggtctggcagggcctcgcccttctcagcgaagctattctgagaggccaagcactgttggccaacgccagccagccatccgagactccacaactccacgtggacaaggcagtgtcctccctgcgcagccttacctccctccttcgagcgttgggggcgcagaaagaggccatgtcactgccagaagaggcctcgccggccccgctccggacctttactgtcgacactctgtgcaagctgttccggatctacagcaacttcctgcggggaaagctcactctgtacaccggagaggcctgccgtaggggcgaccgc

SEQ ID NO: 15942 - DNA, 618 bp, Artificial Sequence
  derived and/or modified sequence
atgtgcgagccggccccacccaagcccacccagagcgcatggcactccttccccgagtgtcccgcgctgctgctgcttttgtcactgctcctgttaccgctgggattgcccgtcctgggtgctccccctagactgatctgtgattctagagtgctagaacggtacatcttggaggcgagagaggccgagaacgtcaccatgggttgtgcgcagggatgctcattttcggaaaatatcaccgtgcctgacactaaggtgaacttttatacttggaagcgaatggacgtaggacagcaagctctcgaggtctggcagggtctagccctcctttccgaggcgatcctccgaggccaggctctcctggctaatgccagccagcccagtgaaaccccacagctacatgtggataaggccgtgtcaagcctgagatctcttacctctctcctgagggcactgggagcacagaaagaggctatgtcactgcccgaggaagctagtcccgctccgctaaggacttttactgttgatactctctgtaaattgttcaggatctattcaaactttctgcgcgggaagctgacgctctataccggcgaagcctgtagacgaggggaccgc

SEQ ID NO: 15943 - DNA, 618 bp, Artificial Sequence
  derived and/or modified sequence
atgtgtgagcctgcaccgcccaagcctactcagtcagcatggcattcctttcccgaatgtccggccctcctcctcctgttgagccttcttctgttgccgcttggtttgccagtgctgggagcaccacctcggctgatttgtgactcgagagtgctggaacgatacatcctcgaagcacgagaggcagagaacgtgacgatgggctgtgcccaaggatgctccttctctgaaaacatcactgtgcccgataccaaggtgaacttctacacctggaagagaatggatgtcggacaacaagcacttgaggtctggcaaggactggcactgcttagcgaagcaattctgagaggacaggccctgcttgcgaatgcgtcacaaccttcggaaacccctcaacttcacgttgataaggccgtgagttcgcttcgctcacttacgtcgctgcttcgagctctgggcgcacaaaaggaagcaatgtcactgccagaagaagcatcacctgcgccactgaggacctttactgtcgatactctttgtaagctgtttagaatctacagcaacttcctccgaggtaagctcactctttacactggggaagcatgtagacgtggagatagg

SEQ ID NO: 15944 - DNA, 618 bp, Artificial Sequence
  derived and/or modified sequence
atgtgtgagcctgcacccccaaagcctacgcaaagtgcttggcattcatttccggaatgtcccgcattgctcctcttactttcattgcttctgttgcctttaggacttcctgtcctaggcgctccaccacgactcatttgcgattcacgtgttctggaacggtacattcttgaggctagagaggcagaaaatgttacgatgggttgcgctcagggatgttcctttagcgagaatatcacggttcctgatactaaagtaaatttttatacctggaaaaggatggacgtgggacaacaggccttggaagtttggcaaggactagccttgctctccgaggccattcttagaggtcaggcacttttggctaacgctagtcaacctagtgagacaccacagctgcacgttgataaggccgtttctagtttgagatcactcacttccctcttgcgagccttgggtgcccagaaggaggccatgtcacttcctgaagaagctagtcctgctccccttcgtacgttcactgttgatacactttgcaagctattcagaatctatagtaacttccttaggggtaaacttactttgtataccggggaggcttgtaggcgaggtgaccga

SEQ ID NO: 15945 - DNA, 618 bp, Artificial Sequence
  derived and/or modified sequence
atgtgcgagcccgctccaccaaagccaacgcagtccgcatggcatagctttcctgagtgtcccgcactgttgctgttgctgtcgttgttgctgctcccattaggcctcccagttctcggtgctcccccacgactgatttgcgatagcagggtgttggagaggtacatcctggaagctcgcgaagctgagaatgtgacaatgggatgtgcccaaggctgcagtttttccgaaaatattactgtaccagacaccaaagtgaacttctacacttggaaacggatggatgtcgggcagcaggcccttgaagtctggcaaggcctcgctctgctcagcgaggctatcctgaggggtcaggcgcttctcgctaatgcctcacagccctcagagacgccccagcttcacgtggacaaggccgtgtcttccctgcggtccctgacttcactgttgcgtgcacttggcgcccagaaagaagcaatgagtctccctgaggaggccagtccagccccactcaggacattcaccgtagacacattgtgtaagctatttaggatatattctaattttctgcgcggaaagttgaccctgtacacaggagaagcctgtagaaggggagatcgt

SEQ ID NO: 15946 - DNA, 618 bp, Artificial Sequence
  derived and/or modified sequence
atgtgcgaaccggcacctcccaagccaactcagagtgcttggcattcatttccagaatgtcctgcgctcctgctgcttcttagcctactgctgttgcctcttggtctgccagtgctgggagcaccaccacgcctcatctgcgactcaagggtgttggaaaggtatatccttgaggcaagagaggccgagaacgttaccatgggatgtgcgcagggctgcagcttttccgagaatataacagtgccggacacaaaagtgaacttttacacctggaaaagaatggatgtcggccagcaagcactggaagtgtggcagggccttgcgctgctttcagaggctattctcagaggccaggcattgcttgcaaatgcttcccagccatctgagactccacagttacacgtcgacaaagccgtatcttcccttcggagcctaacgtctctgctgagggcacttggagcacaaaaagaggcgatgtccttgcctgaagaggcgtctcccgcccccctgcgtacattcaccgtggacacattgtgtaaacttttcaggatctacagcaacttcttacggggaaagctcactctgtatactggagaagcctgccggaggggagaccgc

SEQ ID NO: 15947 - DNA, 618 bp, Artificial Sequence
  derived and/or modified sequence
atgtgcgaacctgctcctccgaagccaactcagagcgcgtggcactcgtttcctgaatgccccgcgctgcttctgctgctctctctgctgctcctgccgctcggcctgccagtgctgggagccccaccacgcttgatctgcgattcaagagtgctcgagcgctacattctggaagctcgggaagccgagaacgtcactatgggatgtgcacagggatgctccttttcggaaaacatcacggtcccagacaccaaagtgaacttctacacttggaagagaatggacgtggggcagcaggccttggaggtgtggcaaggtctggcactgctcagcgaggctatcctgcggggccaggcgctgctggctaatgcatcgcagccctcagagactccgcagctgcacgtggacaaggctgtctcgtcccttcggtcacttacctccttgctgcgggccttgggagctcagaaggaagcaatgtcgttgccagaggaagcctccccggccccgttgcgcactttcacggtggacaccctgtgcaaactcttccgcatctacagcaacttcctgcggggaaaactgaccctctacaccggtgaggcctgccgacgcggagacaga

SEQ ID NO: 15948 - DNA, 618 bp, Artificial Sequence
  derived and/or modified sequence
atgtgcgagccggccccgcctaagccgacgcaatccgcgtggcactcgttcccggaatgcccagcactcctgctgctcctctcgctgcttctgctgcctctcggccttccagtgctgggcgctccgccaaggctgatctgcgacagcagagtgctggaacggtacatccttgaggcacgcgaagctgaaaatgtcactatggggtgcgcacagggatgttctttctcggagaacatcaccgtgccagatactaaagtgaatttctatacgtggaagcggatggacgtcggacaacaggcgctcgaggtgtggcagggactcgcgctgctgtcggaggctatactccggggtcaagcactgctggcgaacgcctcccaaccaagcgaaactccccagctgcatgtggacaaggccgtgtcatcccttcggagcttgacgtccctgttgagagcgctgggagcccagaaggaagcaatgtccctgccagaagaagcgtcacctgctccgctgcgcacctttaccgtcgatactctgtgtaagttgttccggatctactcaaactttcttagaggcaaattgaccctgtacactggtgaggcttgccgcaggggagacagg

SEQ ID NO: 15949 - DNA, 618 bp, Artificial Sequence
  derived and/or modified sequence
atgtgtgagcctgccccgccaaaacccacccaatccgcttggcactcgtttcctgaatgcccagcactgctgctcctgctctcactgcttctccttcctctgggccttccagtgttgggcgcgccgcctcgcttgatctgcgattcccgagttctcgagagatacattctggaggctagggaggcggaaaacgtgaccatgggatgtgcgcagggatgctcgttcagcgagaatatcaccgtgccggatacgaaggtgaacttctacacttggaaacgcatggacgtcgggcagcaagcgctcgaggtgtggcaaggattggctctcctgtcggaggcgatccttcgcggacaggcactgttggccaacgcaagccagccctccgaaaccccgcaactgcatgtagacaaggcggtgtcctctctcaggtcactgacctccctgttgcgagccttgggagcccaaaaagaggcaatgtcgctgccggaagaggcctcccccgccccgctccgtacctttactgtggacactctctgcaagttgttcagaatctactccaatttcctgagaggcaagctgaccctgtacacgggagaagcctgcaggagaggtgacaga

SEQ ID NO: 15950 - DNA, 618 bp, Artificial Sequence
  derived and/or modified sequence
atgtgtgagcctgcgcctccaaagccaacccaatccgcatggcatagcttccccgaatgcccagcgctccttcttcttctgtcccttctcctccttccacttggactcccagtgctcggcgcaccacccagactcatttgcgactccagagtgcttgagcgctacatccttgaagcgagagaggccgaaaacgtgaccatgggctgtgcgcaaggatgctcgttctctgaaaacatcactgtcccagatacgaaagtcaacttctatacttggaagaggatggatgtgggacaacaggctttggaagtatggcaaggactggccctgctctccgaggcaattctgcgcggccaagcacttctggcaaacgcgtcgcagccttcagaaacccctcagttgcatgtggacaaagcagttagctcgctgcgaagcctgactagcctccttcgcgcactcggagcccaaaaggaagcaatgtcccttcctgaagaagcatcgccagcgcccttgcggacctttactgtggacaccttgtgtaagctgtttaggatttactcgaattttctccgagggaagttgactctgtacaccggtgaggcatgtagacgcggtgatagg

SEQ ID NO: 15951 - DNA, 618 bp, Artificial Sequence
  derived and/or modified sequence
atgtgtgagccagcaccgcccaagccaactcaaagcgcctggcacagcttccccgagtgccccgcgctgctgctgcttctctcactcctgttgctgccgctggggctcccggtgctgggtgcaccgccgcggctgatttgcgattcgcgggtcctcgaacgctacatcctcgaagccagagaggccgaaaacgtcaccatgggatgcgcgcagggctgtagtttcagcgaaaacatcaccgtaccagatactaaggtgaacttctacacctggaagcggatggacgtcggacaacaggctcttgaagtgtggcagggactcgccttgctgtccgaggcgatcctccggggacaggcactgctcgcaaacgcgtctcaaccgtcggaaacccctcaactgcatgtggataaagccgtgtcctcactccgaagcctgacttccctcctccgcgcgctcggagcgcagaaagaggccatgtcactcccggaggaggcatctccggcgccactgagaacgttcactgtcgacactctgtgcaaattgttccggatctactcaaatttcctgaggggtaaactgacgctgtacaccggtgaggcgtgccggcgcggtgatcgc

SEQ ID NO: 15952 - DNA, 618 bp, Artificial Sequence
  derived and/or modified sequence
atgtgcgagccagccccccctaaacctacgcagagtgcctggcacagttttcctgagtgtcccgcactcctgctgctgctgagtcttctactgctaccgctgggcctgccggtcttgggagcccccccccgtttgatttgtgattcccgagtgctggagcggtacatcttagaggcccgtgaagctgagaacgtgacaatgggctgtgcccaggggtgctcgttcagtgaaaacattaccgtgcccgatacaaaagtgaacttttacacttggaagcgcatggatgtcggtcagcaagcactggaagtgtggcagggtctagctctgttgtcggaagccatactgcgaggacaagcattgctcgctaacgccagtcagccctcagagacgccgcagttgcatgtcgataaagctgtgagttcgctgcgctctcttacctccctgctcagggctctgggagcccaaaaagaagctatgagtctgccggaggaggcatcaccggcgcctctgagaacgtttacagtagatacattatgtaaactgtttaggatctattcaaatttcctccggggcaagctgactctgtacacaggcgaggcatgtcgcaggggagaccgt

SEQ ID NO: 15953 - DNA, 618 bp, Artificial Sequence
  derived and/or modified sequence
atgtgcgaacccgcaccccccaagcctacccagtctgcctggcattcctttccagaatgcccggccctgctactgctcctgagtctcctgctgctgcccctcggtttaccggtattgggggctcctcctcggcttatttgtgacagtcgcgtcctcgaacgctatatcttggaggctagagaagcagagaacgtgacaatggggtgcgctcagggctgcagtttttccgaaaatattactgtacctgacactaaagtgaacttttacacgtggaaacgcatggacgtgggacagcaggccctggaggtgtggcaaggattggcattgctcagcgaagccattctgagaggccaagcccttctggccaatgcctcccagccgtccgaaacaccccagctccatgtggataaggctgtgagttctctgagatctttgacatcgctgttgcgggccctcggcgctcaaaaggaggccatgagtctccccgaggaagccagccctgccccactgagaacctttactgttgatacactgtgcaagctgttccgtatctacagcaactttctacggggtaaactgacactctatacgggcgaggcgtgtaggagaggggacaga

SEQ ID NO: 15954 - DNA, 618 bp, Artificial Sequence
  derived and/or modified sequence
atgtgtgaacctgcgccacctaagccaacccaatctgcatggcacagctttcccgaatgccctgccctgctcctgctcctcagcctgctgttgctgccattgggactccccgtccttggtgccccgccacggctcatttgcgactcaagggtacttgaacgatacattctcgaagcgcgcgaagctgaaaatgtcaccatggggtgtgcgcaaggctgttcattctcggagaacataactgtcccggatacgaaggtgaacttctacacttggaagcgaatggacgttggtcaacaagcgttggaagtgtggcagggtcttgccctgctgtccgaagcaatccttcgcggccaagcactcctggcgaacgcaagtcagccatccgagactccccaacttcacgtggacaaggcagtgagctcgctgaggtcccttactagcctgcttagagcactcggggcacagaaagaggccatgtcgctcccagaggaagcctccccagccccacttcgcacgttcaccgtggataccctctgtaaactctttagaatctatagcaatttcctgcggggaaaactcaccctgtacactggtgaggcctgtagaaggggagatcgt

SEQ ID NO: 15955 - DNA, 618 bp, Artificial Sequence
  derived and/or modified sequence
atgtgtgaacccgcaccgccgaagccaacgcaatccgcatggcactctttccctgagtgcccggctttgctgctgctgctgtccctcctgctcctgccgctgggactgccagtgctcggagctcctccgcgccttatctgcgactcacgagtgttggagcgctacatcctggaagcgagggaagccgagaatgtcactatggggtgtgctcaaggatgctccttctcggagaatatcaccgtgccggatactaaagtcaacttctacacttggaagagaatggatgtgggacaacaagcgttggaagtctggcaaggactggcgcttttgtccgaggccatcctccgcggccaggcgctcctggccaatgcgtcgcagccatccgaaacccctcagcttcacgtggataaggccgtgagctccctccggtcgctcacctcgctgttgcgcgctctgggcgctcagaaggaagccatgtccctgcctgaggaagcctctccagctccactccgtactttcactgtggacactctgtgtaagctcttccggatctacagcaacttcctgcgcggaaagctgacgctgtacactggcgaagcatgtagacgcggcgaccgc

SEQ ID NO: 15956 - DNA, 618 bp, Artificial Sequence
  derived and/or modified sequence
atgtgcgagcctgccccgcccaagcccacacagtcggcctggcattcgttcccagaatgtcctgccttgctgctgctcctctccctgctgctactaccgctgggattgccagtccttggagcacctccgcgccttatttgtgattcccgggtcttagagcggtacatcctggaggcccgggaggctgaaaacgtaactatggggtgcgcacagggctgttcattcagtgagaacatcactgttcccgatacaaaagtgaatttctacacttggaaacgtatggacgttggtcagcaggccctggaggtgtggcaaggcctcgccctgctctccgaggcgatactgcgaggtcaggcactgctggcaaatgcctcccagccctcagagacgcctcagttgcatgtggacaaggccgtatctagtctgagatcgctgacatccctcttaagagctctaggagcccagaaagaggcaatgtccctccctgaggaagccagcccggccccattgcgaaccttcactgtggacacactgtgcaagctatttcggatttattcgaacttcttgcgtggaaaattgacactatacacgggagaggcctgccgacgaggagacagg

SEQ ID NO: 15957 - DNA, 618 bp, Artificial Sequence
  derived and/or modified sequence
atgtgcgaaccagcaccgccaaagccaactcaatctgcctggcattccttcccagaatgcccggctctgctcctattgctttcactcctcttgctgccgttgggccttccagttttgggagctcctccacgactaatttgtgattccagagtcttagaacggtacatccttgaagcaagagaggcagagaacgtcacaatgggatgcgcacaaggttgttccttctcggaaaacattaccgtcccggatacaaaggtcaacttttacacctggaaaaggatggacgttgggcagcaggcactcgaagtgtggcagggactcgctttgctcagtgaagctatcttgcgaggacaggctcttctggctaatgcgagccaaccatcggagacgccacaactccatgtagataaagccgtttcatcgcttagaagtttgactagtctgttacgcgctttgggtgcccaaaaagaagccatgtcgcttcctgaagaggcgtcaccagcaccattgaggacctttacagtggacacgctttgtaaattgttccgtatttattccaattttttgcgaggaaaacttacattgtacacaggtgaagcatgtcgtagaggagatcgt

SEQ ID NO: 15958 - DNA, 618 bp, Artificial Sequence
  derived and/or modified sequence
atgtgcgagcccgctcctccgaagccgacgcaaagcgcttggcacagctttcctgaatgccccgcacttttattgctgctgtcacttcttcttctcccgcttgggttacctgtacttggggctcctccgagacttatatgtgatagccgcgttctggaaagatatatcctggaagccagagaagccgaaaacgtgaccatgggctgtgcccaaggttgcagtttcagtgaaaacataacagtcccggatactaaggttaatttctatacttggaaacgcatggacgttggacagcaggcgctggaagtttggcagggtctcgctcttctgagcgaagccattcttcggggtcaggcattgcttgcgaatgcttcacagcctagtgagacgccacagttgcatgtcgataaagcagtttcctcactgagatcccttacttctctgcttagagctttaggtgcacaaaaggaagcgatgagtctgccggaagaggcaagccctgcgccgttacgcacctttacggttgataccctttgtaaactgtttcgtatttactctaattttttaagaggcaaacttacactttacaccggagaagcgtgtcgacgaggggatcgt

SEQ ID NO: 15959 - DNA, 618 bp, Artificial Sequence
  derived and/or modified sequence
atgtgcgagccggcacctccaaagcccacgcagagtgcttggcactctttccccgaatgccctgctctgcttctcttattaagtttgcttctcctacctctgggacttcccgtattgggagcccctccacgtttgatatgtgattctagggtgttagaacgctacatactcgaagcgcgggaagccgagaacgtgactatggggtgcgcccaggggtgttctttttccgaaaacataacagtccccgatactaaggtaaacttttatacttggaaaaggatggacgtggggcaacaggccctcgaagtctggcaggggctcgctcttctgtccgaagccatactaagagggcaggcacttcttgctaatgccagtcagccatcagaaactccccagctccatgttgacaaagccgtgtctagtcttcggagtctgacttctcttctgcgggctctcggagcccagaaagaggctatgtcactccctgaagaagctagtcccgcacctttgcgcacatttacagttgatacattgtgtaaattatttagaatatattctaactttctaagaggaaaattgactctctacacaggggaggcctgcagaaggggagatagg

SEQ ID NO: 15960 - DNA, 618 bp, Artificial Sequence
  derived and/or modified sequence
atgtgcgagcccgccccgccgaagccaacgcagtcggcctggcactcctttcccgaatgccctgccctgctgctcctgctgtccctgctcctcctgccgctgggactgcctgtgctcggagccccgccgcgtttgatctgcgattcacgcgttctggagaggtacattcttgaagcccgagaagcggagaacgtgaccatgggatgtgcccaaggatgttccttctcggagaatatcaccgtgccggacactaaagtcaacttctatacttggaagcgcatggatgtgggtcaacaggcacttgaagtgtggcaagggctggccctgctgtccgaagccatcttgcgcgggcaggcgctgctcgctaacgcgtcccagccgagcgagactcctcagttgcatgtggataaggcggtgtcctcgctgcgcagcctgacctctctgctgcgggcactcggagctcaaaaagaggctatgtcgctgccagaagaagcctctccagcgcccctccgcacgttcactgtggatactctgtgcaagctgttccggatttactctaatttccttcgcggaaagctgactctgtacaccggcgaagcatgtagacggggggatagg

SEQ ID NO: 15961 - DNA, 618 bp, Artificial Sequence
  derived and/or modified sequence
atgtgtgaaccggcacctccaaagcccacccagtcagcctggcactcatttcctgagtgtccagccctcctcctgttgttgtctctgctcctcctccccctcggtttgcctgtgctgggagctcctcccagacttatctgtgattcccgcgtgttggaacggtacattttggaagcaagggaggcggaaaatgtgaccatgggctgcgcacaagggtgctcgttcagcgagaacataaccgtgccggacactaaggtcaacttttacacctggaaacggatggatgtcggacagcaagcactggaagtgtggcaaggattggcgcttctgtccgaggccattctcagaggtcaagctctgttggcaaacgcaagccagccaagcgaaactccacaactgcacgtggacaaggcagtttcgtcactccgatcgcttacgagcctccttagagcactcggagcccagaaggaagccatgtcgcttcccgaagaagcatctcctgccccgcttcggactttcactgtcgatacgctttgtaaactgtttcggatctactcgaattttctccgcggaaagctgacgctttacacgggagaagcatgtcggcgaggggatcga

SEQ ID NO: 15962 - DNA, 618 bp, Artificial Sequence
  derived and/or modified sequence
atgtgtgagccagcgccaccaaaacccacacagtctgcttggcacagtttccctgaatgccccgctctgctactgctcctttcactcctgctgctcccattagggctgccagttctgggggctcccccgagactcatctgcgactcacgcgttctcgagagatacattctcgaggccagagaagccgagaatgtgactatggggtgtgctcagggatgctctttcagtgaaaacatcaccgtgcccgatacgaaggtgaatttctatacctggaagcggatggatgttggacagcaggctctcgaagtctggcaaggcctggccctcctgtcagaagcaattctgagaggccaagcattgctggccaacgccagtcagccttctgaaacaccccagttgcacgtggacaaagcggtgtcatcccttagatctctcacaagcctgcttagggctcttggtgctcagaaagaggcgatgagcctccctgaggaggcttcccctgcgcctctacggactttcacagtcgatacattgtgtaaattgttcaggatctatagcaatttcctaaggggcaaattgaccctgtatacaggagaagcatgtagacggggagatagg

SEQ ID NO: 15963 - DNA, 618 bp, Artificial Sequence
  derived and/or modified sequence
atgtgcgaacctgcccccccaaagcctactcagtctgcttggcactcttttccggagtgcccagcattgctactgctgctgagcttacttctgttgccgttgggactgcctgtacttggagcaccaccccggttgatttgtgacagtcgggtgctcgaacgatatatcctggaggcccgcgaggccgaaaacgtgacaatgggatgtgcacaagggtgttcgttttctgagaatataaccgtgcctgacactaaggtgaacttttatacgtggaaaaggatggatgtgggacagcaggctctcgaagtttggcagggcttggccttgctgtccgaggcaatcctgagaggccaggctttactggccaatgccagccaaccaagcgaaacccctcagctgcacgtggataaagccgtctcctcactgcgttctttgacatctttgttgagagctctaggggcccagaaagaagccatgtccctcccagaggaagcctccccagctccattgcggactttcaccgtggacactctctgtaaactgtttcggatttactccaatttccttcggggcaaattaacgctgtataccggtgaggcttgccggcggggagacaga

SEQ ID NO: 15964 - DNA, 618 bp, Artificial Sequence
  derived and/or modified sequence
atgtgcgagccagccccgccgaagccgacgcaatcggcctggcattcattcccggaatgcccggccctgctgttgttgctgtccctgctcctgctcccactgggattgcctgtcctcggagctccgccgcgcctgatctgcgattcgagagtgctggaacggtacatcctggaagccagggaggccgaaaacgtcactatgggatgtgcacaagggtgctcattctctgagaatatcacggtgcctgatactaaggtgaacttctacacctggaagcgcatggacgtggggcagcaggctctcgaagtgtggcagggacttgcacttctgagcgaggcaattctccgcggacaggccctcctggccaacgcttcgcaaccatcggaaactccacagctccatgtcgataaggccgtttcatcgctgcggtcccttaccagcctgttgcgcgccttgggagcgcagaaggaagcaatgtctctcccggaggaagcgtccccagcccccctgcgcacttttacggtggacaccctgtgcaagctctttcgcatctactcaaactttctcaggggtaaattgaccctctacactggagaagcgtgtcggaggggagataga

SEQ ID NO: 15965 - DNA, 618 bp, Artificial Sequence
  derived and/or modified sequence
atgtgcgaaccagccccgcccaagccgacccagtcggcatggcattcattcccggagtgcccggccctgctcctgttgctgtcgctgctcctcctcccacttggtctgccagtcttgggcgcgccacctcgccttatttgtgactcaagagtgctcgaacgctacatcctggaagcccgggaagccgagaatgtgactatgggatgcgcgcaaggatgcagctttagcgaaaacatcaccgtgcctgataccaaagtgaacttctacacttggaagaggatggacgtcggacaacaggccctggaagtttggcagggcctggcgctgctgtcggaggcaatccttcggggacaagctctgctcgcaaatgcttcccagccctccgagactccgcagttgcacgtggacaaggccgtctcatcccttcgctctctcacttcgctgttgcgggccctcggagcacagaaagaggctatgtccctcccggaagaggcgagcccggcgcctctgagaaccttcactgtggatacgctgtgcaagctgtttcgaatctacagcaacttcctcagagggaagctgaccctgtacaccggcgaagcctgtcgccggggggaccgc

SEQ ID NO: 15966 - DNA, 576 bp, Artificial Sequence
  derived and/or modified sequence
atgggctcctgtgaatgtcctgcacttctgcttcttctgtcccttctcctcctgccactgggcttgcctgtgctgggggcacccccaagactgatctgtgattccagagtgcttgaacgctatattcttggagcgcgagaggccgaaaatgtgaccatgggatgtgcagaaggatgctcgttttccgaaaacatcaccgtgccggacactaaagtgaacttctacacgtggaagagaatggacgtgggacagcaggccgtcgaagtgtggcaaggactggcccttctttccgaagccattcttcgggggcaggcgctgctggcaaattcctcgcaaccctcggaaacccttcaactgcatgtggataaggcagtgtcctcccttagatcactgacctccttgcttcgagcactcggtgcacagaaagaagcaacttcgctgcccgaagccaccagcgccgcacctttgcgcaccttcactgtggatactctctgtaagctgttcagaatctactcgaacttccttcgcggtaagctgactctgtacactggagaggcttgccgtaggggggatcgg

SEQ ID NO: 15967 - DNA, 576 bp, Artificial Sequence
  derived and/or modified sequence
atggggagctgtgaatgcccggctctccttcttctcctgtcgttgctccttctgccgctaggtctcccagttctgggagcacccccccggttaatctgcgatagcagagtccttgagcggtatattctgggagccagagaggccgagaacgtaaccatggggtgcgctgagggatgtagcttctcagagaacattactgtgcctgacaccaaggtaaacttttatacatggaagagaatggatgttggccagcaggctgtggaggtatggcagggcctcgccctactgtctgaggcaatacttcgcgggcaagcgctcctggccaacagcagtcagccttccgagaccctgcagctccatgtagacaaagccgtgagctccttacgctccctaacaagtctgcttagagcacttggagcccagaaggaggccacttctctcccagaggcgaccagtgccgctcccttgaggacttttaccgttgacaccctttgtaaactattccggatatacagtaacttcttgaggggtaaattaacgttgtataccggcgaggcttgcaggaggggggataga

SEQ ID NO: 15968 - DNA, 576 bp, Artificial Sequence
  derived and/or modified sequence
atgggctcttgtgaatgtccagcactcctactcttgctaagcttgctgctcctacccttagggctccccgttttgggcgcccctcccagactcatatgtgattctagagttcttgagcggtacatactgggcgcacgcgaggccgaaaacgtcacaatgggatgtgctgagggttgttccttctcggaaaatataacggttccggacaccaaggttaatttttatacttggaagcgaatggacgtgggtcagcaggcggttgaagtctggcaaggactcgccctgcttagcgaggcgatcctgcgaggccaggcccttttggccaactcatcacaaccatcggaaaccttgcaattgcatgttgataaggcagtatcttccctccgatcattgacatccctactacgggcattgggcgctcaaaaagaagcgactagcctcccggaagccacctccgcggcgccgttgcgtactttcacggtcgatacactgtgcaaactgttcaggatctactccaactttttgcgagggaaactgaccctttatactggtgaagcttgccggaggggtgaccgt

SEQ ID NO: 15969 - DNA, 576 bp, Artificial Sequence
  derived and/or modified sequence
atgggctcatgcgaatgtcccgcactgttgctgttactcagtttgctgctccttccgctgggactacctgtgctgggtgctcctccgcgcctgatatgtgatagccgcgtgctggaacgctatatcctgggggccagggaggccgagaatgtgaccatgggatgtgcagaaggttgctcgttctccgagaacattaccgtgccagacaccaaagtaaacttctacacatggaaaaggatggacgtcggacaacaggccgtcgaggtttggcagggcttggcgttgctaagtgaagctatcttgcgcggtcaggcgctgctggctaacagttcccagccttcggaaactctccagctccacgtagataaagccgtttctagcctgagaagtcttacctcgctccttagggcacttggtgcacagaaggaagccacatcccttccagaggcaactagtgcagccccactcagaacattcaccgtggatactctgtgcaagttgtttcgcatctactctaatttcctgagaggcaagctaacactgtacactggagaggcctgcaggcgtggggataga

SEQ ID NO: 15970 - DNA, 576 bp, Artificial Sequence
  derived and/or modified sequence
atgggatcgtgcgaatgcccggccctgctcctgctcctgtcactcctgctgctcccactcggactgccagtcctcggcgcgccgccgaggctgatctgtgactcgagagtcctcgaacggtatatcctgggggcgagggaggcggagaacgtgactatggggtgcgctgaggggtgctccttctccgagaacattactgtcccggacaccaaggtgaatttctatacctggaagcggatggatgtcggccagcaggctgttgaagtttggcagggattggcactgttgagcgaggccatccttcggggccaggccctgctcgctaattcctcacagccgagcgaaactttgcaactccacgtcgataaggccgtctccagcctgaggtcactcacttcgctgctgcgcgcgctgggggcgcaaaaggaggcgactagcctcccggaagctacgtccgccgccccactgcggacttttaccgtggacaccctgtgcaagctcttcagaatctacagcaatttcctgcgaggaaaactgaccctctacactggagaagcctgcagacgcggtgaccgc

SEQ ID NO: 15971 - DNA, 576 bp, Artificial Sequence
  derived and/or modified sequence
atggggagttgcgaatgtcctgcactgcttctgctcctttccctgctcctcctgccactggggcttcccgtactaggagcccccccaaggctaatctgtgattcaagggtcctggagcgatatatactaggagcccgggaggctgagaatgtgacaatgggatgcgccgaggggtgcagtttctctgagaatatcacagtacccgatacaaaagttaatttttatacatggaaacggatggatgtgggacagcaggcagtggaggtttggcaaggactggccctgctcagtgaagctattctaagggggcaggcactgctggccaattcttcacaaccaagtgaaactctccagctgcacgtcgataaagctgtatcttccctccggtcattgacttctctgctcagggccctcggggctcaaaaagaggccacatctctgcccgaagctacttccgctgcccctctcaggacatttactgtcgatacactctgcaaactgtttagaatctattcgaacttcctgcgtggaaaactcacactttatactggagaagcttgtcggcggggggatcgc

SEQ ID NO: 15972 - DNA, 576 bp, Artificial Sequence
  derived and/or modified sequence
atggggagctgtgagtgccccgccctcttgcttctgctgtctcttctcctcctgcccctgggtctgccggtgctgggcgcccccccgcggctgatctgtgactccagagtgctcgaaagatacattttgggtgccagggaagccgaaaacgtgactatggggtgtgcggaagggtgcagcttctcagagaatattaccgtgccagacacaaaagtcaatttttatacctggaaacggatggacgtcggacagcaggccgtggaggtgtggcaaggactcgcccttctctctgaagctattctccgaggccaggcactgctcgcaaattcctcccagccatccgaaaccttgcagctccacgttgataaagcggtgtcatccttgaggtcactgacctcactgcttcgcgctctcggagctcagaaggaagccacaagcctgcctgaagcaacctccgccgctccactgagaacttttaccgtggacaccctgtgtaaattgtttaggatttactctaattttctgaggggaaaactgacactgtatacaggagaggcctgcaggcggggtgatcgg

SEQ ID NO: 15973 - DNA, 576 bp, Artificial Sequence
  derived and/or modified sequence
atgggtagctgcgaatgtccagcattgctcttgttgttgtctttgttgttgctgccactcggactaccagttttgggcgcacctcctagacttatctgtgattctagagtcttggaaagatacatattgggtgccagagaggccgagaacgtcaccatggggtgcgccgaaggatgctctttttctgagaatatcacagttcctgacaccaaggtcaatttctacacgtggaagaggatggacgttggacagcaagccgttgaagtatggcaaggtcttgcactcctcagtgaggcgatcttgcggggccaggcactactcgccaattcttcgcagccgagcgaaactttgcagctacatgttgacaaggctgtctcttcactcagatcgttgacttccctgttgagagcccttggagctcagaaggaagctacctcactaccggaagccacctcagctgctccactacgaaccttcaccgtagatactctctgtaaattgttcaggatttattccaacttcctcagagggaaactcacactatacactggtgaggcctgcaggcgtggagatcgt

SEQ ID NO: 15974 - DNA, 576 bp, Artificial Sequence
  derived and/or modified sequence
atgggcagctgcgaatgccctgcgctgcttcttctactgagcctgctccttttacctttggggctgcctgtactcggcgccccgccgaggctcatctgcgattcaagagtgctcgagaggtatatactgggggccagagaggccgaaaatgtaacgatgggctgtgccgaaggatgcagcttctcagaaaacattacagtgccagatactaaagtgaacttctatacctggaagagaatggatgttggacagcaggctgtcgaagtctggcagggattggctctcttatctgaagccatcctgcgcgggcaggccttgctggcgaatagctcccagccaagtgaaacattacagctgcatgttgacaaggctgtgtcatctctgcgcagtctcacaagcctgttacgtgcccttggagctcaaaaagaggcaactagcctacccgaggcaactagtgctgcaccattgcgcactttcactgtggatacactgtgcaaactgttccgtatttactctaacttccttcgcgggaagttaacactgtataccggcgaggcgtgtcggcggggagatcgg

SEQ ID NO: 15975 - DNA, 576 bp, Artificial Sequence
  derived and/or modified sequence
atgggtagctgcgaatgcccagccctgcttctactgctctcgcttctgctgcttcccctgggactcccagtgttgggcgcacccccacgtcttatctgtgatagcagagtgctggaaagatacattctcggtgcgagggaagccgagaacgtgaccatgggatgcgctgagggctgcagtttcagtgaaaacatcaccgtcccagacacaaaagtcaacttctacacttggaaacgcatggatgtgggccagcaggcagttgaggtgtggcaagggctggccctgctgagcgaggcaatccttagggggcaggcactgttggcaaacagctctcagcccagtgaaacactacaattacatgtggacaaagcagtgtcatcactgcgctctctgactagcctccttagggcattgggtgctcaaaaagaagctacctcactgcctgaggcaacgtcagcggcaccgttgcgcacctttacagtggacacactgtgcaaactcttccgcatctattcaaactttcttaggggcaagttgacactttacacaggagaagcatgccgcagaggagacaga

SEQ ID NO: 15976 - DNA, 576 bp, Artificial Sequence
  derived and/or modified sequence
atgggatcctgcgaatgcccagcgctgcttttgttattaagtcttcttctgctcccactcgggctcccagtgttaggagcccccccaagattaatctgtgattcacgcgttctggaaagatatattcttggggcgagagaagccgagaacgtgacaatggggtgtgctgaagggtgctctttttccgaaaatatcactgttcccgacacaaaagtcaatttttatacttggaaaaggatggatgtcgggcagcaggctgtcgaagtttggcaaggactagccctgttatcagaggctatcctacgaggacaggcactgctagcaaactcttcccagccctcagaaactcttcagctccatgtagataaagcagtgtcctctctccgaagtctaacgtctttactgcgagcccttggggcacagaaggaagctacttcgctcccagaagccacatccgcagctcccctcagaacatttacagtcgacacattgtgcaaactttttagaatttactccaatttcctccggggaaaactaactctatacactggagaagcgtgtagaaggggggataga

SEQ ID NO: 15977 - DNA, 576 bp, Artificial Sequence
  derived and/or modified sequence
atgggctcgtgcgaatgccccgctctgctactgttactttctctgcttcttttacctctgggattacccgtgctgggcgctcccccgaggttgatctgtgattccagggtacttgagcggtatatcttgggagcgagagaagccgagaatgttaccatgggatgcgccgaggggtgttccttcagtgaaaacatcacagttcctgacaccaaagtgaatttctatacttggaaaagaatggacgtggggcaacaggccgtggaagtgtggcaaggtctggctctgctctcagaggcgatcctgcggggtcaggccctcctggctaatagttcccagccaagcgaaacattacagctacacgtggacaaggccgtttcctctttgaggagtctgacatcgctgctccgcgccctcggggcccagaaggaagccacatcattgcctgaagctacctcagccgctccccttcgtacgttcactgtggacacactgtgtaaactgttcaggatttatagtaattttttgcgtggaaaactgacgctttatactggcgaggcctgccggaggggggaccgg

SEQ ID NO: 15978 - DNA, 576 bp, Artificial Sequence
  derived and/or modified sequence
atggggtcttgtgagtgtccagctctgctgctcttactgagcttgctgctcctgccattgggactgccagtgctgggcgctcctccccggctgatttgcgattctcgggtcctggagaggtacatactgggggcaagggaagccgagaatgttacaatgggttgtgcagaggggtgctcctttagcgagaatattacagtgccagacactaaagttaacttctacacctggaagcgtatggatgttggccagcaggctgtggaggtctggcaaggcctagctctgctgtcagaggccatactaagaggacaggctctcttagctaacagtagccagccatctgaaaccctacagctacacgttgacaaggccgtgtctagccttaggtctctgacatctctcctgcgcgctttgggggcccagaaagaggccacaagcctgcctgaagccacctcagccgccccactgcgaacatttaccgttgatactttgtgtaagctgttccgcatctatagcaattttttgaggggaaagctgaccctgtacacaggcgaggcttgcaggaggggcgatcgg

SEQ ID NO: 15979 - DNA, 576 bp, Artificial Sequence
  derived and/or modified sequence
atgggcagctgcgaatgcccggccttattattactattaagcctattactcctgcccttgggtttaccagtattgggcgcacccccgcgcctgatttgcgattcccgcgttctcgaacgctacatcctgggagcgagagaggccgagaacgtgacaatgggctgtgcagaaggctgttccttctccgaaaacataacggttccagatacaaaagtaaacttttacacgtggaaaaggatggatgtggggcagcaagcggttgaagtctggcaaggtcttgcacttctctccgaagcgatccttcgtggccaggcgctgctggcaaactcgtctcagccatccgaaaccttacaattgcatgtcgataaagcggttagcagccttagaagcttaacaagcttacttcgagcgctgggtgcacaaaaagaagcgacgtcgttaccggaagctacgtccgcggcaccgcttcggacattcactgtagatacactgtgcaaattgtttcggatctatagtaactttttacgaggaaagttaacattgtatacaggcgaagcgtgtagaagaggggatagg

SEQ ID NO: 15980 - DNA, 576 bp, Artificial Sequence
  derived and/or modified sequence
atgggaagctgtgagtgtccagccctgttgctgctattgtcactgctgttgctccccctgggccttcccgtgcttggggccccgccccgcctcatttgcgactctcgggtgctcgaaagatacattctaggagcaagggaggccgaaaacgtgaccatgggctgcgctgaaggttgttcattctccgagaacataactgtccccgatacaaaagtgaacttctatacctggaagcgcatggacgtgggccagcaggcagtggaggtgtggcaagggctagcccttctgagcgaagctattctccgcgggcaggctctgctcgcgaatagcagccagccctcagagaccctccagttgcatgtggataaggctgtaagcagtctcaggtcgctcacgtccttgctacgagctctgggggcgcaaaaagaggccacttctctcccggaggctacatctgccgcgccacttcgtacatttacggtggacaccctgtgcaaactgttccggatttactccaactttctgcgcggcaaattgactctatacaccggggaagcatgtaggagaggcgaccga

SEQ ID NO: 15981 - DNA, 576 bp, Artificial Sequence
  derived and/or modified sequence
atggggtcatgtgagtgcccagcccttctgcttctgctgtcgctcctgcttcttcctctgggactgcccgttctcggagctcctcccagacttatatgtgattccagagtgctggaacggtacattcttggagcccgcgaagcagaaaacgtcacgatgggatgtgcagaaggatgttccttctcagagaacattaccgtgcccgacactaaagtgaatttctacacctggaagagaatggatgtaggacagcaggcagtggaggtgtggcagggtctggcactcctttcagaggccattctgcgaggacaagcactcctggctaatagcagccagccttccgaaacgctccaactgcatgtggataaggccgtctcatcgcttcgttcactgacttccctgctccgggcacttggagctcaaaaggaggcgacttcactgcctgaagccacttccgctgcaccactccggacctttactgtcgataccctctgtaaactctttagaatctactccaactttctccgcggtaagctcaccctgtatacgggtgaggcatgcagaaggggcgatcgt

SEQ ID NO: 15982 - DNA, 576 bp, Artificial Sequence
  derived and/or modified sequence
atgggatcatgcgagtgtcctgcacttcttctccttctctcccttctcttgcttcctctcgggctgcctgtgcttggtgcacctccacggcttatatgtgacagcagggtgctggaacgttatatccttggcgccagagaagccgagaatgttaccatgggatgtgccgaaggctgctcattttcagagaatatcaccgttccagacactaaagtgaacttctatacttggaagcggatggatgtgggccagcaggcagtggaagtgtggcaaggactggcgcttctgagcgaggcaattttgaggggccaggcactgctcgctaacagttctcaaccaagcgaaactcttcaacttcatgtggataaagccgtaagctcgctgcgctccctgacttcgctgctgcgcgcactcggagcgcagaaagaagcaacctcgctcccggaagcgacctcggctgcaccccttagaacttttacggtggacaccttgtgcaaactgttcagaatctactccaactttttgcggggcaagctcacgctgtacactggcgaggcttgtagacgcggagatcgg

SEQ ID NO: 15983 - DNA, 576 bp, Artificial Sequence
  derived and/or modified sequence
atgggatcatgtgaatgtccggcgcttcttctgctgctgagcctgctgctcttgccactggggttgcctgtgctgggagcgccgccgcgactcatctgtgactcgagggtgcttgagaggtacatcctgggtgcacgcgaggccgaaaacgttaccatggggtgcgccgagggatgctcattctctgagaatatcaccgtccctgacacgaaggtcaatttctatacttggaagaggatggacgtaggacagcaagctgtggaagtgtggcaaggcctcgccctgctctccgaggcgattctgaggggccaggccttgcttgccaacagctcgcagccgtcggaaaccctccaactgcatgtggataaagccgtgagctcgctccgatcactgacgtcgctgctgcgggctctgggggcgcagaaggaagcgacctccctcccagaggccacctcggctgcgcccctgcggacgttcaccgtcgacactctctgcaagctctttagaatctactcaaacttcctgcgcgggaaactcactttgtacactggagaagcctgccggcgaggagataga

SEQ ID NO: 15984 - DNA, 576 bp, Artificial Sequence
  derived and/or modified sequence
atgggaagttgcgaatgtccagccttgttgctgctgctgagcttgctccttttgcctctgggattgccggtgctcggagcaccacccaggctcatctgcgatagcagagtgttggagagatacattttgggcgccagagaggcggagaacgtcacgatgggctgcgccgaaggctgcagttttagtgaaaacataacagtgccagataccaaagtaaacttctacacttggaaaaggatggatgtgggacagcaggcagtggaggtctggcaaggcctggccttgctctcagaggccatcctgagaggccaggcgctgcttgcaaactcatctcaacctagcgaaactttacagcttcatgtggataaggctgttagctcactgaggagcctgactagcctgctgagggcactgggagcccaaaaagaggccactagtttacctgaggcgactagcgcagccccactgagaacatttactgttgataccctctgcaagctgttcaggatttacagcaatttcctcagaggtaagctgacattgtacaccggcgaggcgtgccggagaggggacagg

SEQ ID NO: 15985 - DNA, 576 bp, Artificial Sequence
  derived and/or modified sequence
atggggtcatgcgagtgcccggctttgctcctgcttctgtccctgcttctgctgcccctagggctgcctgtcctgggggccccgcctcgcttgatatgtgactcacgtgtgctggagcgatatatcttgggcgcccgcgaggctgagaatgttacaatgggctgtgctgagggatgcagcttttccgagaacattacagttcctgatactaaagtgaacttctacacctggaagagaatggatgtggggcaacaggccgttgaagtgtggcagggcttagcgctgctctccgaggccatcctgcgcggacaggccctgctggctaacagctcccagcccagcgagacattgcaactccatgtggacaaggctgttagttctttgaggtccctgacgtccctgcttcgggcccttggcgcccagaaagaggctacatccctaccggaggcaacctccgccgctccactgaggaccttcactgtggacaccttgtgcaaattgtttcgtatttactcgaactttctgcgcgggaaacttacattgtacaccggggaggcatgtaggcgaggcgatagg

SEQ ID NO: 15986 - DNA, 576 bp, Artificial Sequence
  derived and/or modified sequence
atgggatcgtgtgagtgtcctgcccttctgttgctcctgtccttgttgctcctgccactgggactcccggtcttgggggcaccgcccaggctgatttgcgatagtcgcgttctggagcgctacatcctcggcgcgcgggaagcggaaaacgttaccatgggatgcgccgagggatgctccttctccgagaacatcactgtgcctgacactaaggtgaatttctacacttggaaaaggatggacgtgggtcaacaagcagtggaagtatggcagggccttgcgctgctgtctgaggcgatactgaggggacaggctctcctggccaattcgtcacagccatctgaaacgcttcagctgcacgtcgacaaagctgtctcgagcctgcgcagcctgacgtcactgttgcgggcacttggtgcacaaaaggaggccacctcgctcccggaagcgaccagcgctgccccgctccggacctttactgtggacaccttgtgcaagttgttccgcatctactcaaacttcctgcgaggaaagctgactctctacaccggcgaagcctgcagaagaggggatcgc

SEQ ID NO: 15987 - DNA, 576 bp, Artificial Sequence
  derived and/or modified sequence
atgggatcctgtgaatgcccggctctgctgctgctgctctccctgctgctgcttccgctgggccttccagtcctgggagccccaccgcggctgatctgtgatagcagggtcctcgagagatacatcttgggggcacgcgaagccgaaaatgtcaccatgggatgtgccgagggatgtagcttctcggagaacatcaccgttcctgatactaaagtcaatttctatacctggaagcggatggacgtgggacaacaagccgtcgaagtgtggcaaggcctggcgctcctgtcagaagctatcttgcgcggtcaggccctgctcgctaacagctcgcagccatccgaaaccctgcagctgcatgtggataaggccgtgtcgtcactgagaagcctgactagcctcctccgggccctcggcgcacaaaaggaggcaacttcgctcccagaggctacctcagccgcgcccctccgcaccttcactgtggacacgctgtgcaaactgttccgcatttactcaaactttctgaggggcaagctgaccctgtacaccggggaggcttgccggcgcggagatcgg

SEQ ID NO: 15988 - DNA, 576 bp, Artificial Sequence
  derived and/or modified sequence
atgggatcatgcgaatgcccggcgttgctgctactgctcagtctgctgctgctcccactaggcctcccggtgcttggcgcccccccaagacttatctgtgatagccgcgtcctcgaaagatatatcctgggggcccgcgaggccgaaaacgtgacgatgggctgtgctgagggatgtagcttcagcgaaaatatcaccgtcccggatacgaaggttaacttctacacctggaaacgtatggatgtgggtcagcaagcggtcgaggtgtggcaaggactggccctgttgagcgaggctattcttcgcggacaggccctgttggccaattccagccagccttccgagacccttcagctgcacgtggataaggccgtgagctctctgaggagtctgacatctctgctgcgggccctgggtgctcagaaggaggcgacgagcctgcccgaggcgacgagtgcggctccactacgcacgtttaccgtggacacgctgtgcaagctattccgcatctattccaacttcctgcgtggcaagctgactctctacaccggagaggcttgccgtcgcggcgataga

SEQ ID NO: 15989 - DNA, 576 bp, Artificial Sequence
  derived and/or modified sequence
atgggatcatgcgaatgcccagctctgctgttgttgttgtccctgctccttctgccactgggcctgccagtgctcggcgccccgcctcgcctcatctgcgacagcagggtccttgaacgctacatcctgggagcccgcgaggctgaaaacgtcactatgggatgcgccgaaggttgcagcttttcggagaacatcactgtgccggataccaaggtcaatttctacacctggaagcggatggacgtcggacagcaggcggtcgaagtctggcaaggactggccctcctgtcagaagcgatcctgcgcggccaggccttgctcgcaaatagctcgcagcctagcgaaactcttcaactgcacgtggacaaggcggtgagctccctgcgctcgttgacgtccctgttgcgggctctcggcgcacaaaaagaagcaaccagcctgcccgaggcgacctccgcggccccactccggaccttcactgtggacaccctctgcaagctcttcaggatctattcgaatttccttcggggaaaactgactttgtacactggcgaggcctgcagacgcggcgaccgg

SEQ ID NO: 15990 - DNA, 576 bp, Artificial Sequence
  derived and/or modified sequence
atgggttcatgtgagtgcccggcgctgctgctcctgctctcattgctcctccttccacttggcctgccggtcctgggagccccgccccgactcatctgcgactcaagagttctcgaacgctacattttgggagcccgcgaggccgaaaatgtgaccatgggatgtgccgaaggctgctcattctccgagaacatcactgtgccggatactaaagtgaacttctacacctggaagcggatggatgtgggacagcaggccgtggaggtgtggcagggacttgccctgcttagcgaggctattctgcgcggacaggccctgctggcgaactcaagccagccttcggagactctgcagctgcacgtcgataaggcggtatcctcactgcgcagcctcactagcctgttgagggccttgggcgctcagaaggaggcaacttcgctgcctgaggcgacgtccgcggcgccgctgcgcacttttaccgtggacaccctttgcaagttgttccggatctactcgaacttcctcagaggaaagctcaccctctacactggggaagcgtgccgccgcggagacaga

SEQ ID NO: 15991 - DNA, 576 bp, Artificial Sequence
  derived and/or modified sequence
atggggagctgtgaatgcccggccctgctgcttcttcttagcctcttgcttctgccactcgggctgccggtgctcggagccccaccgcggctgatttgcgactcgcgggtcctggaaaggtacatcctgggtgcgagggaggccgaaaacgtgactatgggatgcgcggagggctgttccttttcggagaatatcacggtcccggacaccaaggtgaatttctacacctggaaacgcatggatgtcggacagcaggcagtcgaagtgtggcaaggactggctctcctgtccgaagccatcctcagggggcaagcgttgctcgccaactcatcgcagccgtcagaaaccctccagctgcacgtggacaaagcggtgagctcgctgcgttccctcacctcacttctgagagcattgggagcccaaaaggaggccacctccctgccggaagctacctctgcagccccgcttaggactttcaccgtggacaccctgtgcaagctgttcaggatctacagcaactttcttagaggaaagctgaccctctacactggagaggcttgccggcggggagatagg

SEQ ID NO: 15992 - DNA, 576 bp, Artificial Sequence
  derived and/or modified sequence
atgggttcgtgcgagtgtccggccttgttgctccttttgtcacttctgttactcccgctcggtttaccagtgctcggagctccaccaaggctcatctgtgatagtagagtgctcgaacgttatatcttaggagcaagggaagctgaaaacgtgacaatgggatgtgctgaaggatgttcattttccgagaacattacagtaccggatactaaggttaacttctatacttggaaacgtatggatgtgggtcaacaagccgttgaggtttggcaaggacttgcattgctgtccgaagctatcctgcggggacaggcgcttcttgcgaattcctcacagccctccgagactcttcaattgcacgttgacaaagctgtttcttccctccgatcacttacttcgttgcttcgggctcttggagcgcaaaaggaagcaacttctctaccagaggctacttcagccgcacccttaagaacgttcacggtagatactctttgtaaattgtttcgtatatatagtaattttctcagaggaaaattgaccctttataccggagaggcgtgtcgtcgtggagacaga

SEQ ID NO: 15993 - DNA, 576 bp, Artificial Sequence
  derived and/or modified sequence
atgggcagttgcgaatgtccagcactcctcctgctgctgagccttcttctgctgcccctgggactgccagtgttgggcgccccgccaagactgatttgcgattcccgtgttctggagaggtacattctgggcgcacgagaggcagagaacgtcacaatggggtgcgccgaaggatgctcattcagtgagaatataactgtgccagatactaaggttaatttttacacttggaagcgcatggatgtgggccagcaggcagtggaagtgtggcagggcctcgctttgttgagcgaagccatcctgagaggacaagccctgttagccaatagcagccagccttcggagaccctgcagctccatgtggataaagctgtgagcagcctgaggagcctgacctcgctgctgcgggccctgggcgcccagaaggaagccaccagcctccctgaggccacaagtgctgcgccactaagaacctttactgtcgacactctgtgcaaattgttcaggatttactctaactttctgcgggggaagttgacattatatactggcgaagcgtgccggcgcggcgacagg

SEQ ID NO: 15994 - DNA, 576 bp, Artificial Sequence
  derived and/or modified sequence
atggggagctgtgagtgtcccgcgcttcttctcctcttgtccctgcttctcttgcccctgggccttcctgtgcttggggcacctccgaggctgatatgtgactcacgcgtcctggagcgctatatcttgggcgcacgagaagccgaaaatgtgactatggggtgtgcggagggttgttctttttccgagaacattaccgtgcccgataccaaggtgaatttctacacctggaaacggatggacgtggggcagcaagcggtggaagtgtggcagggattggcgctgctttcggaagccatcctcagaggacaagccctgcttgccaactcgtcacaaccctcagaaaccctgcagctgcatgtggacaaggcagtgtcgtcattgcggagcctcacctcactgcttcgcgcactgggagcccaaaaggaggcgaccagcttgcctgaggcaacctcggcagcgcctcttcgaacctttactgtcgacactctctgcaaactttttagaatttacagcaacttcctgagaggtaagctcacgctgtacactggcgaagcatgccgccgtggtgaccgg

SEQ ID NO: 15995 - DNA, 576 bp, Artificial Sequence
  derived and/or modified sequence
atgggatcttgcgaatgtcctgccctactacttttgttgtccctacttttacttcctcttggtctccccgtgctgggcgctccaccacgtcttatctgcgacagccgcgtgctagagcgatacatacttggagctcgagaggcggagaacgtcacgatgggttgtgccgagggctgctcattctcagagaatattaccgtgcctgacaccaaagtcaacttttatacctggaaacgtatggacgtgggccagcaggccgtggaggtgtggcagggcctggccctgctgtctgaggctattctgcgcggccaggccctgcttgccaactcttcacagccatcggagaccttgcagctgcacgtggacaaggcagtctcctctcttaggtccctaacgtcgctactccgtgccctgggcgctcaaaaggaagccactagtctgccggaggccactagcgcagcaccgttgagaacctttacagtggacaccctatgcaagctgttccgtatctattcaaacttccttagaggaaaactgacactatatactggcgaggcttgccgacgcggcgacagg

SEQ ID NO: 15996 - DNA, 576 bp, Artificial Sequence
  derived and/or modified sequence
atgggaagctgcgaatgcccagcgctgctgttgctcctttccctgctccttctgccgttgggccttcccgtgctgggtgcccctccgcggctgatctgcgattcgagggtcctggagaggtacatcctgggagcccgcgaagcggaaaacgtcactatggggtgtgccgaaggatgctcgtttagcgaaaacatcactgtgcctgacaccaaggtgaatttctacacttggaaaagaatggacgtgggacagcaggcagttgaggtgtggcagggactcgccctcctcagcgaggcgatcctgagaggccaagctctcctggcaaattcctcacagccgtcagaaaccctgcaactgcacgtcgataaagcggtgtccagtctcagatctctgacctccttgctgagagcgcttggcgcccaaaaggaagcaacctcgcttccagaggccacttctgcagctccactcaggacctttactgtggacaccctctgcaaacttttccggatatactcaaacttcctccgtggtaagctgacgctgtatacgggtgaggcttgtcggaggggcgaccgc

SEQ ID NO: 15997 - DNA, 576 bp, Artificial Sequence
  derived and/or modified sequence
atgggatcctgtgaatgtccagctctgctgctgctccttagcctgcttcttctcccgctgggattgccagtactgggggcccctcccagattgatttgcgactctcgggtgcttgaacggtacatcttgggagcgagggaggcggaaaatgtgaccatgggttgtgccgagggctgcagcttctcggaaaacattaccgtcccggataccaaggtgaacttctacacttggaaacgcatggacgtcggccaacaggctgtggaagtgtggcagggactcgccctcctctcagaggcgatcctgcgcggacaagccctgctggcaaattcctcacagccatcggaaaccctgcagctccacgtcgataaggcggtgtcaagcctccgctccctgacttccttgcttcgggccctcggagcccaaaaagaagcgacctcgcttccggaggctactagcgcagctccgctccggacgttcacggtagataccctctgcaagctctttagaatctacagcaacttcctcaggggaaagctgactctgtacaccggagaggcctgtaggcgcggcgaccgc

SEQ ID NO: 15998 - DNA, 576 bp, Artificial Sequence
  derived and/or modified sequence
atggggagctgtgagtgtcctgccctgctgctgctgctctctctcctcctgcttccacttgggctcccggtgctgggagccccgcctcgtctgatttgcgactcacgagtcctagaaagatatattctaggagccagggaggccgaaaacgttacaatgggctgtgctgaggggtgcagcttctcagaaaatattacagtgcccgacactaaagtgaatttctatacatggaagcgtatggacgtcggtcagcaggctgtggaggtgtggcagggcttggctctgttatcagaagccatcttgcggggacaggctttgctggccaactcctcgcagcctagcgagacgctgcagctgcacgtcgataaggccgtgagctcacttcggtccctgacttccttattgagggcgctcggggcgcagaaggaggcaacaagtctgcctgaggcaacatctgcagccccactgcgaactttcacagtcgacacactgtgcaaacttttcaggatatattctaacttccttcgaggtaagctgacattgtataccggcgaggcgtgtagaaggggcgacagg

SEQ ID NO: 15999 - DNA, 576 bp, Artificial Sequence
  derived and/or modified sequence
atgggatcttgcgaatgccctgccctgctgttacttttgtccctattattacttcccttgggacttccagtgctgggcgcaccccctaggctcatctgcgactcacgagtattggagagatatatcttgggggcccgtgaggctgaaaacgttacaatgggctgcgccgaaggctgtagcttttcagagaatataacagttccggataccaaagtgaacttttacacgtggaagcgtatggatgttgggcagcaagctgtcgaagtgtggcagggcctcgcactcctgtcagaggcaatcctcaggggccaggcgctccttgcgaacagtagtcagccatccgagactctgcagcttcacgtggacaaggcagtttctagcctacgcagtcttaccagtctgctgcgggctctcggggcgcaaaaggaagcgacatcacttcccgaggcaactagtgcagctcctcttaggacattcacagtcgacacactctgcaaactgtttcgaatttactctaatttcctgcgcggcaagttaacactctataccggcgaggcctgcaggagaggtgacaga

SEQ ID NO: 16000 - DNA, 576 bp, Artificial Sequence
  derived and/or modified sequence
atgggatcgtgtgaatgcccggctctgcttctgctgctttcccttctcctgttgcccctgggcctgccagtccttggggctcctccacgcctgatctgcgacagtagagttctcgaaagatacatccttggcgcacgggaggctgaaaacgtgaccatgggttgcgcggaagggtgcagctttagcgagaacattaccgtgcctgacactaaggtcaatttctatacttggaagcgcatggacgtcggccagcaagctgtggaagtttggcaagggctcgccctcctttcagaggccatcctccgcggtcaggctctgctcgccaactcatcacagccctcagagactcttcagctgcatgtggataaagcggtgtcgtcgttgcggagcctcacctccctgttgcgcgcgctgggagcgcaaaaagaggcgacttccctcccagaagcaacctccgccgctccgctgcggacgtttaccgtggacaccctctgcaagctgttccgcatctactcgaatttcctgcgtggaaaactcacgctctacactggagaggcctgtcggagaggagatcgg

SEQ ID NO: 16001 - DNA, 576 bp, Artificial Sequence
  derived and/or modified sequence
atgggttcttgtgagtgtccagccctgctcttactgctgtccctcctgttactgcctctcggactgcctgtcctgggcgcacccccacgtcttatctgcgacagcagagtgctggagaggtatatcctcggcgcacgggaagccgaaaacgtgaccatgggatgtgctgagggctgcagcttctcagagaacattacggtccctgacacaaaggtcaacttttatacgtggaagcgaatggatgttggacaacaagcggtcgaggtttggcaggggcttgctcttctgtcagaggccattctgcggggacaagcactcttagcgaattcaagccaacccagtgagactctgcagcttcacgtggacaaagccgtctcgtctctcaggagcttgacctcactgctccgcgccctcggcgcccagaaagaagcaactagtctgcccgaggcgacttctgccgcacccttgaggaccttcacggtggatacactgtgtaaactgttccggatttattcaaacttcctaagggggaagcttaccctctacacaggtgaagcttgtcggaggggcgatcgc

SEQ ID NO: 16002 - DNA, 576 bp, Artificial Sequence
  derived and/or modified sequence
atgggcagctgtgaatgccctgcactgctgctgctcttgagcctactgctgctgcctcttggactacctgtgcttggagcccctccccgcctcatttgtgatagcagggtactggagcgctacattcttggagctcgggaggcagagaacgtgactatgggctgtgcggagggctgttccttttccgaaaatatcaccgtacccgatacgaaggttaacttctatacctggaaaagaatggacgtgggccagcaggctgtcgaggtctggcagggacttgcactgcttagcgaggcgatcctcagaggccaggctttgctggccaactcatctcagccctcagagacccttcagctgcacgtggacaaagctgtgtcttcattgcggtccttgactagcttgctgagggccttgggagcacagaaggaagccactagtctccccgaagccacaagcgccgcacccctccggacgtttaccgtggatacactatgcaagctgtttagaatctactcaaatttcctgagaggtaaactcaccttatacaccggagaagcttgccggcgcggcgacaga

SEQ ID NO: 16003 - DNA, 576 bp, Artificial Sequence
  derived and/or modified sequence
atgggatcgtgcgaatgccctgcactccttttgcttttgtcgctcctcctgctccctctgggccttcctgtgctgggagcacccccgcgtctgatttgcgacagccgcgtgctggagcgctacattcttggcgctagggaggcagaaaacgtgaccatgggatgtgccgagggttgttccttctccgagaacataaccgtgccagatacgaaggtgaacttctacacttggaagcggatggatgtcggccaacaggcggttgaggtctggcagggacttgcactgttgtcagaggcaatactgagagggcaagcactgctggccaatagctctcaaccatcggaaactctgcaactccatgtcgataaggctgtgtcctccctgcgctcgctgacttcactcctgcgcgcgctgggggcgcagaaggaagcaacttcccttcctgaagctacctcggccgcaccactccgaactttcaccgtggatactctgtgtaaactctttcggatttactctaactttcttagaggcaaacttacgctgtacaccggagaggcttgtcgtcgtggagatcga

SEQ ID NO: 16004 - DNA, 576 bp, Artificial Sequence
  derived and/or modified sequence
atgggtagctgtgagtgcccagctcttctccttctcctttcgcttcttctgctgccgctgggactgcccgtgcttggagcacctccccggctgatttgcgatagcagagtgcttgaacgctacatacttggagcacgcgaggccgaaaatgtcaccatgggatgtgccgaagggtgcagcttttcggaaaacatcactgtgcctgataccaaggtcaacttttacacgtggaaacgcatggacgtgggtcagcaagcagtcgaggtgtggcagggactcgccctgctttccgaagcaattctccgagggcaagcacttttggccaattccagccagccctcggagactctccagctccacgtggacaaagcagtcagcagcttgaggtccctgacttccctgttgagggcattgggtgcacaaaaggaagcgacctcactgccagaggccactagcgcagcacctctgagaacgttcaccgtggatacgctctgcaagttgtttcgcatttactctaactttcttcgtggaaaacttactctgtacactggtgaagcatgtaggcgcggtgaccgg

SEQ ID NO: 16005 - DNA, 576 bp, Artificial Sequence
  derived and/or modified sequence
atgggttcctgcgaatgccctgccctgctgttgctgctgagcctcttgctgctgccgctgggtctcccggtcctgggcgccccacctcggcttatatgtgactctagggtcctggaaagatatatcttgggtgcgagggaggcggagaatgtcaccatgggttgcgcggaagggtgtagctttagcgaaaacattacagtgccagacaccaaggtcaacttctacacttggaagcgcatggacgtgggccagcaggctgtcgaagtgtggcagggtctggctctactgtctgaggcgatactgcgaggtcaggctctgctggcgaacagttctcaaccgagcgagaccctccaactccatgttgacaaggccgtctcttccttgcgatcgctgaccagcctgctcagggccctgggtgcgcagaaggaggccacgtctctgccagaggctacgtctgccgctccgcttcgcacgttcaccgtggacaccctgtgcaaactattccgcatctactccaactttctccgtggcaaacttaccctgtataccggtgaggcgtgccgccgcggtgataga

SEQ ID NO: 16006 - DNA, 576 bp, Artificial Sequence
  derived and/or modified sequence
atggggtcctgcgagtgcccagcgcttctgcttctgttgtctcttttgctgctgccgctcggattgcctgtccttggcgctccgccccggttgatttgtgacagccgcgtactcgagcggtatatcctcggagcccgagaggctgaaaacgtcaccatggggtgcgcagagggatgctcgttctctgagaacattactgtgcccgacactaaggtgaacttctacacctggaagcgaatggatgttggacagcaggcggtggaggtctggcagggattggccctcctgtctgaggcaatcctgcgcggacaggcgctgttggccaacagttcccagccttctgaaaccctgcagcttcatgtggataaggccgtgagctcgttacgttctctgacttccctgctgcgcgcgctcggtgcccagaaggaggcgaccagcctgccagaagctactagtgctgcacccttgcgtactttcaccgtcgataccttgtgtaaactcttccggatttactccaacttcctgcgcggaaagctgacgctgtatactggagaggcttgtcgtcgtggtgatcgc

SEQ ID NO: 16007 - DNA, 576 bp, Artificial Sequence
  derived and/or modified sequence
atgggtagctgcgaatgtccagctctgctgctcctgcttagcctgcttctccttcctcttggactgcctgtgctcggggcacctccccgtttgatttgcgacagccgcgtgctggaaaggtacatccttggggcccgagaggcggagaatgtgactatgggttgtgctgagggatgttcgtttagcgagaacatcaccgtgcctgataccaaagtcaatttctacacctggaagaggatggatgtcggccaacaggctgttgaagtgtggcaagggctggcgctgctgtcggaggcaatactcagaggccaagcacttcttgcaaatagctcccagccctccgaaactcttcagctccacgtcgataaagcagtgtcgtcgcttagatcgctcacttcactgctgcgggctcttggagcacaaaaggaagcaacttcgcttcctgaagcaacgtccgcagcaccacttcggacttttaccgtcgataccctgtgcaaactgtttaggatctactccaatttcctcagggggaagctgactctgtacactggtgaggcgtgcagacgtggcgatcga

SEQ ID NO: 16008 - DNA, 576 bp, Artificial Sequence
  derived and/or modified sequence
atgggctcatgtgaatgtcccgctctgctcttattgctgtccctgctcctgctgcccctgggtctgcctgtgctgggcgccccccctaggctgatatgtgattctcgagtactggagaggtatatactgggagctcgagaggcagagaatgtgaccatggggtgcgccgaaggatgctccttttcagaaaacattaccgtgcctgatacgaaagtgaatttctacacctggaagcgtatggatgtgggacagcaagctgtcgaggtgtggcaaggcttagctctgctgtcggaggccatcctaagggggcaggcactgcttgcgaatagtagccaaccctccgaaactctgcagctccatgtagacaaggccgttagttcgctccggtctctgacttccctgctccgagctcttggggctcagaaggaagcaacatcactgcctgaagcaactagcgcagctcctttacgaaccttcacggtcgatacactctgcaaactctttcgtatctacagcaatttcctgagggggaagcttactttgtatacgggtgaggcttgtcgaaggggcgataga

SEQ ID NO: 16009 - DNA, 576 bp, Artificial Sequence
  derived and/or modified sequence
atgggatcgtgtgagtgtccagctttgcttcttctccttagcttgctgcttttgccacttgggctgcctgtgctcggagcaccgcctcgactcatttgcgattcccgtgtgctggagcggtacatacttggggccagagaagccgaaaatgtgactatgggatgtgcagagggatgttcgttctctgaaaacatcactgtccctgacactaaggtgaacttttacacttggaagcgaatggatgtcggtcagcaagcggtggaagtgtggcaaggtctggccctcctctcagaagcaattctgcgaggccaagcgctgctggcaaacagctctcagcctagcgaaacccttcagctgcacgtcgacaaggctgtgtcatcacttagatccctgacctcgctgttgagagccctcggggcgcaaaaggaagcaacttccctgcccgaggcaacctcggcagctcctttgagaactttcaccgttgatactctctgcaagctgtttaggatctacagcaactttttgaggggaaaacttactctttacaccggcgaggcatgtagaaggggagatcgc

SEQ ID NO: 16010 - DNA, 576 bp, Artificial Sequence
  derived and/or modified sequence
atgggaagctgcgaatgcccggcactgttgctcctgctgtcgctgctccttctgccgctcgggctccctgtgctgggagcaccgcctagattgatctgtgactcacgtgtgctggaacggtatatactcggagcccgcgaggctgagaacgtcactatggggtgcgccgagggttgctcgttttcagagaatatcaccgtgcccgatactaaggtgaatttctacacttggaaacggatggatgtgggacagcaggcggttgaagtctggcagggactggctctcctgtccgaggcaatcctgcgaggtcaggcgctgctggccaactccagtcaaccatccgagactctgcagttgcacgttgacaaggcagtgtctagcctccggtccctgacctcgctgctcagagcgcttggagcccagaaggaagccaccagcttgccagaagcgacttcggcggccccgctgcggaccttcaccgtggatacgctctgcaagttgttccggatttacagcaactttctgcgcggcaaactgaccctctacactggagaggcttgtcgccgcggagacaga

SEQ ID NO: 16011 - DNA, 576 bp, Artificial Sequence
  derived and/or modified sequence
atgggaagctgcgaatgccccgccctgctgctgttgttgtccctcttgctcttgccacttggcctccctgtgctgggggcccccccaagactgatctgcgactctcgggtgcttgagaggtacattctgggggcccgggaggctgaaaatgttaccatggggtgtgctgaggggtgttctttttccgaaaacatcaccgtaccagatacaaaggtaaatttctacacctggaagaggatggatgtggggcagcaggccgtagaggtttggcagggtctggcgttgctgagcgaagcgatcttgcgcggtcaggctttgcttgctaactctagccaaccttccgaaacattgcagctgcatgtggacaaggcggtcagttcactgcggtctctgacatctctgctgcgggccttgggggcacaaaaagaggctacttctttgcccgaagcaaccagcgccgccccactgcggactttcaccgtagataccttgtgcaaattgttcaggatctactctaactttcttagaggtaagctgacgctctatactggggaggcttgcagaaggggggatagg

SEQ ID NO: 16012 - DNA, 576 bp, Artificial Sequence
  derived and/or modified sequence
atgggaagctgtgaatgccctgcactgcttctgcttctcagcttactcctattaccgctgggccttccagtgttaggggcccccccaagactcatctgcgatagccgagttttggaacggtacatattaggcgcgagggaggctgaaaacgtgacaatgggttgcgctgaaggctgctccttctcagagaacattactgttccagatacgaaggttaacttttatacttggaaacggatggacgtcgggcagcaggccgttgaggtgtggcagggcctagccctactgtcggaggcgatcttacgtggccaggcgctgctcgccaactcatctcagccatctgaaacgttacaactgcacgtcgacaaagccgtctcttccctgcgtagcctaacatcactccttagggccctgggagcacagaaagaagccacttcacttccggaagcaaccagcgctgcccccctgcggacgttcaccgttgacaccttatgtaagctcttcaggatctatagcaacttcttgcgaggcaagctgacactgtataccggggaggcttgtcgtcgcggcgacagg

SEQ ID NO: 16013 - DNA, 576 bp, Artificial Sequence
  derived and/or modified sequence
atgggctcctgcgagtgtccagcccttttgctactgctctccttgctgctcctgcccctgggtcttcccgtgctgggcgccccccccaggcttatctgcgattctcgtgtgctggaacgctacatcctgggcgctcgggaagcagagaacgtgacgatgggctgcgcggaagggtgtagcttctcagagaacataaccgtaccagacacaaaggtgaatttctacacttggaaacgaatggacgtcggtcagcaggccgtcgaggtgtggcaggggctggccctcctcagcgaggcgatcctacgtggacaggccctgctggctaactcctcccagcctagcgaaacccttcagttgcacgtggacaaggccgtgagttctcttcgcagccttaccagccttctgcgagccctaggggcccagaaagaagcaacatcactgccagaagctacgtctgccgcaccactcaggacattcacagtggacaccctgtgtaagctgtttcgcatatattccaacttcctgaggggtaagctgaccctttacacgggcgaggcgtgccgacgcggcgaccgg

SEQ ID NO: 16014 - DNA, 576 bp, Artificial Sequence
  derived and/or modified sequence
atgggttcatgcgaatgccccgccctccttctgctgctgtccctgctgttgcttcccttgggcctccccgtgctgggtgctcccccacggctaatctgcgactccagagtgttggagagatacatactcggggccagagaggccgaaaacgtgaccatgggttgcgccgagggttgtagctttagcgagaatatcactgtgccagatacgaaggtgaacttttatacttggaaacgcatggatgtagggcagcaggccgttgaagtgtggcagggcctcgcactgctcagcgaggcaatcctgcgcggtcaggctcttctcgccaactctagtcaaccgtccgagaccttgcagctgcatgtcgacaaagcggtgtcttctctccggtcccttacctctcttctaagggcactgggggctcagaaggaggctaccagtttgccggaagcgaccagtgctgccccgctgaggacgtttaccgtggacaccctgtgcaagctgttccgcatctacagtaatttcctccgaggtaaattaaccctgtatacaggagaggcgtgtagacggggagacagg

SEQ ID NO: 16015 - DNA, 576 bp, Artificial Sequence
  derived and/or modified sequence
atggggagctgcgagtgcccagctctactgcttctgttgagtctcttgctcctcccgctcggactgcccgtcctaggggctccgccacgcctcatctgcgattcccgcgtgctggagcgctacatcctcggggctcgggaggccgaaaacgtaactatgggatgtgcagagggttgcagcttttcagaaaacattacagtgcccgacaccaaggtgaacttttacacatggaaaagaatggacgttggtcaacaggccgtcgaggtctggcagggcctagctctcctgagcgaagccatcctgagaggtcaagcgcttctggcgaatagcagccagccttctgaaacacttcaattgcacgtcgacaaggccgtgtccagcctgcgctccttgacctctctccttcgtgccctcggcgcccaaaaggaggccacctctttacccgaggccacatctgcagcaccattacgtacctttaccgtggacaccctttgtaagttgttcaggatttactctaattttctgcgcgggaagctaaccctgtacacaggcgaagcatgccgccggggcgacagg

SEQ ID NO: 16016 - DNA, 576 bp, Artificial Sequence
  derived and/or modified sequence
atgggatcgtgtgaatgcccagcactgttgctccttctgtccctgctgctcctccccctcggcctcccagtgctgggagccccgccccgcttgatctgcgactcaagagtgctggagcgctatatcctcggagctagagaggcagaaaatgtcacgatgggttgcgctgagggctgttccttcagcgagaacatcactgtgccggatactaaggtgaatttctacacgtggaaacgtatggatgtcggacagcaagccgtggaagtttggcaagggcttgcactgctctcagaagccattctcagaggacaggctctgctggctaactcttcccaaccgtcggaaacccttcagctgcacgtcgacaaagctgtgagctcactccgcagcttgacctcgctgctccgcgctctgggagcacagaaagaagcaactagcctcccggaggccacctcggctgcgccacttaggacgtttaccgtggataccctgtgtaagctgtttcgcatctactccaacttccttcgggggaagttgaccttgtacactggtgaggcatgccggcggggagacagg

SEQ ID NO: 16017 - DNA, 576 bp, Artificial Sequence
  derived and/or modified sequence
atgggttcgtgcgaatgtccggccctgctgcttctcctgtcactgctcttgctgccgctggggttgcccgtgttgggagcacctccaagattgatctgcgactccagagtgttggagcggtacatcctgggagcaagggaggcagaaaacgtgactatgggatgcgcggagggatgctccttttcagagaatatcaccgtgcctgacaccaaggtgaacttctacacttggaagagaatggacgtgggacaacaagcagtcgaggtctggcaaggcctggctctgctgagcgaagcgatcctccggggccaagctctcctggccaactcctcccaacctagcgaaaccctgcagctgcatgtcgataaggcggtgtcgtcgctccgctcacttacctcactgctcagagccctcggcgcgcaaaaagaggccacttcgctgccggaggccacgtcggcggcccctctccggaccttcactgtggacaccctctgtaagctgtttcggatctattccaatttcctgagaggaaagctcactctctacactggcgaagcctgcagacggggcgataga

SEQ ID NO: 16018 - DNA, 576 bp, Artificial Sequence
  derived and/or modified sequence
atggggtcctgcgaatgccccgccctcctcctcctcctttccctgctgttgctcccactgggcttgccagttctgggcgccccacctcggctcatttgtgactcccgcgtgcttgagcgctacattttgggtgcacgcgaggcagaaaatgtgaccatgggatgtgccgaaggctgcagcttctccgaaaacatcacagtgcccgacaccaaggtgaatttctacacatggaaaagaatggacgtggggcagcaggcggtggaggtctggcaaggcctcgcactgttgtccgaagcaatattgagaggccaggccttgcttgccaattccagccagccttccgaaactttgcagctccatgtggataaggctgtgagttccttgaggtcacttacgagccttctgagggcacttggagcccagaaggaggctacatctttgcccgaggcaacaagcgctgcacctctgcggacattcaccgtcgatactctgtgcaaactgtttcgcatctacagcaattttctgcgggggaagttgactttgtacaccggagaggcatgtcgccgcggcgacaga

SEQ ID NO: 16019 - DNA, 576 bp, Artificial Sequence
  derived and/or modified sequence
atggggtcctgtgaatgtccagctctgctccttttattgtcactccttctgttgcctctgggcctgccggtgctcggagcgcccccacggctaatctgtgactctcgagtgctggaacgttacatccttggagctcgggaggcggagaatgtcacaatgggctgtgctgagggctgcagctttagtgagaatatcacggtgccagacactaaggttaatttttatacatggaagaggatggacgtcgggcagcaggccgttgaggtgtggcagggactggcactgctttctgaagctattttgcgcggacaggcattacttgccaactccagtcagccctctgaaacacttcagctgcacgtggataaagctgttagtagtctgcgctccctaacctcactgctccgcgcactgggagctcaaaaggaggccacctcattgccagaggccacgtcagccgcgcccctgaggacattcacagtggacacgctgtgcaaactcttcagaatctactctaatttcctgcgtggtaagctgactctgtacactggggaggcttgccgaagaggagaccga

SEQ ID NO: 16020 - DNA, 576 bp, Artificial Sequence
  derived and/or modified sequence
atgggttcatgcgaatgtcccgcactgctgctccttctgtcacttcttctcctgccactgggacttcctgtgctgggtgcacctcctcgacttatttgcgattcgcgggtgcttgagcgatacatacttggtgcgcgtgaagctgagaacgtcactatgggatgtgcggaaggatgtagcttttcagaaaacatcaccgttcctgacaccaaggtgaacttttacacctggaaacgaatggatgtcggacagcaagccgtggaagtctggcaaggactggcacttctgtcggaggcgatccttcgggggcaggcacttctggcaaactcgagccagccttcggaaaccctccaacttcacgttgataaagccgtcagctctttgagaagcctcacctcactgcttcgcgcactgggggcccaaaaggaggccaccagcttgcccgaggccacctcagcagcgcccctccggacgtttactgtggacaccctttgtaaactgttccgcatttactcaaactttctcagaggaaagctcaccctgtacaccggtgaagcatgtcgcagaggcgacaga

SEQ ID NO: 16021 - DNA, 576 bp, Artificial Sequence
  derived and/or modified sequence
atgggctcctgtgagtgtccagcgttgttgctcctgctctccctgttgttgctgccgctgggcctcccagtgctgggagccccgccgcgcctgatctgcgatagtagagttctggaacgctacatcctcggagcgcgcgaagcggagaacgtgaccatggggtgcgctgaggggtgcagcttctccgaaaacatcacggtcccagatactaaggtcaatttctacacctggaagcgcatggacgtgggtcagcaggccgtggaagtctggcaaggcctggcactgctgagcgaggcaatcctccgcggtcaggccctccttgcaaattcatcgcagccgagcgaaaccctgcagctgcacgtcgacaaggccgtctcatcgttgcggagtcttactagcctcctgcgggccctgggcgcacaaaaagaggccacttcactccctgaggctacttccgccgcgcctctgcggactttcacggtagataccctgtgtaagctcttcagaatctactcgaactttctgagaggaaaattgactctgtacaccggtgaagcgtgtcggcgcggagatcgc

SEQ ID NO: 16022 - DNA, 576 bp, Artificial Sequence
  derived and/or modified sequence
atgggcagctgtgaatgccctgccctgctactgctcctctccctcctactgctgccattgggtctacccgtgctcggagccccacccagactaatttgcgattccagggtgttggagcgctatatcctaggagctcgggaggctgagaacgtgactatggggtgcgctgaaggttgttccttctcagagaatattacagtgcccgacaccaaggtaaacttttacacctggaagcgcatggacgttggccagcaagctgtggaagtgtggcagggtctggcattgctgtccgaggccattttgcgcggccaagcactcctggcaaattcgagtcagccaagcgagacactgcagttgcacgttgataaagcagttagctccctgcgtagcttgacatcattgctgcgcgctttgggcgcccagaaggaggcaacctccctgcccgaagcgacatccgctgctccactgcgcaccttcaccgttgataccctttgtaagttgttcaggatctacagtaattttttgaggggaaaactgactttatacactggggaagcctgccggcgaggcgatcgc

SEQ ID NO: 16023 - DNA, 576 bp, Artificial Sequence
  derived and/or modified sequence
atgggatcgtgcgaatgcccggcgctcctcctcctgctgtccctgcttctgctgccactgggcctgccagtgcttggagccccgccgcgactcatctgcgactcccgggttctcgaacggtacatcctgggtgcgagagaggccgagaacgtcactatgggatgcgcagaaggctgttccttttcggaaaatattaccgtgcctgacaccaaggtgaatttctacacctggaaacgcatggatgtgggacaacaggctgtggaggtctggcaaggtcttgccctgctgtcggaagctatcctgcgcggccaggctttgctggcgaactcttcccagccttcagagactctccaactgcacgtggataaggcagtgtcgtcattgcgtagcctgaccagcctcttgagggcactcggagcccagaaggaggcaacttcactccccgaagccactagcgcggccccgctgcgcacgttcaccgtcgacacgctgtgcaagttgttccggatctacagcaacttcctgagagggaaactcactctgtacaccggagaagcctgtcggcgcggggacaga

SEQ ID NO: 16024 - DNA, 576 bp, Artificial Sequence
  derived and/or modified sequence
atgggctcttgtgagtgccctgcactgctgctgctgctgtcgttgctcctgctcccacttgggctccccgtgctgggtgcacccccaaggctgatctgcgattccagggttcttgaaagatatattctgggggcaagagaagccgagaacgttacaatggggtgtgcggagggctgcagcttctccgagaatatcaccgtcccagacaccaaagtgaatttctatacttggaaacggatggacgttggccaacaagctgtggaggtgtggcagggactggcattgctgtccgaggctatactgcgaggacaagctttattagccaattcgagccagccctcagagacactccagctgcacgtggacaaagccgtgagctccctgagaagcctgacatccttgcttcgggccttgggtgcgcagaaagaagccaccagccttccagaagcaaccagtgccgctcctctgcggaccttcacggtcgatactctgtgcaaactgtttcggatctactcgaacttccttagggggaaacttactctgtataccggtgaggcatgtagacggggcgacaga

SEQ ID NO: 16025 - DNA, 576 bp, Artificial Sequence
  derived and/or modified sequence
atgggttcctgcgaatgccctgccctgcttttgttgctgtctttgctgctgctgcctctcggcctcccagtgctgggagcgccgccgcgactcatctgtgactcgcgcgtgcttgaaagatatatcctcggagcccgggaagccgaaaatgtcaccatggggtgtgccgaaggttgttccttctctgagaacattacggtgcctgatacgaaagtgaacttttacacatggaagagaatggacgtcggccagcaagctgtggaggtgtggcaggggctggccctgttgtctgaagccattttgcgcgggcaggcattgcttgcaaacagcagccagccttccgagacattacaacttcacgtagataaagccgtgagcagcctccggtcactgacgagtttgttgagagccctgggcgcccagaaggaggctacttcacttcctgaggcaacatcggccgcccccctacgcacctttacggtggacacactttgcaagctgttccgcatttactctaacttcctgcgcggcaaactcacactctataccggagaggcctgcaggcgcggagataga

SEQ ID NO: 16026 - DNA, 576 bp, Artificial Sequence
  derived and/or modified sequence
atgggaagctgtgaatgtcctgcattgctcctgctactgtcactactcctgctgccgctgggcttgcccgtgctgggagctccaccacgcctaatctgtgacagtagagttctggaacggtacattctgggagctcgggaggcggaaaatgtcaccatggggtgcgccgaggggtgtagcttctctgagaatattaccgtgcccgacacgaaggttaatttttacacctggaagagaatggacgtgggacaacaggctgtcgaagtttggcagggtctggcgctgcttagcgaggccatacttcgtggtcaggctctcctggccaacagcagccagccttctgagactcttcagttacatgtggacaaagctgtttctagtttacgaagcctgacaagcttgttgagagcactgggcgcccagaaagaagcaacgtcgcttcctgaggcaactagtgctgcaccgttgcgcaccttcacagttgacaccctgtgtaaactgttccgcatctattctaatttcctgcgggggaagctcacactatatactggagaggcttgtcggaggggcgataga

SEQ ID NO: 16027 - DNA, 576 bp, Artificial Sequence
  derived and/or modified sequence
atgggcagctgtgagtgccccgctctcctccttctactgagtctgcttctcttaccactaggtctgcctgtactcggtgctccccccagactgatatgcgactcacgcgtcttggaaagatacattctaggggccagggaggccgagaacgttacgatgggatgcgcagagggatgttcctttagcgagaacattactgtgccagacactaaggtgaatttttacacctggaaaaggatggatgtggggcaacaggcagttgaggtgtggcagggccttgcgttgctcagcgaagccatcttgcgagggcaggccctgctggccaatagcagccagccaagtgaaacactacagttgcatgtagataaggcggtctcctcccttcggtcgcttacttctctgctcagagcgcttggcgcacagaaggaggcgaccagcctgcccgaggctacgagcgccgcccctctccgcaccttcacggtggacaccctgtgtaagctgttccgcatctatagcaactttctgaggggcaaacttaccctgtataccggggaggcctgtcgccggggcgaccgg

SEQ ID NO: 16028 - DNA, 576 bp, Artificial Sequence
  derived and/or modified sequence
atgggtagctgcgaatgccctgctcttctgttgctgcttagtctgttactactgcccctgggactgcccgtgctgggtgctcctccccggttaatctgcgatagccgtgtgctggagaggtacattctgggcgcgcgagaggccgaaaatgtgaccatggggtgcgccgaaggctgctctttcagtgagaacatcacagttccggacaccaaggtaaacttttacacttggaagcggatggacgtcggccagcaggcagttgaggtgtggcaaggccttgccctgctgtccgaagctatattgagaggacaggccctcttggctaattcaagtcaaccttcggagacccttcagctgcatgtcgacaaagcagtctcctcactgcgctcattaacctccctgttacgggcccttggagcccagaaagaggctaccagcctgccagaagctacctccgccgcaccattgagaacctttaccgttgacaccctgtgcaagctgttcagaatttactccaatttcctgcggggtaagctgaccttgtacacaggagaggcttgccggcggggtgacagg

SEQ ID NO: 16029 - DNA, 576 bp, Artificial Sequence
  derived and/or modified sequence
atgggatcttgtgagtgtccagcactgttgctgttactaagcctcctcctcctccccttaggccttccggtcttgggggcccctccaaggcttatttgcgactctcgcgtgctggagcggtacattttaggggctcgcgaggcagagaacgtcactatgggttgcgccgaggggtgtagcttttccgagaacatcaccgttcccgacactaaggtgaatttttatacctggaagcgaatggatgtgggacagcaggcggtggaggtgtggcaggggctggccctcctttctgaggccattctgcgtggccaggcgttgcttgctaattctagtcagcccagtgaaaccctccaactgcacgtggataaagcggtctccagcctgcggagtctgacctcactcctcagggccttaggagcccaaaaggaagcaacatccttacctgaagccacatcggccgctcccctgagaacatttaccgtcgacactctctgcaagctctttagaatctattccaactttctgcggggcaaactcacactgtacacaggcgaggcctgtagacgcggtgacagg

SEQ ID NO: 16030 - DNA, 576 bp, Artificial Sequence
  derived and/or modified sequence
atgggttcctgcgagtgtccagctttgctcctgcttctgtcactcctgctgctgcccttgggtctccccgtactgggcgccccaccccgcctgatctgcgactcccgcgtgttggagcgctacatcctgggtgccagagaagccgagaacgtcacaatgggctgcgccgaaggttgttccttctcagagaacatcaccgttcccgataccaaggtcaacttctacacctggaaacgcatggacgtgggacagcaagcggttgaggtatggcaaggtctggccctgttgtctgaggccatcctgagaggccaggccctccttgccaactcaagtcagcccagtgagacacttcagctccacgtcgacaaggctgtgtcatccctgagatcattgacatccctccttagagccttgggagcccagaaggaggcgacatcactgcctgaagcaacatccgccgcacctctgaggaccttcacagtggataccctctgcaagctcttccgcatctactcaaacttcctccgcggcaagttgactttgtacaccggcgaagcatgcaggagaggagacagg

SEQ ID NO: 16031 - DNA, 576 bp, Artificial Sequence
  derived and/or modified sequence
atgggttcgtgtgaatgtcctgcacttttgctgctgctttctcttctcctgctgcctctggggttgccagtgcttggtgcaccgcctcgccttatatgcgattcacgagtccttgaaagatacattctcggtgcaagagaagcagaaaacgtgaccatgggatgcgcagagggatgtagtttcagcgaaaacattactgtgccggacactaaggtgaacttttacacttggaagcggatggacgttggacaacaagccgtggaagtgtggcaaggactggcgctgctttccgaagctatcctgagaggccaggcccttctggcaaattccagccaaccatcggagactcttcagcttcatgtggacaaggccgtgtcctcacttagaagcctcaccagcctgcttagggcccttggagcacagaaagaagccacgagcttgcccgaggccactagcgcagcaccccttcgaacgtttactgttgacactctgtgtaaactgtttagaatttactcgaatttcctcagaggtaagctgaccctgtacactggagaggcctgcagaaggggcgatcgg

SEQ ID NO: 16032 - DNA, 576 bp, Artificial Sequence
  derived and/or modified sequence
atgggatcgtgtgaatgtcctgcccttctcctcttgctttccttgctgctgcttccactcggactgccagtgttgggtgcacctcctcgcctcatttgtgactcaagagtgcttgagcgttacattcttggtgcacgggaagcagaaaatgtgaccatgggctgcgcagaaggttgttcgttctccgaaaacattaccgtgcctgacaccaaggtgaacttttacacttggaaacggatggacgtgggtcaacaagccgtagaggtgtggcaggggcttgccctcctctccgaagctatccttcgcggacaagcacttctggccaactcatcccaaccttcggagactttgcaactgcacgtcgataaggcagtgtcgtcacttcgttcccttacctcactgctgagagctctcggtgcccagaaagaggcaaccagcttgcctgaagccacctcggccgcgcccctgaggacgttcaccgtcgatactctctgcaagctcttcagaatatactccaactttttgcgcggaaaactcaccctttacactggcgaagcatgtcgcaggggggacagg

SEQ ID NO: 16033 - DNA, 576 bp, Artificial Sequence
  derived and/or modified sequence
atgggatcgtgtgaatgtccagccctcctactcctactgtctttgcttttgctgcctttggggctcccggtccttggagcaccccccagactaatttgcgattcccgtgtgcttgaaagatacatcctcggcgccagggaagcggaaaatgtgacaatgggctgcgctgaaggctgttcatttagtgagaatataaccgtgcctgatacgaaggttaatttctacacttggaaaaggatggacgtgggccagcaagcggtggaggtgtggcagggattagctctgttatccgaggcgatacttcgcggccaggccctcttagccaattcatctcagccctccgagacgctccagcttcatgttgataaggctgtgtcttcactccggtcccttacttcactcttaagagcacttggcgcccagaaggaagccacaagcttaccagaggccaccagtgccgctccactccggactttcacagtggacacactttgtaagctgttccggatctatagcaattttctccgcggtaaactgaccttgtacacaggggaggcttgcaggcggggggataga

SEQ ID NO: 16034 - DNA, 576 bp, Artificial Sequence
  derived and/or modified sequence
atgggttcgtgtgaatgtccggcgttattattactactatcgctactattattaccgttaggtctaccggtattaggtgcgccgccgcgtttaatatgtgattcgcgtgttttagaacgttatatattaggtgcgcgtgaagcggaaaatgttacgatgggttgtgcggaaggttgttcgttttcggaaaatataacggtaccggatacgaaagttaatttttatacgtggaaacgtatggatgtaggtcaacaagcggtagaagtatggcaaggtttagcgctactatcggaagcgatactacgaggtcaagcgttactagcgaattcgtcgcaaccgtcggaaacgctacaactacatgttgataaagcggtatcgtcgttacgttcgttaacgtcgttattacgagcgttaggtgcgcaaaaagaagcgacgtcgctaccggaagcgacgtcggcggcgccgctacgaacgtttacggttgatacgctatgtaaactatttcgtatatattcgaattttttacgtggtaaactaacgctatatacgggtgaagcgtgtcgtcgtggtgatcgt

SEQ ID NO: 16035 - DNA, 576 bp, Artificial Sequence
  derived and/or modified sequence
atgggcagctgtgagtgcccagccttgttgctgctgcttagccttttgctactgccccttggattacctgtgttgggcgccccaccccgcctgatctgcgattcacgtgtgctcgaacgatatattcttggagcgcgtgaagctgagaatgtgacaatgggatgcgctgagggctgttcctttagtgaaaacattaccgtgcctgatactaaggtaaacttctacacttggaaacgcatggatgttggacaacaggcggtggaggtatggcagggtctggccctcctgagtgaggcaatcttacgcgggcaagccctcctggctaacagcagccaaccctctgagaccctgcagcttcatgtggataaagccgtatcttccttgcggagcttgaccagcctccttcgcgcactgggcgcccaaaaggaagccactagcctgcctgaagccacctccgctgccccgttgcgcacctttacagtggataccttatgcaagctgtttaggatttattccaatttcttaaggggaaagctgacactgtataccggggaggcatgtaggcgcggcgatcgc

SEQ ID NO: 16036 - DNA, 576 bp, Artificial Sequence
  derived and/or modified sequence
atgggttcgtgtgaatgtccggctcttctcctgctgctgtcgctgctccttctgcctcttggccttccggtcctcggcgcgccacctcggctcatttgtgactcccgcgtgttggaacgctatatcttgggtgctcgggaagccgagaacgtgaccatgggatgtgctgagggctgttcgtttagcgagaacattacggtgccagataccaaagtcaacttttacacttggaagcggatggatgtgggtcaacaagcagtggaggtgtggcagggcctcgcactgctctcggaagccattctgagggggcaagcactcttggcaaactcatcccaacccagcgaaaccctccaacttcatgtggacaaggcagtctcctccctgcgcagcctgacttcacttctgcgtgcacttggcgcacagaaagaagcaacctccctgcctgaagccacctcagcagcgccactccgcacctttacggtggatactctctgcaagctcttccggatttactcaaactttctgagaggaaagttgactctgtacactggggaagcctgtcgccgaggtgataga

SEQ ID NO: 16037 - DNA, 576 bp, Artificial Sequence
  derived and/or modified sequence
atggggtcgtgcgaatgcccggccctcctgctcctcctgtcgttgctcctgctgccgctcggactgcctgtgttgggagcaccacctaggctcatctgtgattcgagagtcctggaaaggtacatcttgggcgcgagagaagccgagaatgtaaccatgggatgcgcggaaggatgttccttttcagagaacattactgtgcctgatacgaaggtcaatttctacacctggaagcggatggacgtgggccaacaggccgtcgaagtttggcagggactggcgcttctgtcagaagccatcctgagaggacaagccctgctggccaactcgtcccagccgagcgaaaccttgcaactgcatgtcgataaagccgtcagctcactgcgctcactgacgtcgctgctgagagcccttggcgcacaaaaggaagccacctccctcccggaagccacttccgctgctccactgcgcaccttcaccgtcgataccttgtgcaaactcttccggatctactccaacttcctgcgcggaaagttgaccctctacaccggagaggcctgccggcgtggagatcgg

SEQ ID NO: 16038 - DNA, 576 bp, Artificial Sequence
  derived and/or modified sequence
atgggatcttgcgagtgtccagcactactcctgcttctgtccctcttgcttttgccactgggcctgcctgtcttgggcgcaccaccaaggctgatctgtgacagccgggtgttagaacggtatatcctgggagcaagagaggcagagaatgtcacaatggggtgtgccgaggggtgcagcttcagtgagaatatcactgttccagataccaaagtcaacttctatacttggaagcggatggatgttgggcaacaagctgtggaggtttggcagggcctcgccctgctcagcgaggccatcctacggggacaggcactgctagcaaactcttcccagccatctgagaccctacagcttcatgtggacaaggcagtctctagtctgcggtcgctgacttctctgctgagggcactgggcgcacagaaggaggccacatctctaccggaggccacgagcgcggccccccttaggacgtttacagtagacactttgtgcaagctctttcggatttacagcaattttctcaggggtaaactaaccctttacaccggtgaagcgtgccgcaggggagaccgg

SEQ ID NO: 16039 - DNA, 576 bp, Artificial Sequence
  derived and/or modified sequence
atggggagctgcgagtgccccgccctcctgctgttgctgtctctgctgctgttgccactgggtctccctgtcctgggtgccccgccacgactgatctgcgatagccgggttctcgaacggtatatcctcggggcacgcgaggccgagaacgtcacaatgggctgtgccgaagggtgctcttttagcgaaaacattacagtgcctgacactaaagtgaacttctatacctggaagcgcatggatgtcgggcagcaggccgttgaagtgtggcagggtctagcgcttctatccgaagctattctccgtgggcaggccctgctggcgaattcctcacaaccctccgaaacccttcagctacatgtggataaggcagtgagctcactgcggtctctgacgtctctactgagggccctgggggcccagaaggaggcaacatctctcccggaagcaacttctgcggctccccttaggacttttaccgtggacaccctctgcaaactttttaggatctattcgaacttcctccgcggtaaattgacattatacactggcgaggcgtgtcgtaggggagaccgt

SEQ ID NO: 16040 - DNA, 576 bp, Artificial Sequence
  derived and/or modified sequence
atgggttcatgcgagtgccccgcacttctgcttctcctgtcactgctcctgctcccacttggactcccagtgctcggggcaccacctagactgatatgtgacagcagagtccttgaacgttacattctcggcgccagagaagctgagaatgtgactatggggtgcgctgaaggatgtagcttttccgagaacataacggtgcctgacaccaaggtgaacttttacacctggaagagaatggatgtcggtcagcaggcagtggaagtttggcagggactcgcccttctttcggaagcaattcttcgtggtcaagcgctgttggcaaattcctcacagccttcggaaacccttcaactgcacgtggacaaggctgtctcttcgcttcggagcctgacctccctcctccgagcacttggtgcacagaaggaagcaacgagcctgccggaggcaacctcggcagcaccgctgcgcacctttactgtcgatacgctgtgcaaattgtttcgcatttactcaaactttcttcgcggcaagctgactctttacactggagaagcatgtcgtcgaggcgatcgc

SEQ ID NO: 16041 - DNA, 576 bp, Artificial Sequence
  derived and/or modified sequence
atgggatcttgtgaatgtccagcattgttactcctattgtctttgctattacttccacttggattaccagttttaggagcaccaccacgattaatttgtgactcaagagttcttgaaagatatatattaggagcacgtgaagcagaaaatgtaactatgggatgtgcagaaggttgttcattctctgaaaatattacagttcctgatacaaaggtcaatttctatacatggaaaagaatggatgtaggacaacaagctgtagaagtatggcaaggacttgctcttttatcagaggctattttaagaggacaagcattacttgcaaattcttctcaaccaagtgaaacattacagttacatgttgacaaagcagtttcttcattaagaagtcttacttctcttcttagagctttaggagcccaaaaagaagccacatcattaccagaagctacatcagctgctcctctccgaacttttactgtcgatactctttgtaaattattcagaatttattctaattttttaagaggaaagttaacactttatacaggagaagcttgtagaagaggagataga

SEQ ID NO: 16042 - DNA, 576 bp, Artificial Sequence
  derived and/or modified sequence
atggggtcatgtgaatgcccagcactactcttactcttaagcctgttattgctacctttaggacttccggtattaggcgcccctccccgtctaatatgtgacagccgcgtcctggagcggtacatactgggtgcccgagaagccgagaatgtaaccatgggctgcgctgagggttgcagcttttcagagaacatcactgtaccggataccaaggtgaatttttacacctggaaaagaatggacgtaggccagcaagccgtggaagtatggcagggcttagcactgctctctgaggccattctgcggggccaagctctgctggccaactctagccagcctagcgaaacgctgcagctccatgtcgacaaagctgtctcctcccttaggtcacttacaagtctgctgagggcgctgggggcccagaaagaagcgacttctctgccagaggccacatcagcagctcccctccggactttcactgtggacaccctttgcaaattgtttcgcatttactctaacttcctgagaggcaagcttactctgtacaccggagaagcctgcagacggggagacagg

SEQ ID NO: 16043 - DNA, 576 bp, Artificial Sequence
  derived and/or modified sequence
atgggttcctgtgaatgtccagctctgctcctgctgctcagtctgcttctgctgcctctggggctgcccgtgctcggtgcgccgccaagattgatctgcgatagccgtgtcctcgagcgctacattctcggcgcccgggaggcagaaaacgtgacgatgggatgcgctgaagggtgctcgttttccgaaaacatcactgttcctgacacgaaggtgaacttctatacctggaagaggatggatgtcgggcaacaagcggtggaggtgtggcagggacttgcgctgctgtccgaagccattcttagaggtcaagcactgttggccaactcgtcacagcctagcgaaacccttcagctgcatgttgataaagcagtgtcatctcttagaagtcttacttccttgttgcgagccctgggagcacaaaaagaagcaaccagcctcccagaggcaacctccgccgcaccgcttcgaacctttactgtcgataccctttgtaagctcttcaggatatacagcaattttctgaggggtaagttgactctttatactggagaagcctgtagacgcggcgaccgc

SEQ ID NO: 16044 - DNA, 576 bp, Artificial Sequence
  derived and/or modified sequence
atgggatcgtgtgagtgcccggccctgctgctgctcttgtctctcctcctcctcccactgggactgccggtcctgggcgcaccgccaagactcatctgcgactcacgggttctcgaacggtacatcctcggcgccagagaagcggagaacgtcactatgggatgcgcagaaggatgttcgttctccgagaatatcaccgtcccggataccaaggtcaatttctatacttggaaaaggatggacgtcggccagcaagcggtggaagtgtggcagggtctggccctgctttcggaagctatcctgcgcggacaggcactgctggccaattcgtcccagccgtccgaaaccctgcagctgcacgtcgacaaggccgtctcatcgttgcggtccctcacttccctccttcgggcgttgggagcacagaaagaagcgaccagcctgcctgaggccacctccgcagccccgctcagaactttcactgtggatactctgtgcaagctgttcagaatctactcaaatttccttcgcggaaagctgaccctgtacaccggcgaggcgtgccgcagaggagatcgc

SEQ ID NO: 16045 - DNA, 576 bp, Artificial Sequence
  derived and/or modified sequence
atgggatcctgcgaatgtccggccctgctgctgctgctttccctcctgctgttgccgcttggacttccagtgctgggagcgccgccgcggctgatctgtgattcccgggtcctcgagcgctacatcctcggagcaagagaggcagaaaacgtcaccatggggtgcgctgaaggatgctcgttttcagaaaacatcactgtgccagatactaaggtgaatttctacacttggaagcgcatggacgtgggccagcaagcggtggaagtgtggcaggggctggcgttgctgtcggaagccatcctgcgaggacaggccctcctcgcgaacagcagccaaccgtcggagactctgcagcttcacgtcgacaaagccgtttcaagcctccggtccctgactagcctgctccgcgcccttggagcacaaaaggaagccacctccctccccgaagcaacttccgccgcgcctctgagaacctttaccgtggacaccctctgcaaactgttccggatctactcaaactttctgaggggaaagctcactctttacactggggaagcatgccgcaggggggacaga

SEQ ID NO: 16046 - DNA, 576 bp, Artificial Sequence
  derived and/or modified sequence
atgggaagctgtgaatgtccggctcttctcctgctgctgtcactgctgctcctccccctgggactgcccgttcttggagccccgccacgcctcatctgcgacagccgcgtcctggagcgctacattcttggggcacgggaagccgagaacgtcactatggggtgcgctgaaggatgctccttcagcgagaatatcaccgtgccggatactaaagtcaatttctacacgtggaagcggatggacgtgggccaacaggccgtggaagtgtggcagggcctggcactcctgtcggaagccatcttgcgcgggcaggcgctcttggccaactcttcgcaaccaagcgagactctgcagttgcacgtggataaggcggtgagctccctccgctccctgactagcctccttcgcgcccttggagcacaaaaagaagctacctccctcccggaggccacgtccgcagctccgctgagaactttcaccgtggacacgctgtgtaagctgttccggatctactccaacttccttcggggaaagctgacgctgtacactggtgaagcgtgcagaaggggtgacaga

SEQ ID NO: 16047 - DNA, 576 bp, Artificial Sequence
  derived and/or modified sequence
atgggaagctgtgagtgtcctgcacttctccttctgctgtcccttctccttctcccacttggccttcctgtgttgggggctcctccacgtctgatttgtgactcgagagtcctcgaacgctacattctcggtgcacgcgaggccgaaaatgtgactatgggatgcgcagaagggtgtagcttttccgaaaacattaccgtgccagataccaaggtgaacttttacacctggaaaagaatggacgtgggacaacaagctgtggaggtgtggcagggtctggcattgcttagcgaagcaatcctgagaggtcaagcactgcttgcgaattcgtcgcagccgtcggaaactctgcagcttcatgtggataaggcggtgtcgtcgctgcgaagcctcacctcactgctgagggccctcggagcacagaaagaagcgacctcgctgccagaagcgaccagcgcagccccgctgcgcaccttcactgtggatactctttgcaaactctttcgaatctacagcaactttctgagaggaaaactgaccctttacaccggggaagcctgtcggcgcggagataga

SEQ ID NO: 16048 - DNA, 576 bp, Artificial Sequence
  derived and/or modified sequence
atggggtcgtgcgagtgtcctgcgctcttgcttctcctgtcactgctcctgctgccactgggactccctgtgcttggagcaccacctagactcatatgtgattctcgggtgctggaacggtatattctgggagctagagaggcagaaaacgttactatgggatgcgcagagggttgttcattctcggagaacattacggtgcccgataccaaggtgaatttctatacgtggaagaggatggatgtgggtcagcaggcagttgaggtgtggcaaggcctggcactgctgtccgaggcaatacttcgaggtcaagcgcttcttgccaactcatcccaacccagcgaaaccttgcaactgcatgtcgataaggcagtcagctcgctccgtagcctgacttcgctgctgcgggctctgggcgcacagaaggaggcaactagcctgcccgaggcaacctcggcagcaccactccgcacttttactgtggatacgctttgcaaattgtttagaatctactccaatttcctgagaggtaagctgaccctttacactggagaagcatgtcggcgaggcgacaga

SEQ ID NO: 16049 - DNA, 576 bp, Artificial Sequence
  derived and/or modified sequence
atgggatcatgtgaatgcccagcgctgctgcttctcctgtcactactgcttctgcctctcggtctccccgttctcggcgcaccacctaggttgatctgtgacagcagagtgctcgagaggtatatcctaggcgcgagggaggcagagaatgtgactatgggatgtgcggaaggttgctctttcagcgagaacattacagtccccgacactaaggtgaatttctatacctggaaacggatggatgtcggccaacaagcagtggaagtgtggcaaggcctcgccttgctatccgaggccatcttgagggggcaggctctgttagctaatagctcgcagcccagtgagactcttcaactccacgttgataaagccgtttcctccttgagatcgctgaccagtctcctcagagccctcggtgcccagaaggaggcaacctctttaccggaggccactagcgctgcgcccctgcgaacattcaccgtggacaccctgtgcaaactcttccgaatttactccaactttctgcgtggcaagctgaccctgtacactggggaagcatgtcgccgcggtgatagg

SEQ ID NO: 16050 - DNA, 576 bp, Artificial Sequence
  derived and/or modified sequence
atgggctcctgtgaatgccccgccctgctgttgctgctttctcttttgctcctcccactgggccttcctgtcctcggtgctcctcctcgcctgatctgtgatagccgcgtactggaacgttacattctcggagcccgcgaggccgagaacgtgaccatgggctgcgcagaaggttgctccttctcagaaaacataaccgtccctgatactaaagttaacttttatacatggaaaaggatggatgtcggccagcaagctgtcgaagtgtggcagggccttgctctgctttccgaggcaattctccgcggccaggctcttctggctaactccagccagccatcagagacccttcagttgcacgttgataaagccgtgagctccttgcgctctttgacctctctgctgagagctttgggtgcccaaaaggaagctacttctctgcctgaggctacttcagctgctccactccgtacattcactgttgatacactgtgtaagcttttcaggatctatagcaatttcctgcgcggtaagctgaccctttacaccggtgaagcatgccgtcgtggagataga

SEQ ID NO: 16051 - DNA, 576 bp, Artificial Sequence
  derived and/or modified sequence
atgggaagctgtgaatgtcctgcacttcttcttctgctgtcgctgcttcttctgcctcttggacttcctgtgcttggtgcgcccccgagactgatatgtgattcgagagtgctcgagcgatacattctcggcgcacgggaagcagaaaacgtgactatgggctgtgccgagggttgctccttctccgagaatatcaccgtgcctgatacgaaagtcaacttttacacgtggaaaaggatggatgtggggcagcaagcagtggaggtctggcagggtctggctttgctgtctgaagcaattctgcgcggacaagcgctcctcgcaaattcgagccagccgtcagaaaccctgcaacttcatgtcgacaaggctgtctcctctcttcgcagccttactagcctgttgcgggccctcggagcacaaaaggaagcgacgtccctgccagaggccacctctgcagccccactgagaacctttactgtggatactctctgcaagctgtttcggatctactccaacttcttgcgcggtaagctcaccttgtatacgggggaagcatgtcgccggggagacaga

SEQ ID NO: 16052 - DNA, 582 bp, Artificial Sequence
  derived and/or modified sequence
atgggcgtgcacgagtgccccgcctggctgtggctgctgctgagcctgctgagcctgcccctgggcctgcccgtgctgggcgccccccccagactgatctgcgacagcagagtgctggagagatacctgctggaggccaaggaggccgagaacatcaccaccggctgcgccgagcactgcagcctgaacgagaacatcaccgtgcccgacaccaaggtgaacttctacgcctggaagagaatggaggtgggccagcaggccgtggaggtgtggcagggcctggccctgctgagcgaggccgtgctgagaggccaggccctgctggtgaacagcagccagccctgggagcccctgcagctgcacgtggacaaggccgtgagcggcctgagaagcctgaccaccctgctgagagccctgggcgcccagaaggaggccatcagcccccccgacgccgccagcgccgcccccctgagaaccatcaccgccgacaccttcagaaagctgttcagagtgtacagcaacttcctgagaggcaagctgaagctgtacaccggcgaggcctgcagaaccggcgacagatag

SEQ ID NO: 16053 - DNA, 582 bp, Artificial Sequence
  derived and/or modified sequence
atgggcgtgcacgaatgtcccgcctggttgtggctgcttctatctttactcagtctgcctctgggtctgcctgtactgggcgcaccacccagacttatatgcgactcccgggtactcgaacggtaccttcttgaagcaaaagaggctgagaacataactaccggatgcgctgagcactgcagcctcaatgagaacattacagtaccggatacaaaagtgaatttctacgcatggaagaggatggaggtgggacaacaggcagttgaggtctggcaggggctggcgctgctgtcagaggcagtcctaagaggacaggcgctcctggtgaactcgagtcagccatgggaacccttgcagctccatgttgataaggccgtcagcggattaagaagtctcaccaccctcctcagggctctgggagcgcaaaaggaggccataagcccgccagacgctgccagcgcagcgcccctcagaactatcaccgctgatacatttcgtaagctgttccgcgtctacagtaacttcctgcgagggaagctcaagctatacacaggtgaagcttgtagaacaggcgaccgctag

SEQ ID NO: 16054 - DNA, 582 bp, Artificial Sequence
  derived and/or modified sequence
atgggcgtgcatgaatgtcctgcctggctgtggctgctgctgagcctgctgagcctgcccctgggcctgcctgtgctgggcgccccacccaggctcatctgtgacagccgggtgctggagcgctacctgctggaggccaaggaggccgagaacatcaccaccggctgtgccgagcactgcagcctgaatgaaaacatcaccgtgcctgacaccaaggtgaacttctacgcctggaagaggatggaggtgggccagcaggccgtggaggtgtggcagggcctggccctgctgtctgaggccgtgctgcggggccaggccctgctggtgaacagcagccagccctgggagcccctgcagctgcacgtggacaaggctgtgtctggcctgcggagcctgaccaccctgctgcgggccctgggcgcccagaaggaggccatcagccccccagatgctgccagcgctgcccccctgcggaccatcacagctgacaccttcaggaagctgttccgggtgtacagcaacttcctgcggggcaagctgaagctgtacaccggggaggcctgcaggactggagacagatag

SEQ ID NO: 16055 - DNA, 1330 bp, Artificial Sequence
  derived and/or modified sequence
cccggagccggaccggggccaccgcgcccgctctgctccgacaccgcgccccctggacagccgccctctcctccaggcccgtggggctggccctgcaccgccgagcttcccgggatgagggcccccggtgtggtcacccggcgcgccccaggtcgctgagggaccccggccaggcgcggagatgggggtgcacgaatgtcctgcctggctgtggcttctcctgtccctgctgtcgctccctctgggcctcccagtcctgggcgccccaccacgcctcatctgtgacagccgagtcctggagaggtacctcttggaggccaaggaggccgagaatatcacgacgggctgtgctgaacactgcagcttgaatgagaatatcactgtcccagacaccaaagttaatttctatgcctggaagaggatggaggtcgggcagcaggccgtagaagtctggcagggcctggccctgctgtcggaagctgtcctgcggggccaggccctgttggtcaactcttcccagccgtgggagcccctgcagctgcatgtggataaagccgtcagtggccttcgcagcctcaccactctgcttcgggctctgggagcccagaaggaagccatctcccctccagatgcggcctcagctgctccactccgaacaatcactgctgacactttccgcaaactcttccgagtctactccaatttcctccggggaaagctgaagctgtacacaggggaggcctgcaggacaggggacagatgaccaggtgtgtccacctgggcatatccaccacctccctcaccaacattgcttgtgccacaccctcccccgccactcctgaaccccgtcgaggggctctcagctcagcgccagcctgtcccatggacactccagtgccagcaatgacatctcaggggccagaggaactgtccagagagcaactctgagatctaaggatgtcacagggccaacttgagggcccagagcaggaagcattcagagagcagctttaaactcagggacagagccatgctgggaagacgcctgagctcactcggcaccctgcaaaatttgatgccaggacacgctttggaggcgatttacctgttttcgcacctaccatcagggacaggatgacctggataacttaggtggcaagctgtgacttctccaggtctcacgggcatgggcactcccttggtggcaagagcccccttgacaccggggtggtgggaaccatgaagacaggatgggggctggcctctggctctcatggggtccaagttttgtgtattcttcaacctcattgacaagaactgaaaccaccaa

SEQ ID NO: 16056 - DNA, 582 bp, Artificial Sequence
  derived and/or modified sequence
atgggcgtgcacgagtgccccgcctggctgtggctgctgctgagcctgctgtcactccctctgggtctcccggtgctgggggcacctcctcggcttatttgcgacagtagggtgctagagcgatacctgctggaggcgaaagaggcggagaacatcactactgggtgtgctgaacattgtagtctgaacgaaaatatcaccgtgcccgataccaaggtgaatttctacgcctggaaacggatggaggttggtcagcaggccgtagaagtatggcagggcctggccctcttgtcagaggccgtacttagggggcaggcgcttctggtgaattctagccagccttgggaaccattacaactccacgtggataaggccgtgagcgggctgcgctcactcactacactgttaagagcccttggcgcccaaaaggaggccataagcccacccgacgctgctagcgcagcccccctaagaactattactgccgacactttccgaaagttattcagggtctattcaaatttcttgcggggaaagctgaagctgtataccggggaagcctgccgcaccggggatcggtag

SEQ ID NO: 16057 - DNA, 582 bp, Artificial Sequence
  derived and/or modified sequence
atgggcgtccacgaatgcccggcttggctgtggttgctgctgagcctgctgagcttacctctggggctgccagtgttgggcgcaccacccaggcttatctgcgactcgagggttctcgaaagatacttacttgaggccaaggaggctgagaacattactactgggtgcgccgagcactgctctctcaatgaaaacattactgtgcctgataccaaagtgaacttctatgcctggaaacgcatggaggtcggccagcaggcagtcgaggtgtggcaaggtctggcactactctcggaggccgtactgagaggacaggctctgctcgtgaatagttctcagccttgggaacccctgcagctgcacgtggacaaagccgtatccgggctacggagtttgacaaccttactgagagctctgggcgcacaaaaggaggcgatttcccctccagacgccgcttctgcggctcctttgaggacaattacagccgatacattccgaaagctgtttagagtgtattctaactttctgagaggcaaactcaagctgtataccggggaggcctgtaggactggtgatcgatag

SEQ ID NO: 16058 - DNA, 582 bp, Artificial Sequence
  derived and/or modified sequence
atgggtgtgcacgaatgtcccgcgtggctgtggctgctactgagccttctctctctgccacttggactgcctgtactcggtgccccccccaggttgatttgcgacagtagagtattggagcgttacttgctcgaggccaaggaggcggaaaacattactactggatgcgctgagcattgcagcctgaacgaaaatattactgtgccagacaccaaagtgaacttttacgcctggaaaaggatggaagtcgggcagcaggccgtggaggtgtggcaaggcctggcacttcttagcgaagctgttcttagaggacaagctttactggtgaacagcagccaaccatgggagccacttcagttacacgtcgataaagccgttagcggtctgcgtagtctgaccactctcctacgcgccctgggagctcagaaagaggcaatctccccccctgacgcagcgtccgctgcccctctgcggaccattacagccgacactttccggaagctgttccgcgtgtactcaaattttcttagaggcaaattgaaattgtatacaggcgaggcatgtcgtaccggcgatagatag

SEQ ID NO: 16059 - DNA, 582 bp, Artificial Sequence
  derived and/or modified sequence
atgggtgtccacgagtgtccagcttggctttggcttctgttaagccttctcagtctccctctcgggttgcccgtccttggcgccccaccgcggcttatttgtgactctagagtgctggaacgctatcttcttgaagcaaaagaagccgagaatattactacaggctgtgctgaacactgctctttaaacgaaaatattaccgtccctgacacaaaagttaacttttacgcttggaaacgaatggaggttggccaacaggccgttgaggtatggcaggggctcgccctgttgtctgaagccgttcttagaggacaagctttactggtgaacagcagccaaccatgggagccacttcagttacacgtcgataaagccgttagcggtctgcgtagtctgaccactctcctacgcgccctgggagctcagaaagaggcaatctccccccctgacgcagcgtccgctgcccctctgcggaccattacagccgacactttccggaagctgttccgcgtgtactcaaattttcttagaggcaaattgaaattgtatacaggcgaggcatgtcgtaccggcgatagatag

SEQ ID NO: 16060 - DNA, 751 bp, Artificial Sequence
  derived and/or modified sequence
gggaaataagagagaaaagaagagtaagaagaaatataagagccaccatgggagtgcacgagtgtcccgcgtggttgtggttgctgctgtcgctcttgagcctcccactgggactgcctgtgctgggggcaccacccagattgatctgcgactcacgggtacttgagaggtaccttcttgaagccaaagaagccgaaaacatcacaaccggatgcgccgagcactgctccctcaatgagaacattactgtaccggatacaaaggtcaatttctatgcatggaagagaatggaagtaggacagcaggccgtcgaagtgtggcaggggctcgcgcttttgtcggaggcggtgttgcggggtcaggccctcctcgtcaactcatcacagccgtgggagcccctccaacttcatgtcgataaagcggtgtcggggctccgcagcttgacgacgttgcttcgggctctgggcgcacaaaaggaggctatttcgccgcctgacgcggcctccgcggcacccctccgaacgatcaccgcggacacgtttaggaagctttttagagtgtacagcaatttcctccgcggaaagctgaaattgtatactggtgaagcgtgtaggacaggggatcgctgataataggctggagcctcggtggccatgcttcttgccccttgggcctccccccagcccctcctccccttcctgcacccgtacccccgtggtctttgaataaagtctgagtgggcggctctaga

SEQ ID NO: 16061 - DNA, 793 bp, Artificial Sequence
  derived and/or modified sequence
tcaagcttttggaccctcgtacagaagctaatacgactcactatagggaaataagagagaaaagaagagtaagaagaaatataagagccaccatgggggtgcccgaacgtcccaccctgctgcttttactctccttgctactgattcctctgggcctcccagtcctctgtgctcccccacgcctcatctgcgacagtcgagttctggagaggtacatcttagaggccaaggaggcagaaaatgtcacgatgggttgtgcagaaggtcccagactgagtgaaaatattacagtcccagataccaaagtcaacttctatgcttggaaaagaatggaggtggaagaacaggccatagaagtttggcaaggcctgtccctgctctcagaagccatcctgcaggcccaggccctgctagccaattcctcccagccaccagagacccttcagcttcatatagacaaagccatcagtggtctacgtagcctcacttcactgcttcgggtactgggagctcagaaggaattgatgtcgcctccagataccaccccacctgctccactccgaacactcacagtggatactttctgcaagctcttccgggtctacgccaacttcctccgggggaaactgaagctgtacacgggagaggtctgcaggagaggggacaggtgataataggctggagcctcggtggccatgcttcttgccccttgggcctccccccagcccctcctccccttcctgcacccgtacccccgtggtctttgaataaagtctgagtgggcggctctaga

SEQ ID NO: 16062 - DNA, 796 bp, Artificial Sequence
  derived and/or modified sequence
tcaagcttttggaccctcgtacagaagctaatacgactcactatagggaaataagagagaaaagaagagtaagaagaaatataagagccaccatgggagtgcacgagtgtcccgcgtggttgtggttgctgctgtcgctcttgagcctcccactgggactgcctgtgctgggggcaccacccagattgatctgcgactcacgggtacttgagaggtaccttcttgaagccaaagaagccgaaaacatcacaaccggatgcgccgagcactgctccctcaatgagaacattactgtaccggatacaaaggtcaatttctatgcatggaagagaatggaagtaggacagcaggccgtcgaagtgtggcaggggctcgcgcttttgtcggaggcggtgttgcggggtcaggccctcctcgtcaactcatcacagccgtgggagcccctccaacttcatgtcgataaagcggtgtcggggctccgcagcttgacgacgttgcttcgggctctgggcgcacaaaaggaggctatttcgccgcctgacgcggcctccgcggcacccctccgaacgatcaccgcggacacgtttaggaagctttttagagtgtacagcaatttcctccgcggaaagctgaaattgtatactggtgaagcgtgtaggacaggggatcgctgataataggctggagcctcggtggccatgcttcttgccccttgggcctccccccagcccctcctccccttcctgcacccgtacccccgtggtctttgaataaagtctgagtgggcggctctaga

SEQ ID NO: 16063 - DNA, 579 bp, Artificial Sequence
  derived and/or modified sequence
gggaaataagagagaaaagaagagtaagaagaaatataagagccaccgcacgagtgtcccgcgtggttgtggttgctgctgtcgctcaaacaccattgtcacactccagcctgtgctgggggcaccacccagattgatctgcgactccaaacaccattgtcacactccatcttgaagccaaagaagccgaaaacatcacaaccggatgcaaacaccattgtcacactccatgagaacattactgtaccggatacaaaggtcaatttctacaaacaccattgtcacactccaaggacagcaggccgtcgaagtgtggcaggggctcgcgctcaaacaccattgtcacactccagggtcaggccctcctcgtcaactcatcacagccgtgggacaaacaccattgtcacactccataaagcggtgtcggggctccgcagcttgacgacgttgctcaaacaccattgtcacactccacacgtttaggaagctttttagagtgtacagcaatttcctgagaaaagaagagtaagaagaaatagtggtctttgaataaagtctgagtgggcggctctagaaaaa

SEQ ID NO: 16064 - DNA, 761 bp, Artificial Sequence
  derived and/or modified sequence
gggaaataagagagaaaagaagagtaagaagaaatataagagccaccatgggggtgcccgaacgtcccaccctgctgcttttactctccttgctactgattcctctgggcctcccagtcctctgtgctcccccacgcctcatctgcgacagtcgagttctggagaggtacatcttagaggccaaggaggcagaaaatgtcacgatgggttgtgcagaaggtcccagactgagtgaaaatattacagtcccagataccaaagtcaacttctatgcttggaaaagaatggaggtggaagaacaggccatagaagtttggcaaggcctgtccctgctctcagaagccatcctgcaggcccaggccctgctagccaattcctcccagccaccagagacccttcagcttcatatagacaaagccatcagtggtctacgtagcctcacttcactgcttcgggtactgggagctcagaaggaattgatgtcgcctccagataccaccccacctgctccactccgaacactcacagtggatactttctgcaagctcttccgggtctacgccaacttcctccgggggaaactgaagctgtacacgggagaggtctgcaggagaggggacaggtgataataggagcctcggtggccatgcttcttgccccttgggcctccccccagcccctcctccccttcctgcacccgtaccccctccataaagtaggaaacactacagtggtctttgaataaagtctgagtgggcggc

SEQ ID NO: 16065 - DNA, 742 bp, Artificial Sequence
  derived and/or modified sequence
gggaaataagagagaaaagaagagtaagaagaaatataagagccaccatgggggtgcccgaacgtcccaccctgctgcttttactctccttgctactgattcctctgggcctcccagtcctctgtgctcccccacgcctcatctgcgacagtcgagttctggagaggtacatcttagaggccaaggaggcagaaaatgtcacgatgggttgtgcagaaggtcccagactgagtgaaaatattacagtcccagataccaaagtcaacttctatgcttggaaaagaatggaggtggaagaacaggccatagaagtttggcaaggcctgtccctgctctcagaagccatcctgcaggcccaggccctgctagccaattcctcccagccaccagagacccttcagcttcatatagacaaagccatcagtggtctacgtagcctcacttcactgcttcgggtactgggagctcagaaggaattgatgtcgcctccagataccaccccacctgctccactccgaacactcacagtggatactttctgcaagctcttccgggtctacgccaacttcctccgggggaaactgaagctgtacacgggagaggtctgcaggagaggggacaggtgataataggctggagcctcggtggccatgcttcttgccccttgggcctccccccagcccctcctccccttcctgcacccgtacccccgtggtctttgaataaagtctgagtgggcggc

SEQ ID NO: 16066 - DNA, 768 bp, Artificial Sequence
  derived and/or modified sequence
gggaaataagagagaaaagaagagtaagaagaaatataagagccaccatgggagtgcacgagtgtcccgcgtggttgtggttgctgctgtcgctcttgagcctcccactgggactgcctgtgctgggggcaccacccagattgatctgcgactcacgggtacttgagaggtaccttcttgaagccaaagaagccgaaaacatcacaaccggatgcgccgagcactgctccctcaatgagaacattactgtaccggatacaaaggtcaatttctatgcatggaagagaatggaagtaggacagcaggccgtcgaagtgtggcaggggctcgcgcttttgtcggaggcggtgttgcggggtcaggccctcctcgtcaactcatcacagccgtgggagcccctccaacttcatgtcgataaagcggtgtcggggctccgcagcttgacgacgttgcttcgggctctgggcgcacaaaaggaggctatttcgccgcctgacgcggcctccgcggcacccctccgaacgatcaccgcggacacgtttaggaagctttttagagtgtacagcaatttcctccgcggaaagctgaaattgtatactggtgaagcgtgtaggacaggggatcgctgataataggctggagcctcggtggccatgcttcttgccccttgggcctccccccagcccctcctccccttcctgcacccgtaccccctccataaagtaggaaacactacagtggtctttgaataaagtctgagtgggcggc

SEQ ID NO: 16067 - DNA, 745 bp, Artificial Sequence
  derived and/or modified sequence
gggaaataagagagaaaagaagagtaagaagaaatataagagccaccatgggagtgcacgagtgtcccgcgtggttgtggttgctgctgtcgctcttgagcctcccactgggactgcctgtgctgggggcaccacccagattgatctgcgactcacgggtacttgagaggtaccttcttgaagccaaagaagccgaaaacatcacaaccggatgcgccgagcactgctccctcaatgagaacattactgtaccggatacaaaggtcaatttctatgcatggaagagaatggaagtaggacagcaggccgtcgaagtgtggcaggggctcgcgcttttgtcggaggcggtgttgcggggtcaggccctcctcgtcaactcatcacagccgtgggagcccctccaacttcatgtcgataaagcggtgtcggggctccgcagcttgacgacgttgcttcgggctctgggcgcacaaaaggaggctatttcgccgcctgacgcggcctccgcggcacccctccgaacgatcaccgcggacacgtttaggaagctttttagagtgtacagcaatttcctccgcggaaagctgaaattgtatactggtgaagcgtgtaggacaggggatcgctgataataggctggagcctcggtggccatgcttcttgccccttgggcctccccccagcccctcctccccttcctgcacccgtacccccgtggtctttgaataaagtctgagtgggcggc

SEQ ID NO: 16068 - RNA, 725 nt, Artificial Sequence
  derived and/or modified sequence
gggaaauaagagagaaaagaagaguaagaagaaauauaagagccaccaugggagugcacgagugucccgcgugguugugguugcugcugucgcucuugagccucccacugggacugccugugcugggggcaccacccagauugaucugcgacucacggguacuugagagguaccuucuugaagccaaagaagccgaaaacaucacaaccggaugcgccgagcacugcucccucaaugagaacauuacuguaccggauacaaaggucaauuucuaugcauggaagagaauggaaguaggacagcaggccgucgaaguguggcaggggcucgcgcuuuugucggaggcgguguugcggggucaggcccuccucgucaacucaucacagccgugggagccccuccaacuucaugucgauaaagcggugucggggcuccgcagcuugacgacguugcuucgggcucugggcgcacaaaaggaggcuauuucgccgccugacgcggccuccgcggcaccccuccgaacgaucaccgcggacacguuuaggaagcuuuuuagaguguacagcaauuuccuccgcggaaagcugaaauuguauacuggugaagcguguaggacaggggaucgcugauaagcugccuucugcggggcuugccuucuggccaugcccuucuucucucccuugcaccuguaccucuuggucuuugaauaaagccugaguaggaag

SEQ ID NO: 16069 - RNA, 582 nt, Artificial Sequence
  derived and/or modified sequence
augggugugcacgaaugucccgcguggcuguggcugcuacugagccuucucucucugccacuuggacugccuguacucggugccccccccagguugauuugcgacaguagaguauuggagcguuacuugcucgaggccaaggaggcggaaaacauuacuacuggaugcgcugagcauugcagccugaacgaaaauauuacugugccagacaccaaagugaacuuuuacgccuggaaaaggauggaagucgggcagcaggccguggagguguggcaaggccuggcacuucuuagcgaagcuguucuuagaggacaagcuuuacuggugaacagcagccaaccaugggagccacuucaguuacacgucgauaaagccguuagcggucugcguagucugaccacucuccuacgcgcccugggagcucagaaagaggcaaucucccccccugacgcagcguccgcugccccucugcggaccauuacagccgacacuuuccggaagcuguuccgcguguacucaaauuuucuuagaggcaaauugaaauuguauacaggcgaggcaugucguaccggcgauagauag

SEQ ID NO: 16070 - RNA, 582 nt, Artificial Sequence
  derived and/or modified sequence
auggguguccacgaguguccagcuuggcuuuggcuucuguuaagccuucucagucucccucucggguugcccguccuuggcgccccaccgcggcuuauuugugacucuagagugcuggaacgcuaucuucuugaagcaaaagaagccgagaauauuacuacaggcugugcugaacacugcucuuuaaacgaaaauauuaccgucccugacacaaaaguuaacuuuuacgcuuggaaacgaauggagguuggccaacaggccguugagguauggcaggggcucgcccuguugucugaagccguucuuagaggacaagcuuuacuggugaacagcagccaaccaugggagccacuucaguuacacgucgauaaagccguuagcggucugcguagucugaccacucuccuacgcgcccugggagcucagaaagaggcaaucucccccccugacgcagcguccgcugccccucugcggaccauuacagccgacacuuuccggaagcuguuccgcguguacucaaauuuucuuagaggcaaauugaaauuguauacaggcgaggcaugucguaccggcgauagauag

SEQ ID NO: 16071 - RNA, 751 nt, Artificial Sequence
  derived and/or modified sequence
gggaaauaagagagaaaagaagaguaagaagaaauauaagagccaccaugggagugcacgagugucccgcgugguugugguugcugcugucgcucuugagccucccacugggacugccugugcugggggcaccacccagauugaucugcgacucacggguacuugagagguaccuucuugaagccaaagaagccgaaaacaucacaaccggaugcgccgagcacugcucccucaaugagaacauuacuguaccggauacaaaggucaauuucuaugcauggaagagaauggaaguaggacagcaggccgucgaaguguggcaggggcucgcgcuuuugucggaggcgguguugcggggucaggcccuccucgucaacucaucacagccgugggagccccuccaacuucaugucgauaaagcggugucggggcuccgcagcuugacgacguugcuucgggcucugggcgcacaaaaggaggcuauuucgccgccugacgcggccuccgcggcaccccuccgaacgaucaccgcggacacguuuaggaagcuuuuuagaguguacagcaauuuccuccgcggaaagcugaaauuguauacuggugaagcguguaggacaggggaucgcugauaauaggcuggagccucgguggccaugcuucuugccccuugggccuccccccagccccuccuccccuuccugcacccguacccccguggucuuugaauaaagucugagugggcggcucuaga

SEQ ID NO: 16072 - RNA, 579 nt, Artificial Sequence
  derived and/or modified sequence
gggaaauaagagagaaaagaagaguaagaagaaauauaagagccaccgcacgagugucccgcgugguugugguugcugcugucgcucaaacaccauugucacacuccagccugugcugggggcaccacccagauugaucugcgacuccaaacaccauugucacacuccaucuugaagccaaagaagccgaaaacaucacaaccggaugcaaacaccauugucacacuccaugagaacauuacuguaccggauacaaaggucaauuucuacaaacaccauugucacacuccaaggacagcaggccgucgaaguguggcaggggcucgcgcucaaacaccauugucacacuccagggucaggcccuccucgucaacucaucacagccgugggacaaacaccauugucacacuccauaaagcggugucggggcuccgcagcuugacgacguugcucaaacaccauugucacacuccacacguuuaggaagcuuuuuagaguguacagcaauuuccugagaaaagaagaguaagaagaaauaguggucuuugaauaaagucugagugggcggcucuagaaaaa

SEQ ID NO: 16073 - protein, 103 aa, Artificial Sequence
  derived and/or modified sequence
MPVSVSSGRTFPKRGQTCVVHYTGMLEDGKKFDSSRDRNKPFKFMLGKQEVIRGWEEGVAQMSVGQRAKLTISPDYAYGATGHPGIIPPHATLVFDVELLKLE

SEQ ID NO: 16074 - protein, 108 aa, Artificial Sequence
  derived and/or modified sequence
MGVQVETISPGDGRTFPKRGQTCVVHYTGMLEDGKKFDSSRDRNKPFKFMLGKQEVIRGWEEGVAQMSVGQRAKLTISPDYAYGATGHPGIIPPHATLVFDVELLKLE

SEQ ID NO: 16075 - protein, 92 aa, Artificial Sequence
  derived and/or modified sequence
MGVQVETISPGDGMLEDGKKFDSSRDRNKPFKFMLGKQEVIRGWEEGVAQMSVGQRAKLTISPDYAYGATGHPGIIPPHATLVFDVELLKLE

SEQ ID NO: 16076 - protein, 92 aa, Artificial Sequence
  derived and/or modified sequence
MGVHVETISPGDGMLEDGKKFDSSRDRNKPFKFMLGKQEVIRGWEEGVVQMSVGQRAKLTISPDYAYGATGHPGIIPPHATLVFDVELLKLE

SEQ ID NO: 16077 - protein, 108 aa, Artificial Sequence
  derived and/or modified sequence
MGVHVETISPGDWRTFPKRSQTCVMHYTGMLEDGKKFDSSRDRNKPFKFMLGKQEVIRGWEEGVVQMSVGQRAKLTISPDYAYGATGHPGIIPPHATLVFDVELLKLE

SEQ ID NO: 16078 - DNA, 312 bp, Artificial Sequence
  derived and/or modified sequence
atgcccgtgagcgtgagcagcggcagaaccttccccaagagaggccagacctgcgtggtgcactacaccggcatgctggaggacggcaagaagttcgacagcagcagagacagaaacaagcccttcaagttcatgctgggcaagcaggaggtgatcagaggctgggaggagggcgtggcccagatgagcgtgggccagagagccaagctgaccatcagccccgactacgcctacggcgccaccggccaccccggcatcatccccccccacgccaccctggtgttcgacgtggagctgctgaagctggagtag

SEQ ID NO: 16079 - DNA, 327 bp, Artificial Sequence
  derived and/or modified sequence
atgggcgtgcaggtggagaccatcagccccggcgacggcagaaccttccccaagagaggccagacctgcgtggtgcactacaccggcatgctggaggacggcaagaagttcgacagcagcagagacagaaacaagcccttcaagttcatgctgggcaagcaggaggtgatcagaggctgggaggagggcgtggcccagatgagcgtgggccagagagccaagctgaccatcagccccgactacgcctacggcgccaccggccaccccggcatcatccccccccacgccaccctggtgttcgacgtggagctgctgaagctggagtag

SEQ ID NO: 16080 - DNA, 279 bp, Artificial Sequence
  derived and/or modified sequence
atgggcgtgcaggtggagaccatcagccccggcgacggcatgctggaggacggcaagaagttcgacagcagcagagacagaaacaagcccttcaagttcatgctgggcaagcaggaggtgatcagaggctgggaggagggcgtggcccagatgagcgtgggccagagagccaagctgaccatcagccccgactacgcctacggcgccaccggccaccccggcatcatccccccccacgccaccctggtgttcgacgtggagctgctgaagctggagtag

SEQ ID NO: 16081 - DNA, 312 bp, Artificial Sequence
  derived and/or modified sequence
atgcccgtgagcgtttcaagcggccgcacttttcccaagagagggcagacctgcgttgtgcactacaccgggatgctcgaggatggaaagaaatttgactcatcgcgggacagaaacaaacctttcaaattcatgctgggcaagcaggaggtgatacgagggtgggaagagggtgtggctcagatgtccgtgggacagcgcgcaaaattgaccatttctcccgattacgcctacggcgccaccggccatccggggattatccccccacacgccacactcgtgttcgacgtggaattactgaaattggagtag

SEQ ID NO: 16082 - DNA, 327 bp, Artificial Sequence
  derived and/or modified sequence
atgggggtccaggttgaaactatatcgccaggggacggaaggacctttccaaagagaggccagacatgcgtagttcactatactggcatgctcgaggacggcaagaagttcgatagctctagagatagaaacaagccctttaaattcatgctcggcaagcaggaggttatcagaggctgggaggagggtgtggcccagatgtccgtgggacagcgagcgaagctcaccattagccccgactatgcttacggtgccacaggccatcccgggatcatccctccacacgccaccttagtcttcgatgtcgagctgttgaagcttgagtag

SEQ ID NO: 16083 - DNA, 312 bp, Artificial Sequence
  derived and/or modified sequence
atgccagtgtctgtgtcatctggtcgtacttttccgaagcgcggccagacgtgcgtagtccactacacggggatgctcgaggatggtaaaaaatttgactcttctcgggatagaaataaacctttcaagttcatgctcggcaaacaggaggtgatccgggggtgggaagaaggcgtggctcaaatgagcgtcgggcagcgcgccaagctgacaatttctccagattatgcatatggcgctactgggcacccaggaattatccctcctcacgccacactcgtattcgacgttgaactgctgaaactggagtag

SEQ ID NO: 16084 - DNA, 327 bp, Artificial Sequence
  derived and/or modified sequence
atgggggttcaagtggagaccattagcccgggggacgggaggaccttccctaaacgagggcagacgtgtgtggttcattacaccggaatgcttgaggacggaaaaaaatttgactcttcacgtgatcgcaacaagcctttcaagttcatgctgggaaagcaggaggtgatcagaggttgggaagaaggggtggctcagatgtctgttgggcagcgagctaagctgaccatttcacctgactacgcatacggagcgacaggacatcctgggataatcccgccgcatgctacactcgttttcgacgtagagttgctgaagctggaatag

SEQ ID NO: 16085 - DNA, 279 bp, Artificial Sequence
  derived and/or modified sequence
atgggcgttcaggtggaaacaatttctcccggggacggtatgttagaagacggtaagaaattcgactcttcacgcgatcggaataagccattcaagttcatgctcggcaagcaggaagtcattaggggctgggaagaaggggtggcacagatgtccgttggccaacgggctaaactgactataagccccgactacgcttacggcgctactggtcacccaggaattatccccccacacgcaaccctggtcttcgacgttgagctgctgaaactggaatag

SEQ ID NO: 16086 - DNA, 705 bp, Artificial Sequence
  derived and/or modified sequence
ggtgagtagtggcgcgcggcggctcggagtacctctgccgccgcgcgcatcggctcagcatgcccgtctctgtctcctcagggcgcaccttccccaagcgcggccagacctgcgtggtgcactacaccgggatgcttgaagatggaaagaaatttgattcctcccgggacagaaacaagccctttaagtttatgctaggcaagcaggaggtgatccgaggctgggaagaaggggttgcccagatgagtgtgggtcagagagccaaactgactatatctccagattatgcctatggtgccactgggcacccaggcatcatcccaccacatgccactctcgtcttcgatgtggagcttctaaaactggaatgacaggaatggcctcctcccttagctccctgttcttgggtaaggaaatggaatactgaagggcccttcactgcctttgctcctcccatgttatgcccagcgtttgatgggtagcagagagaacaaaaaacaccacaaggctatttttccccctgcattctttctgtattgagtatcctttcagtgttattagtgtatgctttgaatgtaaaaattggtcaccctaaggaaaggaattggcatgtgtatgttcccagttcaactcatggagatggcagctgtttaaatgtttttctatgtagtttataaattaaaactgaattgaggactatggaaa

SEQ ID NO: 16087 - DNA, 747 bp, Artificial Sequence
  derived and/or modified sequence
ccgcccgcccgctcagcgtccgccgccgccatgggagtgcaggtggaaaccatctccccaggagacgggcgcaccttccccaagcgcggccagacctgcgtggtgcactacaccgggatgcttgaagatggaaagaaatttgattcctcccgggacagaaacaagccctttaagtttatgctaggcaagcaggaggtgatccgaggctgggaagaaggggttgcccagatgagtgtgggtcagagagccaaactgactatatctccagattatgcctatggtgccactgggcacccaggcatcatcccaccacatgccactctcgtcttcgatgtggagcttctaaaactggaatgacaggaatggcctcctcccttagctccctgttcttgggtaaggaaatggaatactgaagggcccttcactgcctttgctcctcccatgttatgcccagcgtttgatgggtagcagagagaacaaaaaacaccacaaggctatttttccccctgcattctttctgtattgagtatcctttcagtgttattagtgtatgctttgaatgtaaaaattggtcaccctaaggaaaggaattggcatgtgtatgttcccagttcaactcatggagatggcagctgtttaaatgtttttctatgtagtttataaattaaaactgaattgaggactatggaaatgtaggccaaatttgtagtgccaacattttagttctttggaaataagactcttaat

SEQ ID NO: 16088 - DNA, 976 bp, Artificial Sequence
  derived and/or modified sequence
gcccgtcgcgccgcccgcccgctcagcgtccgccgccgccatgggagtgcaggtggaaaccatctccccaggagacggtgagtagtggcgcgcggcggctcggagtacctctgccgccgcgcgcatcggctcagcatgcccgtctctgtctcctcagggcgcaccttccccaagcgcggccagacctgcgtggtgcactacaccgggatgcttgaagatggaaagaaatttgattcctcccgggacagaaacaagccctttaagtttatgctaggcaagcaggaggtgatccgaggctgggaagaaggggttgcccagatgagtgtgggtcagagagccaaactgactatatctccagattatgcctatggtgccactgggcacccaggcatcatcccaccacatgccactctcgtcttcgatgtggagcttctaaaactggaatgacaggaatggcctcctcccttagctccctgttcttggatctgccatggagggatctggtgcctccagacatgtgcacatgaatccatatggagcttttcctgatgttccactccactttgtatagacatctgccctgactgaatgtgttctgtcactcagctttgcttccgacacctctgtttcctcttcccctttctcctcgtatgtgtgtttacctaaactatatgccataaacctcaagttattcattttattttgttttcattttggggtgaagattcagtttcagtcttttggatataggtttccaattaagtacatggtcaagtattaacagcacaagtggtaggttaacattagaataggaattggtgttggggggggggtttgcaagaatattttattttaattttttggatgaaatttttatctattatatattaaacattcttgctgctgcgctgcaaagccatagcagatttgaggcgctgttgaggactgaattactctccaagttgagagatgtctt

SEQ ID NO: 16089 - DNA, 1622 bp, Artificial Sequence
  derived and/or modified sequence
gtcgcgcgccgtgtggggcgcgcacgcagggctgggcgtgagggggcgtgcgcgtgcgcaggcgacgcgccgaggtactaggcagagccgtggaaccgccgccaggtcgctgttggtccacgccgcccgtcgcgccgcccgcccgctcagcgtccgccgccgccatgggagtgcaggtggaaaccatctccccaggagacgggcgcaccttccccaagcgcggccagacctgcgtggtgcactacaccgggatgcttgaagatggaaagaaatttgattcctcccgggacagaaacaagccctttaagtttatgctaggcaagcaggaggtgatccgaggctgggaagaaggggttgcccagatgagtgtgggtcagagagccaaactgactatatctccagattatgcctatggtgccactgggcacccaggcatcatcccaccacatgccactctcgtcttcgatgtggagcttctaaaactggaatgacaggaatggcctcctcccttagctccctgttcttggatctgccatggagggatctggtgcctccagacatgtgcacatgaatccatatggagcttttcctgatgttccactccactttgtatagacatctgccctgactgaatgtgttctgtcactcagctttgcttccgacacctctgtttcctcttcccctttctcctcgtatgtgtgtttacctaaactatatgccataaacctcaagttattcattttattttgttttcattttggggtgaagattcagtttcagtcttttggatataggtttccaattaagtacatggtcaagtattaacagcacaagtggtaggttaacattagaataggaattggtgttggggggggggtttgcaagaatattttattttaattttttggatgaaatttttatctattatatattaaacattcttgctgctgcgctgcaaagccatagcagatttgaggcgctgttgaggactgaattactctccaagttgagagatgtctttgggttaaattaaaagccctacctaaaactgaggtggggatggggagagcctttgcctccaccattcccacccaccctccccttaaaccctctgcctttgaaagtagatcatgttcactgcaatgctggacactacaggtatctgtccctgggccagcagggacctctgaagccttctttgtggccttttttttttttcatcctgtggtttttctaatggactttcaggaattttgtaatctcataactttccaagctccaccacttcctaaatcttaagaactttaattgacagtttcaattgaaggtgctgtttgtagacttaacacccagtgaaagcccagccatcatgacaaatccttgaatgttctcttaagaaaatgatgctggtcatcgcagcttcagcatctcctgttttttgatgcttggctccctctgctgatctcagtttcctggcttttcctccctcagccccttctcacccctttgctgtcctgtgtagtgatttggtgagaaatcgttgctgcacccttcccccagcaccatttatgagtctcaagttttattattgcaataaaagtgctttatgccggcttttctca

SEQ ID NO: 16090 - DNA, 279 bp, Artificial Sequence
  derived and/or modified sequence
atgggagtgcaggtggaaaccatctccccaggagacgggatgcttgaagatggaaagaaatttgattcctcccgggacagaaacaagccctttaagtttatgctaggcaagcaggaggtgatccgaggctgggaagaaggggttgcccagatgagtgtgggtcagagagccaaactgactatatctccagattatgcctatggtgccactgggcacccaggcatcatcccaccacatgccactctcgtcttcgatgtggagcttctaaaactggaatga

SEQ ID NO: 16091 - DNA, 312 bp, Artificial Sequence
  derived and/or modified sequence
atgcctgtgtctgtgagcagcggccgcaccttccccaagaggggccagacctgtgtggtgcactacacaggcatgctggaggatggcaagaagtttgacagcagccgggacaggaacaagcccttcaagttcatgctgggcaagcaggaggtgatccggggctgggaggagggcgtggcccagatgtctgtgggccagagggccaagctgaccatcagcccagactatgcctacggggccaccggccaccctggcatcatccccccccacgccaccctggtgtttgatgtggagctgctgaagctggagtag

SEQ ID NO: 16092 - DNA, 327 bp, Artificial Sequence
  derived and/or modified sequence
atgggcgtgcaggtggagaccatcagccctggagatggccgcaccttccccaagaggggccagacctgtgtggtgcactacacaggcatgctggaggatggcaagaagtttgacagcagccgggacaggaacaagcccttcaagttcatgctgggcaagcaggaggtgatccggggctgggaggagggcgtggcccagatgtctgtgggccagagggccaagctgaccatcagcccagactatgcctatggagccaccggccaccctggcatcatcccccctcatgccaccctggtgtttgatgtggagctgctgaagctggagtag

SEQ ID NO: 16093 - DNA, 279 bp, Artificial Sequence
  derived and/or modified sequence
atgggcgtgcaggtggagaccatcagccctggagatggcatgctggaggatggcaagaagtttgacagcagccgggacaggaacaagcccttcaagttcatgctgggcaagcaggaggtgatccggggctgggaggagggcgtggcccagatgtctgtgggccagagggccaagctgaccatcagcccagactatgcctatggagccaccggccaccctggcatcatcccccctcatgccaccctggtgtttgatgtggagctgctgaagctggagtag

SEQ ID NO: 16094 - DNA, 312 bp, Artificial Sequence
  derived and/or modified sequence
atgcccgtgagcgtgagcagcggccggaccttccccaagcggggccagacttgcgttgtccactacaccggcatgctggaggatggtaagaagttcgattcctccagagaccgcaataaaccgttcaagtttatgcttggcaaacaggaagtgatccgaggatgggaggagggggtggcacagatgtctgtgggtcagcgagcaaaacttacaatctcccctgattatgcctacggcgctaccgggcatcccggcattataccccctcatgcaacactggttttcgatgtcgagttgctgaagctggagtag

SEQ ID NO: 16095 - DNA, 327 bp, Artificial Sequence
  derived and/or modified sequence
atgggcgtgcaggtggagaccatcagccccggcgacggccggacctttcctaaacgtggccagacctgtgtagtccactacaccggtatgctggaggatggtaaaaaattcgactcctctcgggacaggaacaagcccttcaagtttatgctgggcaagcaggaagtcatacggggatgggaggagggcgtcgctcagatgagtgtgggtcagcgcgctaagctgaccatcagccctgattatgcgtacggtgctaccgggcaccctgggatcataccccctcacgcaactttagtgttcgatgtggaattgcttaaacttgaatag

SEQ ID NO: 16096 - DNA, 312 bp, Artificial Sequence
  derived and/or modified sequence
atgcccgtgagcgtgagcagcggccggaccttccccaagcggggccaaacctgcgtcgtgcattacaccgggatgcttgaagatgggaagaagttcgacagcagtagagacagaaacaaaccttttaaattcatgctcgggaagcaggaggtgatccgcggttgggaagaaggtgtggcacagatgtctgtggggcaacgcgctaagttgacaatctcccctgattatgcatatggagctactggacatccgggtatcatcccaccccacgctactctagtctttgatgtcgaactcttgaaattagaatag

SEQ ID NO: 16097 - DNA, 327 bp, Artificial Sequence
  derived and/or modified sequence
atgggcgtgcaggtggagaccatcagccccggcgacggccggaccttccctaaaaggggtcagacatgcgtcgtgcattacaccggcatgctggaggacggcaaaaagttcgattcaagccgagacagaaacaaaccattcaaattcatgttgggaaagcaggaggttatcagaggctgggaagaaggcgtggctcagatgagtgtggggcagcgcgccaagctgactatctcaccagactacgcttacggagcgactggccaccccggcatcatcccccctcacgctacgctcgtttttgatgtcgagctgctgaagctggaatag

SEQ ID NO: 16098 - DNA, 279 bp, Artificial Sequence
  derived and/or modified sequence
atgggcgtgcaggtggagaccatcagccccggcgacggcatgctggaggatgggaagaagtttgactcctctcgcgataggaataagccattcaagttcatgctgggcaagcaggaagtcataagaggctgggaggaaggcgtggcccagatgagtgtcgggcaacgtgctaaactgacaataagccctgactatgcttatggggcgaccgggcatcctggtatcatcccccctcatgctaccttggtttttgacgttgaactgctgaaactggaatag

SEQ ID NO: 16099 - DNA, 312 bp, Artificial Sequence
  derived and/or modified sequence
atgcccgtgtcggtgtcaagcgggagaactttccctaagcggggtcagacctgcgttgtgcattatacgggcatgttagaggacggcaagaagttcgacagttctagggaccgaaataaacctttcaaatttatgctgggcaaacaagaggttatccggggttgggaggagggagtggctcagatgtcagtcggacaaagggccaagcttactatctccccagactacgcctacggcgcaactggacatcccggaataatccctcctcacgccactttggtgtttgatgtagaactgctcaagctggagtag

SEQ ID NO: 16100 - DNA, 327 bp, Artificial Sequence
  derived and/or modified sequence
atgggggtacaggtcgaaaccattagtcctggcgatggaaggacctttcctaagagagggcagacctgtgtcgtgcattatacgggcatgcttgaagacggaaaaaaatttgattcctcccgggatcgcaataaaccttttaagttcatgctgggaaagcaggaagtcattcgtggctgggaagaaggcgtggcccagatgtccgtgggtcaacgggctaagcttacaatatccccagattatgcctatggcgcaacagggcaccccggaatcatcccccctcacgctaccctcgtcttcgatgtggagctgctgaaactggaatag

SEQ ID NO: 16101 - DNA, 312 bp, Artificial Sequence
  derived and/or modified sequence
atgcccgtgtcagtgagctcagggcgtacatttcccaagcgaggccagacctgtgttgtgcactacaccggaatgctagaggacggcaaaaagttcgactcttccagagacaggaataagccgtttaaattcatgttgggtaagcaggaagtcataaggggatgggaggaaggtgtggcccagatgtctgttggtcaacgtgccaagctgactattagcccggactacgcatatggggctaccggccatccgggtatcatccccccacatgcgaccctggtgttcgatgtggagctgctaaagctggaatag

SEQ ID NO: 16102 - DNA, 327 bp, Artificial Sequence
  derived and/or modified sequence
atgggagtgcaggtggaaacaattagccccggtgatgggcgaaccttccctaagcggggacagacctgtgttgttcactacactggcatgttagaggacggtaagaagttcgactcaagtagagatcgtaacaaaccctttaagtttatgttaggtaagcaggaagtgattcgaggctgggaggagggcgtagctcaaatgtctgtgggtcagagagccaagctgacaattagccccgactacgcatacggcgctaccgggcaccccggtattattcctcctcacgccaccttggtgttcgacgtggagctcctgaagctggagtag

SEQ ID NO: 16103 - DNA, 279 bp, Artificial Sequence
  derived and/or modified sequence
atgggggtccaggtcgagaccattagtccgggtgatgggatgcttgaggacgggaaaaaatttgattcatcaagagataggaataaacccttcaaatttatgctgggcaagcaggaagtgatcagaggttgggaggagggcgtagcccaaatgtccgtgggacagcgggcaaagctgaccatctccccagattacgcatatggggcaacaggacacccgggaatcatccccccacacgccacccttgtgtttgacgtggaactgctgaagctggaatag

SEQ ID NO: 16104 - DNA, 279 bp, Artificial Sequence
  derived and/or modified sequence
atgggcgtgcacgtggagaccatcagccccggcgacggcatgctggaggacggcaagaagttcgacagcagcagagacagaaacaagcccttcaagttcatgctgggcaagcaggaggtgatcagaggctgggaggagggcgtggtgcagatgagcgtgggccagagagccaagctgaccatcagccccgactacgcctacggcgccaccggccaccccggcatcatccccccccacgccaccctggtgttcgacgtggagctgctgaagctggagtag

SEQ ID NO: 16105 - DNA, 327 bp, Artificial Sequence
  derived and/or modified sequence
atgggcgtgcacgtggagaccatcagccccggcgactggagaaccttccccaagagaagccagacctgcgtgatgcactacaccggcatgctggaggacggcaagaagttcgacagcagcagagacagaaacaagcccttcaagttcatgctgggcaagcaggaggtgatcagaggctgggaggagggcgtggtgcagatgagcgtgggccagagagccaagctgaccatcagccccgactacgcctacggcgccaccggccaccccggcatcatccccccccacgccaccctggtgttcgacgtggagctgctgaagctggagtag

SEQ ID NO: 16106 - DNA, 279 bp, Artificial Sequence
  derived and/or modified sequence
atgggggttcacgtcgagacaatctcacccggagatggtatgctggaagatggcaaaaaatttgactccagcagggaccggaataagccttttaaatttatgctcggcaagcaggaggtcataagagggtgggaggaaggagtggtgcagatgtccgtggggcagcgggcaaaactgaccatctctccggattacgcctatggggctacaggtcaccccggcatcatccccccacatgccacactggtattcgacgttgaacttctgaaattagaatag

SEQ ID NO: 16107 - DNA, 327 bp, Artificial Sequence
  derived and/or modified sequence
atgggcgtgcatgtagagactattagtcccggggattggagaacttttcctaaacgaagccagacctgtgtgatgcactataccgggatgctggaggacggaaaaaagttcgatagctcccgcgaccgcaataaacccttcaagttcatgctgggaaagcaggaagtgatcagaggttgggaagagggagtcgtgcaaatgagtgtcggtcagagagcgaaactgacaattagccctgactacgcctacggggcgaccggacatcccgggattattccaccacatgccacgctcgtgttcgacgtcgaactgctgaagctagaatag

SEQ ID NO: 16108 - DNA, 279 bp, Artificial Sequence
  derived and/or modified sequence
atgggagtgcacgtggaaaccatctccccaggagacgggatgcttgaagatggaaagaaatttgattcctcccgggacagaaacaagccctttaagtttatgctaggcaagcaggaggtgatccgaggctgggaagaaggggttgtccagatgagtgtgggtcagagagccaaactgactatatctccagattatgcctatggtgccactgggcacccaggcatcatcccaccacatgccactctcgtcttcgatgtggagcttctaaaactggaatga

SEQ ID NO: 16109 - DNA, 1579 bp, Artificial Sequence
  derived and/or modified sequence
atgggcaggcaacgcgctgagggactaggcagagccgtggaaccgccgccaggtcgctgtcggtccacgccgcccgtcgcgctgcccgcccgctcggcgtcggccgccgccatgggagtgcacgtggaaaccatctccccaggagactggcgcaccttcccgaagcgcagccagacctgcgtgatgcactacaccgggatgcttgaagatggaaagaaatttgattcctcccgggacagaaacaagccctttaagtttatgctaggcaagcaggaggtgatccgaggctgggaagaaggggttgtccagatgagtgtgggtcagagagccaaactgactatatctccagattatgcctatggtgccactgggcacccaggcatcatcccaccacatgccactctcgtcttcgatgtggagcttctaaaactggaatgacaggaatggcctcctcccttagctccctgttcttggatctgccatggagggatctggtgcctccagacgtgtgcacataaatccatatggagcttttcctgatgttccactccactttgtatagacatctgccccaactgaatgtgttctgtcactcagctttgcttccgacacctctgtttcctcttcccctttctcctggtatgtgcgtttacctaaactatatgccataaacgtcaagttattcattttactttttcattttggggtgaagattcagtttcagtcttttgaatataggtttccaattaagtacatggtcaagtgttaacagcacaagtgataagttaacgttaggataggaattggtgttgagggggttgcaagaatattttattttaattttttggatgaaatttttatctattatatattaaacattcttgctgctgcgctgcaaaaccatagcagatttgaggcactgttgaggactgaattattctccaagttgagagatgtccttgggttaaattaaaagccctacctaaaactgaggtggggatggggagaggctttgcctccaccattcccaccccaccctccccttaaaccctctgcctttgaaagcaggtcatgttcactgcgatgctggacactacaggtatctgtccctgggccagcagggacctctgaagccttctttgtggccttatttttttttttttttttttcatcctgtggtttttctaacggactttcaggaattttgtaatctcataactttccaagctccaccacttcctaaatcttaagaactttaattgacagtttcaattgaaggtgctgtttgtagacttaacacccagtgaaagcccagccatcatgacaaatccttgaatgttctcttaagaaaatgatgctggtcatcccagcttcagcatctcctgttttttgatgcttggctccctctgctgatctcagagtttcctggcttttcctccctcagccacttctcacccctttgctgtcctgtgtagtgatttggtgagaggaatcgttgctgcccccttcccctagcaccatatatgagtctcaagttttattattgcaataaaagtgctttatgctggcttttctcaaa

SEQ ID NO: 16110 - DNA, 279 bp, Artificial Sequence
  derived and/or modified sequence
atgggcgtgcacgtggagaccatcagccctggagatggcatgctggaggatggcaagaagtttgacagcagccgggacaggaacaagcccttcaagttcatgctgggcaagcaggaggtgatccggggctgggaggagggcgtggtgcagatgtctgtgggccagagggccaagctgaccatcagcccagactatgcctatggagccaccggccaccctggcatcatcccccctcatgccaccctggtgtttgatgtggagctgctgaagctggagtag

SEQ ID NO: 16111 - DNA, 327 bp, Artificial Sequence
  derived and/or modified sequence
atgggcgtgcacgtggagaccatcagccctggggactggaggaccttccccaagaggagccagacctgtgtgatgcactacacaggcatgctggaggatggcaagaagtttgacagcagccgggacaggaacaagcccttcaagttcatgctgggcaagcaggaggtgatccggggctgggaggagggcgtggtgcagatgtctgtgggccagagggccaagctgaccatcagcccagactatgcctatggagccaccggccaccctggcatcatcccccctcatgccaccctggtgtttgatgtggagctgctgaagctggagtag

SEQ ID NO: 16112 - DNA, 279 bp, Artificial Sequence
  derived and/or modified sequence
atgggcgtgcacgtggagaccatcagccccggcgacggcatgctggaggatggtaagaaatttgattcttcacgggacagaaataagccatttaagtttatgctcgggaagcaagaggtgatacgcggctgggaagagggggttgtgcagatgtccgtcggacaaagagctaagttgactatttctcccgattatgcctacggagcaaccggacaccctggaatcatacccccacacgcaacgttagtgtttgatgtagaacttctgaaattggagtag

SEQ ID NO: 16113 - DNA, 327 bp, Artificial Sequence
  derived and/or modified sequence
atgggcgtgcacgtggagaccatcagccccggcgactggcggacctttccaaagagatcccagacttgtgtcatgcattacaccgggatgctagaagatgggaaaaagttcgactcatctcgggatcgtaataaacccttcaagttcatgcttgggaagcaagaggttattcgaggctgggaagaaggtgtggtgcaaatgtccgtgggccaacgggctaagttaacaatcagccctgactatgcttacggtgccacaggccaccccgggatcatcccccctcacgcaaccctggtttttgatgtggaacttctgaaactggaatag

SEQ ID NO: 16114 - DNA, 279 bp, Artificial Sequence
  derived and/or modified sequence
atgggcgtgcacgtcgaaactatctcccctggcgacgggatgttggaagacggaaaaaagttcgattccagcagagacagaaacaaacccttcaaattcatgctgggaaagcaagaggtgataagaggctgggaagagggggtggtgcagatgtctgtaggtcagcgggctaagttaactatctctcctgattatgcctacggagcaacaggacaccccggaattatccccccacacgccaccctggtcttcgatgtggaattactgaaacttgaatag

SEQ ID NO: 16115 - DNA, 327 bp, Artificial Sequence
  derived and/or modified sequence
atgggcgttcatgttgagaccatttcacccggagactggcgcaccttcccaaagaggagccaaacctgtgtgatgcactacacaggcatgctggaagacggcaaaaagtttgactctagccgagaccgcaacaagcccttcaaatttatgttgggtaagcaggaggtgatccggggatgggaagaaggcgtggtccagatgtccgtgggccagcgcgctaaattgactattagtcctgactacgcatacggcgctacaggacacccagggatcatccccccacacgccacactcgtgttcgatgtcgagttacttaaactcgaatag

SEQ ID NO: 16116 - protein, 257 aa, Artificial Sequence
  derived and/or modified sequence
MAQRMTTQLLLLLVWVAVVGEAQTRIAWARTELLNVCMNAKHHKEKPGPEDKLHEQCRPWRKNACCSTNTSQEAHKDVSYLYRFNWNHCGEMAPACKRHFIQDTCLYECSPNLGPWIQQVDQSWRKERVLNVPLCKEDCEQWWEDCRTSYTCKSNWHKGWNWTSGFNKCAVGAACQPFHFYFPTPTVLCNEIWTHSYKVSNYSRGSGRCIQMWFDPAQGNPNEEVARFYAAAMSGAGPWAAWPFLLSLALMLLWLLS

SEQ ID NO: 16117 - DNA, 1107 bp, Artificial Sequence
  derived and/or modified sequence
tggaggcctggctggtgctcacatacaataattaactgctgagtggccttcgcccaatcccaggctccactcctgggctccattcccactccctgcctgtctcctaggccactaaaccacagctgtcccctggaataaggcaagggggagtgtagagcagagcagaagcctgagccagacggagagccacctcctctcccagggacagacatggctcagcggatgacaacacagctgctgctccttctagtgtgggtggctgtagtaggggaggctcagacaaggattgcatgggccaggactgagcttctcaatgtctgcatgaacgccaagcaccacaaggaaaagccaggccccgaggacaagttgcatgagcagtgtcgaccctggaggaagaatgcctgctgttctaccaacaccagccaggaagcccataaggatgtttcctacctatatagattcaactggaaccactgtggagagatggcacctgcctgcaaacggcatttcatccaggacacctgcctctacgagtgctcccccaacttggggccctggatccagcaggtggatcagagctggcgcaaagagcgggtactgaacgtgcccctgtgcaaagaggactgtgagcaatggtgggaagattgtcgcacctcctacacctgcaagagcaactggcacaagggctggaactggacttcagggtttaacaagtgcgcagtgggagctgcctgccaacctttccatttctacttccccacacccactgttctgtgcaatgaaatctggactcactcctacaaggtcagcaactacagccgagggagtggccgctgcatccagatgtggttcgacccagcccagggcaaccccaatgaggaggtggcgaggttctatgctgcagccatgagtggggctgggccctgggcagcctggcctttcctgcttagcctggccctaatgctgctgtggctgctcagctgacctccttttaccttctgatacctggaaatccctgccctgttcagccccacagctcccaactatttggttcctgctccatggtcgggcctctgacagccactttgaataaaccagacaccgcac

SEQ ID NO: 16118 - DNA, 947 bp, Artificial Sequence
  derived and/or modified sequence
tccgcattccttggtgccactgaccacagctctttcttcagggacagacatggctcagcggatgacaacacagctgctgctccttctagtgtgggtggctgtagtaggggaggctcagacaaggattgcatgggccaggactgagcttctcaatgtctgcatgaacgccaagcaccacaaggaaaagccaggccccgaggacaagttgcatgagcagtgtcgaccctggaggaagaatgcctgctgttctaccaacaccagccaggaagcccataaggatgtttcctacctatatagattcaactggaaccactgtggagagatggcacctgcctgcaaacggcatttcatccaggacacctgcctctacgagtgctcccccaacttggggccctggatccagcaggtggatcagagctggcgcaaagagcgggtactgaacgtgcccctgtgcaaagaggactgtgagcaatggtgggaagattgtcgcacctcctacacctgcaagagcaactggcacaagggctggaactggacttcagggtttaacaagtgcgcagtgggagctgcctgccaacctttccatttctacttccccacacccactgttctgtgcaatgaaatctggactcactcctacaaggtcagcaactacagccgagggagtggccgctgcatccagatgtggttcgacccagcccagggcaaccccaatgaggaggtggcgaggttctatgctgcagccatgagtggggctgggccctgggcagcctggcctttcctgcttagcctggccctaatgctgctgtggctgctcagctgacctccttttaccttctgatacctggaaatccctgccctgttcagccccacagctcccaactatttggttcctgctccatggtcgggcctctgacagccactttgaataaaccagacaccgcaca

SEQ ID NO: 16119 - DNA, 1331 bp, Artificial Sequence
  derived and/or modified sequence
ggaaaggattttctcagcccccatccccagcactgtgtgttggccgcacccatgagagcctcagcactctgaaggtgcagggggcaaaggccaaaagagctctggcctgaacttgggtggtccctactgtgtgacttggggcatggccctcatctgtgctgaaatgattccacaaagattaaactggctatcatttgttgatttcccccttcttacatttaatccttgcaggagaaagctaagcctcaagatagtttgcttctctttcccccaaggccaaggagaaggtggagtgagggctggggtcgggacaggttgaacgggaaccctgtgctctaaacagttagggtttgttcccgcaggaactgaacccaaaggatcacctggtattccctgagagtacagatttctccggcgtggccctcaagggacagacatggctcagcggatgacaacacagctgctgctccttctagtgtgggtggctgtagtaggggaggctcagacaaggattgcatgggccaggactgagcttctcaatgtctgcatgaacgccaagcaccacaaggaaaagccaggccccgaggacaagttgcatgagcagtgtcgaccctggaggaagaatgcctgctgttctaccaacaccagccaggaagcccataaggatgtttcctacctatatagattcaactggaaccactgtggagagatggcacctgcctgcaaacggcatttcatccaggacacctgcctctacgagtgctcccccaacttggggccctggatccagcaggtggatcagagctggcgcaaagagcgggtactgaacgtgcccctgtgcaaagaggactgtgagcaatggtgggaagattgtcgcacctcctacacctgcaagagcaactggcacaagggctggaactggacttcagggtttaacaagtgcgcagtgggagctgcctgccaacctttccatttctacttccccacacccactgttctgtgcaatgaaatctggactcactcctacaaggtcagcaactacagccgagggagtggccgctgcatccagatgtggttcgacccagcccagggcaaccccaatgaggaggtggcgaggttctatgctgcagccatgagtggggctgggccctgggcagcctggcctttcctgcttagcctggccctaatgctgctgtggctgctcagctgacctccttttaccttctgatacctggaaatccctgccctgttcagccccacagctcccaactatttggttcctgctccatggtcgggcctctgacagccactttgaataaaccagacaccgc

SEQ ID NO: 16120 - DNA, 1061 bp, Artificial Sequence
  derived and/or modified sequence
actaaaccacagctgtcccctggaataaggcaagggggagtgtagagcagagcagaagcctgagccagacggagagccacctcctctcccaggaactgaacccaaaggatcacctggtattccctgagagtacagatttctccggcgtggccctcaagggacagacatggctcagcggatgacaacacagctgctgctccttctagtgtgggtggctgtagtaggggaggctcagacaaggattgcatgggccaggactgagcttctcaatgtctgcatgaacgccaagcaccacaaggaaaagccaggccccgaggacaagttgcatgagcagtgtcgaccctggaggaagaatgcctgctgttctaccaacaccagccaggaagcccataaggatgtttcctacctatatagattcaactggaaccactgtggagagatggcacctgcctgcaaacggcatttcatccaggacacctgcctctacgagtgctcccccaacttggggccctggatccagcaggtggatcagagctggcgcaaagagcgggtactgaacgtgcccctgtgcaaagaggactgtgagcaatggtgggaagattgtcgcacctcctacacctgcaagagcaactggcacaagggctggaactggacttcagggtttaacaagtgcgcagtgggagctgcctgccaacctttccatttctacttccccacacccactgttctgtgcaatgaaatctggactcactcctacaaggtcagcaactacagccgagggagtggccgctgcatccagatgtggttcgacccagcccagggcaaccccaatgaggaggtggcgaggttctatgctgcagccatgagtggggctgggccctgggcagcctggcctttcctgcttagcctggccctaatgctgctgtggctgctcagctgacctccttttaccttctgatacctggaaatccctgccctgttcagccccacagctcccaactatttggttcctgctccatggtcgggcctctgacagccactttgaataaaccagacaccgc

SEQ ID NO: 16121 - DNA, 774 bp, Artificial Sequence
  derived and/or modified sequence
atggctcagcggatgactactcagctgctgctcctcctggtgtgggtagctgtcgtgggggaggcacagacccgcatcgcctgggcgcgcaccgagttgcttaacgtgtgtatgaatgcaaaacaccacaaagaaaagcctggtcccgaagacaagctgcatgaacaatgtcggccgtggagaaagaatgcctgctgctctacgaacactagccaggaggctcataaagatgtttcatatctatatcgattcaactggaatcactgcggtgaaatggccccggcctgtaaacgccacttcattcaggacacgtgcttatacgagtgttcgcctaatctaggaccctggattcagcaggtcgatcagtcttggcggaaggagagagttctgaacgtgcccctatgtaaggaggactgcgagcaatggtgggaagactgtcgcaccagctatacatgcaagtctaactggcataaggggtggaattggaccagcggctttaataaatgcgctgtgggcgctgcttgtcaaccgttccacttctatttcccaacccctaccgtgctctgcaacgaaatatggactcacagctacaaagtgtccaattattctagaggcagcggacgttgtattcaaatgtggtttgaccccgcccaaggcaaccccaacgaggaagttgcccgattctacgctgccgcgatgtccggggcaggcccctgggcagcgtggcccttccttctatcattggctttaatgctgctgtggctgctctcctag

SEQ ID NO: 16122 - DNA, 774 bp, Artificial Sequence
  derived and/or modified sequence
atggcccagaggatgaccactcagctcctgttactgctggtatgggttgctgtcgtgggagaagcacagacccgtatcgcatgggctagaaccgagttgctgaacgtctgtatgaacgcaaaacatcacaaggagaagcccgggcctgaggataaattgcacgagcaatgcaggccctggagaaaaaacgcttgttgtagcactaatacgtcacaggaagcacataaagacgtgtcttacctgtaccgtttcaattggaaccactgcggtgagatggcacctgcgtgtaaacgacactttatacaagacacctgtctgtacgagtgttcaccaaatctagggccctggatccagcaggtagatcagagctggaggaaggagagggttctcaatgtgccactctgtaaggaagattgcgagcagtggtgggaggattgccggacatcgtatacttgcaagtctaactggcacaagggatggaactggacctccgggtttaacaaatgcgcggtgggggcggcctgccagccttttcacttctactttccgacaccaactgttctgtgcaatgaaatctggacgcactcttataaagtgtccaattacagccggggctctgggcgatgcatccagatgtggtttgatcctgcacagggtaaccctaacgaagaagtggcccggttctatgcagcagctatgtccggagcgggcccatgggccgcgtggccgtttctgctctctctcgctctgatgctcctctggcttttgtcatag

SEQ ID NO: 16123 - DNA, 774 bp, Artificial Sequence
  derived and/or modified sequence
atggcacagcggatgactacgcagttgctactactgcttgtgtgggtggcagtggtcggagaagctcagactcgtattgcttgggccaggaccgaactgctcaacgtgtgcatgaatgccaagcatcataaagagaagcctggcccggaagataagctgcatgagcagtgcaggccttggagaaaaaacgcttgctgctctacaaatacctctcaggaggctcataaggacgtgtcctacctctatcggtttaattggaatcactgtggcgaaatggccccagcatgcaaacggcatttcatacaggacacctgcttgtatgagtgctcacccaatctcggcccttggattcagcaggtggaccagagttggaggaaggagcgggtgctcaacgtgccactgtgtaaagaggattgtgagcagtggtgggaggactgccgaacctcctatacctgtaagtctaactggcacaagggctggaactggacttccggttttaataagtgcgctgtaggcgcagcatgccagccatttcacttctatttccctacacccacagtgttatgtaacgaaatatggacacactcctacaaggtatcaaattactcccgcggcagcgggaggtgcatccagatgtggttcgacccagcacaaggaaatcctaacgaggaggttgcccgcttctatgctgcagctatgtctggagctggaccctgggccgcatggccttttctcctctccctcgctctgatgcttctctggctgctctcctag

SEQ ID NO: 16124 - DNA, 774 bp, Artificial Sequence
  derived and/or modified sequence
atggctcagcgcatgacgacacagcttctgctgctcctcgtgtgggtggccgtggttggcgaggctcaaacccgcattgcatgggcccgcaccgaactgttaaacgtgtgtatgaatgcaaagcatcataaggaaaaacctgggccagaagataagctgcatgagcagtgccgcccttggcggaagaatgcgtgctgcagtaccaacacttctcaagaggcacataaggacgtgagctacctctatcgttttaattggaatcactgcggggaaatggccccggcttgcaaacgccactttattcaggatacatgtctctatgagtgctctcccaatctcggcccttggattcagcaggtggaccaatcatggagaaaagaacgggtgctcaatgtgccgttgtgcaaagaagactgcgaacagtggtgggaagactgccggacttcctacacatgtaagagcaattggcataagggttggaactggacaagcggctttaataagtgtgccgtcggcgccgcgtgccaaccatttcacttttacttccccacaccgacggtgctgtgcaacgagatttggacgcactcatacaaagtctcaaactactcacgaggtagtggtaggtgcattcaaatgtggttcgatcctgcccagggcaaccctaatgaggaagtggctaggttctacgctgctgcgatgtccggtgctggaccctgggcggcctggccctttctgcttagcctcgcccttatgcttctgtggctgctcagctag

SEQ ID NO: 16125 - DNA, 774 bp, Artificial Sequence
  derived and/or modified sequence
atggcccagaggatgaccacccagctgctgctgctgctggtgtgggtggccgtggtgggggaggcccagacccgcatcgcctgggccaggacagagctgctgaatgtgtgcatgaatgccaagcaccacaaggagaagccaggccctgaggacaagctgcacgagcagtgccggccctggaggaagaatgcctgctgcagcaccaacaccagccaggaggcccacaaggatgtgtcctacctgtaccgcttcaactggaaccactgtggggagatggccccagcctgcaagaggcacttcatccaggacacctgcctgtatgagtgcagccccaacctgggcccctggatccagcaggtggaccagagctggaggaaggagcgggtgctgaatgtgcccctgtgcaaggaggactgtgagcagtggtgggaggactgcaggaccagctacacctgcaagagcaactggcacaagggctggaactggaccagcggcttcaacaagtgtgctgtgggcgccgcctgccagcccttccacttctacttccccacccccaccgtgctgtgcaatgagatctggacccacagctacaaggtgagcaactacagccggggcagcggccgctgcatccagatgtggtttgatcctgcccagggcaaccccaatgaggaggtggcccgcttctacgccgccgccatgtctggggccggcccctgggccgcctggcccttcctgctgagcctggccctgatgctgctgtggctgctgtcctag

SEQ ID NO: 16126 - DNA, 774 bp, Artificial Sequence
  derived and/or modified sequence
atggcccagcggatgaccacccagctgctgctgctgctggtgtgggtggctgtggtgggcgaggctcagaccagaatagcgtgggcgagaaccgagctcctgaacgtttgcatgaacgcgaaacaccataaggagaaaccaggaccagaagataaattgcacgagcagtgtcgaccatggaggaagaacgcctgttgcagtaccaacacctcccaggaggcccacaaggatgtctcctatctgtacagatttaactggaaccactgtggagaaatggctccggcatgcaaacgacattttatacaagacacttgcctgtacgaatgtagtccgaacctggggccctggattcagcaggtggaccaatcatggcgtaaggagcgggtgctcaatgtaccactgtgtaaggaagactgtgagcagtggtgggaggactgcaggacatcctatacctgtaaatctaattggcacaaggggtggaactggactagtggttttaacaagtgcgccgtgggcgccgcctgccagcctttccacttttactttccgacacctacagtgctctgcaacgagatttggactcactcctacaaagtgtctaactatagccgagggagcggcagatgcatacaaatgtggttcgacccagcccaaggaaatcctaacgaagaagtggcccgtttctatgctgccgcgatgagtggagccgggccatgggccgcttggcctttcctgctcagcttggcgctcatgcttttatggttgcttagttag

SEQ ID NO: 16127 - DNA, 774 bp, Artificial Sequence
  derived and/or modified sequence
atggcccagcggatgaccacccagctgctgctgctgctggtgtgggtagctgtcgttggagaagcccaaacccggatcgcgtgggcccggacggaactgcttaacgtctgcatgaatgctaaacaccacaaagagaagcccggccctgaggacaaactccatgagcaatgtcgaccctggaggaagaacgcgtgctgcagcacaaatacctctcaagaagctcataaggacgtgtcttatctgtatcgattcaattggaaccattgcggagaaatggcgccagcgtgcaaaagacactttatccaggacacctgcttatatgaatgctctccgaatttaggtccctggattcagcaggttgaccaaagttggcgcaaagaaagagtgctgaatgttcctttgtgtaaggaggactgtgaacagtggtgggaagactgtaggacttcatacacatgcaagtccaactggcataagggatggaactggacttcaggtttcaataaatgcgcagtcggcgctgcttgccagcctttccacttttattttcccacccctactgtcctatgtaatgagatctggacgcacagttacaaggtctcaaattactccaggggctcgggacgatgcattcagatgtggtttgatcctgcccagggtaaccctaacgaggaggtggctcggttttacgccgcagctatgagtggtgccggaccttgggccgcctggccattccttctcagtttagctctgatgctgttgtggcttttgtcttag

SEQ ID NO: 16128 - DNA, 774 bp, Artificial Sequence
  derived and/or modified sequence
atggcccagcggatgaccacccagctgctgctgctgctggtgtgggttgcagttgtgggtgaggcacagacaagaatcgcatgggcgcgtactgagctcttgaacgtttgtatgaatgccaaacaccacaaggaaaagcccggaccggaggacaagctccacgaacagtgtagaccctggcggaagaacgcctgttgttccaccaatacaagtcaggaggcacacaaggacgtctcgtacctgtatcgattcaattggaaccattgtggggaaatggcacctgcttgtaagcggcatttcatacaagacacctgcctatatgaatgcagcccgaacttggggccgtggattcaacaggtcgatcagagctggcggaaagaaagggtgctgaacgttcccctgtgtaaagaggattgcgaacagtggtgggaagattgtcgtacatcgtatacttgtaagtcaaattggcataagggctggaactggacaagtggttttaacaaatgcgctgtgggcgccgcttgccagcctttccacttttactttccgacgcccaccgtgctctgtaacgagatatggacacattcttacaaagtgtccaattactccagagggtccggcaggtgtattcaaatgtggtttgatcccgctcagggaaaccccaatgaggaggtggcacggttctatgcagcagctatgtctggggccggcccgtgggccgcttggccgttcctactctcccttgcgcttatgctcctgtggctgttgagctag

SEQ ID NO: 16129 - DNA, 774 bp, Artificial Sequence
  derived and/or modified sequence
atggcccagcggatgaccacccagctgctgctgctgctggtgtgggtggccgttgttggtgaagcccaaaccaggattgcctgggcacggactgaattgttaaacgtctgcatgaatgccaagcatcacaaggaaaagccagggcccgaggacaagctgcacgagcagtgcagaccatggaggaagaacgcctgctgctctaccaatacgagccaggaggcacacaaggacgtctcttatctataccggttcaactggaatcactgtggcgaaatggctcccgcctgtaagcgccatttcatacaggatacctgcctgtatgagtgctctcccaacctcgggccgtggatccagcaggtggaccagtcttggaggaaagagagagttctgaatgtgcctttgtgcaaggaggattgcgaacagtggtgggaggattgtaggacctcctacacttgtaagtcaaattggcacaagggttggaactggaccagcggctttaacaaatgtgcagttggagcggcctgtcagcccttccacttctactttcccacccccaccgtcctgtgtaatgagatatggactcactcttataaggtgtccaactattctcgggggtctggaaggtgcatccaaatgtggttcgaccccgcccagggcaatccaaatgaagaggttgcccggttctatgcagcagccatgtccggcgctggcccatgggccgcctggccctttttattgtcgctggcactgatgctgctttggttactgagctag

SEQ ID NO: 16130 - DNA, 774 bp, Artificial Sequence
  derived and/or modified sequence
atggctcagagaatgaccacacagctgctcctgctgctggtttgggttgcagttgtgggagaggcgcagactagaatcgcctgggcacgcacagagttgcttaacgtctgtatgaatgccaaacatcacaaagagaagcctggtcctgaggacaaactgcacgagcagtgcagaccctggcgaaagaatgcctgctgcagtactaacacctctcaggaagcacataaggacgtttcttatctttatcgattcaactggaatcactgcggagaaatggcccctgcgtgtaaaaggcattttattcaggatacctgcctctacgagtgttcaccaaacctgggtccatggattcagcaagtggatcagtcatggcgaaaggaacgcgtcctgaatgttccgctgtgtaaggaggactgtgagcaatggtgggaggattgcagaacgagctatacgtgtaagtcaaattggcacaaagggtggaattggacatctgggtttaataagtgtgccgtgggcgctgcttgtcagccgtttcatttctatttccctactcccaccgtgctgtgcaacgagatatggacccatagctataaggtgagtaattactccagggggagcggacggtgtatccaaatgtggttcgaccccgcacaggggaaccccaatgaggaagtagcccgattctatgctgctgccatgagtggcgctggaccatgggcagcctggccgtttctgcttagtctcgctctcatgctgctgtggttgttaagttag

SEQ ID NO: 16131 - DNA, 774 bp, Artificial Sequence
  derived and/or modified sequence
atggcgcagcggatgaccacccaacttctccttctgctggtttgggtggctgtggtgggggaagcacagacgagaattgcctgggcccgaaccgagttgctcaacgtatgtatgaacgccaagcaccacaaggaaaagccaggtccagaggataagctgcacgaacagtgccgaccatggagaaagaacgcatgttgtagcacaaacacttctcaggaggcgcacaaagatgtttcatatctgtatcgtttcaattggaaccactgtggggagatggcccctgcctgcaagcggcatttcatccaagatacctgcctgtacgagtgcagccccaacctgggcccttggattcagcaggtggaccaaagctggagaaaagagcgcgtattgaatgtgcccttgtgcaaggaggactgcgagcaatggtgggaagactgtaggacttcgtatacatgcaaatcaaactggcataagggttggaattggacttctgggttcaacaagtgcgcagtcggggctgcctgtcaaccgtttcacttctatttccctacacccaccgtcctgtgcaatgaaatctggacccacagttacaaggtgtccaactactcacggggaagcggaaggtgcatacagatgtggtttgatcccgctcagggcaacccaaacgaagaagtggcacggttctatgcagctgccatgtctggggcaggtccctgggccgcttggccatttctgctgtctctggcattaatgctactctggctgctgtcctag

SEQ ID NO: 16132 - DNA, 774 bp, Artificial Sequence
  derived and/or modified sequence
atggcacagagaatgaccactcagttattactgctgctggtctgggtcgccgtcgtgggagaagcccagacccggatcgcgtgggctcgaacagagctgcttaatgtttgtatgaacgcaaaacaccataaagaaaagcccggacccgaagataaactgcacgagcagtgtcgaccatggcgcaaaaatgcttgttgcagtaccaacactagtcaggaggcccataaggatgtcagctacctgtatcgcttcaactggaaccactgcggggagatggcaccagcctgtaagcgccacttcattcaggacacatgcctctatgagtgtagtcctaatctgggcccatggatccagcaagtggaccagtcttggcgcaaagagcgcgtcctaaatgtccccctgtgcaaggaggactgtgagcaatggtgggaggattgccgcactagctatacttgtaagtcaaattggcacaagggttggaactggacgtccgggttcaataagtgtgccgtcggggctgcctgccagccgtttcacttctattttcccacaccaactgtactctgcaatgagatttggactcactcctataaggtctctaactacagcaggggctctggcaggtgtatccaaatgtggttcgaccccgctcagggcaaccctaatgaagaagtggccagattttacgctgccgctatgtcaggagccggtccctgggccgcatggcccttcctcctcagcttggccctgatgctgctgtggctacttagctag

SEQ ID NO: 16133 - DNA, 774 bp, Artificial Sequence
  derived and/or modified sequence
atggctcagaggatgacaactcagctgctgctgctgctggtatgggtggccgtcgtcggggaggctcaaacaaggattgcatgggccaggacagaactcctcaatgtgtgcatgaatgcgaagcaccacaaggaaaaaccgggacctgaagacaaactgcacgaacaatgccggccatggcgaaaaaacgcctgctgtagcactaacacatctcaggaagcacataaagatgtgagttatctctatcgttttaactggaatcactgtggcgagatggctccggcatgcaagaggcatttcattcaggacacgtgtctgtacgagtgcagtcctaatctgggaccctggatccagcaggtcgatcagtcttggagaaaagagcgagtgctcaatgtaccgctgtgtaaggaagattgtgagcagtggtgggaggactgtcgcacaagctacacctgcaagagcaattggcacaagggctggaactggacgtccggcttcaacaagtgcgccgtgggcgcagcttgccaaccctttcacttttactttccgaccccaacggtgttgtgtaatgagatttggacacacagctacaaagtctcaaactactccagaggcagtggcaggtgcatccaaatgtggtttgatcctgcacagggcaaccctaacgaggaagtggcccgtttctacgccgctgccatgtctggcgcagggccttgggcagcatggccctttctcctgtccctggccctgatgcttttgtggctcctgagctag

SEQ ID NO: 16134 - DNA, 774 bp, Artificial Sequence
  derived and/or modified sequence
atggcccagagaatgaccacccagctgctgctgctgctggtgtgggtggccgtggtgggcgaggcccagaccagaatcgcctgggccagaaccgagctgctgaacgtgtgcatgaacgccaagcaccacaaggagaagcccggccccgaggacaagctgcacgagcagtgcagaccctggagaaagaacgcctgctgcagcaccaacaccagccaggaggcccacaaggacgtgagctacctgtacagattcaactggaaccactgcggcgagatggcccccgcctgcaagagacacttcatccaggacacctgcctgtacgagtgcagccccaacctgggcccctggatccagcaggtggaccagagctggagaaaggagagagtgctgaacgtgcccctgtgcaaggaggactgcgagcagtggtgggaggactgcagaaccagctacacctgcaagagcaactggcacaagggctggaactggaccagcggcttcaacaagtgcgccgtgggcgccgcctgccagcccttccacttctacttccccacccccaccgtgctgtgcaacgagatctggacccacagctacaaggtgagcaactacagcagaggcagcggcagatgcatccagatgtggttcgaccccgcccagggcaaccccaacgaggaggtggccagattctacgccgccgccatgagcggcgccggcccctgggccgcctggcccttcctgctgagcctggccctgatgctgctgtggctgctgagctag

SEQ ID NO: 16135 - protein, 244 aa, Artificial Sequence
  derived and/or modified sequence
MDMAWQMMQLLLLALVTAAGSAQPRSARARTDLLNVCMNAKHHKTQPSPEDELYGQCSPWKKNACCTASTSQELHKDTSRLYNFNWDHCGKMEPTCKRHFIQDSCLECSPNLGPWIRQVNQSWRKERILNVPLCKEDCERWWEDCRTSYTCKSNWHKGWNWTSGINECPAGALCSTFESYFPTPAALCEGLWSHSFKVSNYSRGSGRCIQMWFDSAQGNPNEEVAKFYAAAMNAGAPSRGIIDS

SEQ ID NO: 16136 - protein, 287 aa, Artificial Sequence
  derived and/or modified sequence
MDMAWQMMQLLLLALVTAAGSAQPRSARARTDLLNVCMNAKHHKTQPSPEDELYGQVGAPQGPSPGSVPLDDLPGAEEPEYGGDGCGGERLSPVSSPPSAVPGRRMPAARPAPARSCTRTPPACTTLTGITVVRWNPPASATLSRTAVSECSPNLGPWIRQVNQSWRKERILNVPLCKEDCERWWEDCRTSYTCKSNWHKGWNWTSGINECPAGALCSTFESYFPTPAALCEGLWSHSFKVSNYSRGSGRCIQMWFDSAQGNPNEEVAKFYAAAMNAGAPSRGIIDS

SEQ ID NO: 16137 - DNA, 735 bp, Artificial Sequence
  derived and/or modified sequence
atggacatggcctggcagatgatgcagctgctgctgctggccctggtgaccgccgccggcagcgcccagcccagaagcgccagagccagaaccgacctgctgaacgtgtgcatgaacgccaagcaccacaagacccagcccagccccgaggacgagctgtacggccagtgcagcccctggaagaagaacgcctgctgcaccgccagcaccagccaggagctgcacaaggacaccagcagactgtacaacttcaactgggaccactgcggcaagatggagcccacctgcaagagacacttcatccaggacagctgcctggagtgcagccccaacctgggcccctggatcagacaggtgaaccagagctggagaaaggagagaatcctgaacgtgcccctgtgcaaggaggactgcgagagatggtgggaggactgcagaaccagctacacctgcaagagcaactggcacaagggctggaactggaccagcggcatcaacgagtgccccgccggcgccctgtgcagcaccttcgagagctacttccccacccccgccgccctgtgcgagggcctgtggagccacagcttcaaggtgagcaactacagcagaggcagcggcagatgcatccagatgtggttcgacagcgcccagggcaaccccaacgaggaggtggccaagttctacgccgccgccatgaacgccggcgcccccagcagaggcatcatcgacagctag

SEQ ID NO: 16138 - DNA, 735 bp, Artificial Sequence
  derived and/or modified sequence
atggatatggcctggcagatgatgcaacttctccttcttgccctggtgactgccgccggcagtgcccagcctagatctgctcgcgcccgaactgacttactgaatgtgtgcatgaatgctaaacaccacaagactcagccctcaccagaggacgagctgtatggtcagtgctccccatggaaaaagaatgcgtgctgtacagctagtacaagccaggaactgcacaaggatacatccaggctgtataacttcaattgggatcattgcggcaagatggaaccgacatgtaagcggcactttatccaagattcttgcctcgagtgctctcccaatctgggcccttggataagacaagtgaatcagtcttggcgcaaggaaaggatccttaatgtacctctgtgtaaagaagattgcgagaggtggtgggaggattgcaggaccagctatacgtgcaaaagcaattggcacaaaggttggaattggacgtctggcataaatgagtgccctgctggcgcactgtgttctaccttcgaatcttacttcccaacacctgccgctctgtgtgaggggctatggtctcattcatttaaggtgtctaattatagcagaggctctggaagatgtattcagatgtggttcgacagcgctcaaggcaatccaaacgaagaggttgcgaagttctatgcggcagccatgaatgcaggggccccgtcacgcgggatcatcgacagctag

SEQ ID NO: 16139 - DNA, 844 bp, Artificial Sequence
  derived and/or modified sequence
agagcctggacctacagcgctgttggtggaggtcctgcctccaggaatagatggacatggcctggcagatgatgcagctgctgcttctggctttggtgactgctgcggggagtgcccagcccaggagtgcgcgggccaggacggacctgctcaatgtctgcatgaacgccaagcaccacaagacacagcccagccccgaggacgagctgtatggccagtgcagtccctggaagaagaatgcctgctgcacggccagcaccagccaggagctgcacaaggacacctcccgcctgtacaactttaactgggatcactgtggtaagatggaacccacctgcaagcgccactttatccaggacagctgtctcgagtgctcacccaacctggggccctggatccggcaggtcaaccagagctggcgcaaagagcgcattctgaacgtgcccctgtgcaaagaggactgtgagcgctggtgggaggactgtcgcacctcctacacctgcaaaagcaactggcacaaaggctggaattggacctcagggattaatgagtgtccggccggggccctctgcagcacctttgagtcctacttccccactccagccgccctttgtgaaggcctctggagccactccttcaaggtcagcaactatagtcgagggagcggccgctgcatccagatgtggtttgactcagcccagggcaaccccaatgaggaggtggccaagttctatgctgcggccatgaatgctggggccccgtctcgtgggattattgattcctgatccaagaagggtcctctggggttcttccaacaacctattctaatagacaaatccacatg

SEQ ID NO: 16140 - DNA, 973 bp, Artificial Sequence
  derived and/or modified sequence
agagcctggacctacagcgctgttggtggaggtcctgcctccaggaatagatggacatggcctggcagatgatgcagctgctgcttctggctttggtgactgctgcggggagtgcccagcccaggagtgcgcgggccaggacggacctgctcaatgtctgcatgaacgccaagcaccacaagacacagcccagccccgaggacgagctgtatggccaggtgggagctcctcaagggccctccccaggaagtgttcctctggatgacctacctggggcagaggagccagaatatggaggagatggctgtggtggggagagacttagtcctgtgtcttccccacccagtgcagtccctggaagaagaatgcctgctgcacggccagcaccagccaggagctgcacaaggacacctcccgcctgtacaactttaactgggatcactgtggtaagatggaacccacctgcaagcgccactttatccaggacagctgtctctgagtgctcacccaacctggggccctggatccggcaggtcaaccagagctggcgcaaagagcgcattctgaacgtgcccctgtgcaaagaggactgtgagcgctggtgggaggactgtcgcacctcctacacctgcaaaagcaactggcacaaaggctggaattggacctcagggattaatgagtgtccggccggggccctctgcagcacctttgagtcctacttccccactccagccgccctttgtgaaggcctctggagccactccttcaaggtcagcaactatagtcgagggagcggccgctgcatccagatgtggtttgactcagcccagggcaaccccaatgaggaggtggccaagttctatgctgcggccatgaatgctggggccccgtctcgtgggattattgattcctgatccaagaagggtcctctggggttcttccaacaacctattctaatagacaaatccacatg

SEQ ID NO: 16141 - DNA, 735 bp, Artificial Sequence
  derived and/or modified sequence
atggacatggcctggcagatgatgcagctgctgctgctggccctggtgacagctgctggcagcgcccagcccaggtctgcccgggccaggacagacctgctgaatgtgtgcatgaatgccaagcaccacaagacccagcccagcccagaagatgagctgtatggccagtgcagcccctggaagaagaatgcctgctgcacagccagcaccagccaggagctgcacaaggacaccagccggctgtacaacttcaactgggaccactgcggcaagatggagcccacctgcaagaggcacttcatccaggacagctgcctggagtgcagccccaacctgggcccctggatccggcaggtgaaccagagctggaggaaggagcgcatcctgaatgtgcccctgtgcaaggaggactgtgagcgctggtgggaggactgcaggaccagctacacctgcaagagcaactggcacaagggctggaactggaccagcggcatcaatgaatgtcctgctggggccctgtgcagcacctttgagagctacttccccaccccagctgccctgtgtgagggcctgtggagccacagcttcaaggtgagcaactacagccggggcagcggccgctgcatccagatgtggtttgattctgcccagggcaaccccaatgaggaggtggccaagttctatgctgctgccatgaatgctggggcccccagccggggcatcatcgacagctag

SEQ ID NO: 16142 - DNA, 735 bp, Artificial Sequence
  derived and/or modified sequence
atggacatggcctggcagatgatgcagctgctgctgctggccctggtcacagccgccggctccgcccaacccaggagcgcccgcgcccggactgatctgctgaacgtgtgtatgaacgcaaaacatcataagactcagccttctcccgaagatgaactctacggacagtgttctccttggaagaagaatgcatgttgcacggcgagcacctcgcaggagctgcataaggacacctccaggttgtataactttaactgggaccattgtgggaagatggaaccaacctgcaaaagacattttatccaggatagctgcctggaatgttctccaaacttaggcccttggatcaggcaagtaaatcaaagctggcggaaagaacgcatcttgaatgtcccactctgtaaggaggattgcgaaaggtggtgggaggactgcaggacctcctacacctgcaaaagcaactggcataaagggtggaattggacatctggaatcaacgagtgccctgccggagccctgtgcagtacatttgaatcatactttcccacgcctgccgcactttgcgagggtctgtggtctcacagcttcaaggtctctaattattcccgaggcagtgggcgctgtatccagatgtggtttgactccgcacagggtaatcccaacgaggaggtggcgaaattttacgcggccgccatgaacgcaggcgctccctctcggggcattattgatagctag

SEQ ID NO: 16143 - DNA, 735 bp, Artificial Sequence
  derived and/or modified sequence
atggacatggcttggcagatgatgcagttattactgttagcactcgtcacggcagccggttctgctcaacctcgcagcgccagagctaggaccgatctcctgaacgtgtgcatgaacgccaaacatcacaaaacccagccttcaccggaggacgagctgtacgggcaatgcagtccctggaagaagaacgcatgctgtacagcaagcaccagtcaggaactccacaaagacactagtcggctgtacaatttcaattgggatcactgtggcaaaatggagcccacttgtaagagacactttattcaggacagttgcctggagtgctcaccgaatttaggaccttggattagacaggtgaaccagagctggcgaaaggaaagaatacttaacgtgcccctgtgcaaggaagattgtgaacggtggtgggaggactgcaggacttcatacacttgtaagagcaattggcacaaggggtggaactggacctcaggcataaatgagtgccccgcaggagcactgtgttcaacctttgagagttatttccctactccagcagccttgtgtgaaggactgtggagtcattccttcaaggtgtccaactattctagaggcagtgggcgttgtatccaaatgtggtttgactcagctcagggaaatcccaacgaagaagtcgccaagttttatgcagctgctatgaatgcgggagccccttcacggggtatcatcgattcttag

SEQ ID NO: 16144 - protein, 101 aa, Artificial Sequence
  derived and/or modified sequence
MQRLCVYVLIFALALAAFSEASWKPRSQQPDAPLGTGANRDLELPWLEQQGPASHHRRQLGPQGPPHLVADPSKKQGPWLEEEEEAYGWMDFGRRSAEDEN

SEQ ID NO: 16145 - DNA, 306 bp, Artificial Sequence
  derived and/or modified sequence
atgcagcgcctttgtgtttacgttcttatttttgcacttgcattagccgccttcagtgaggcctcctggaaaccaaggagtcagcagcccgatgcccctctaggaacaggtgcaaatagggacctcgaacttccctggttggagcagcagggtcccgcatctcaccacaggcgtcagttaggtccgcaagggccgcctcacctggtagccgacccgagcaaaaaacagggcccatggctggaggaggaggaagaggcctacggctggatggacttcgggcggcgaagcgccgaagatgaaaactag

SEQ ID NO: 16146 - DNA, 470 bp, Artificial Sequence
  derived and/or modified sequence
agagcagagacctgagaggcaccaggcccagccgtggcaccacacacctcccagctctgcagacgagatgcagcgactgtgtgtgtatgtgctgatctttgcactggctctggccgccttctctgaagcttcttggaagccccgctcccagcagccagatgcacccttaggtacaggggccaacagggacctggagctaccctggctggagcagcagggcccagcctctcatcatcgaaggcagctgggaccccagggtcccccacacctcgtggcagacccgtccaagaagcagggaccatggctggaggaagaagaagaagcctatggatggatggacttcggccgccgcagtgctgaggatgagaactaacaatcctagaaccaagcttcagagcctagccacctcccaccccactccagccctgtcccctgaaaaactgatcaaaaataaactagtttccagtgga

SEQ ID NO: 16147 - DNA, 306 bp, Artificial Sequence
  derived and/or modified sequence
atgcagaggctgtgtgtgtatgtgctgatctttgccctggccctggccgccttcagcgaggcctcctggaagcccaggagccagcagccagatgcccccctgggcaccggggccaacagagacctggagctgccctggctggagcagcagggccctgccagccaccaccggcggcagctgggcccccagggccccccccacctggtggccgaccccagcaagaagcagggcccctggctggaggaggaggaggaggcctacggctggatggactttggccgccgctctgcagaagatgagaactag

SEQ ID NO: 16148 - DNA, 306 bp, Artificial Sequence
  derived and/or modified sequence
atgcagcggctgtgcgtgtacgtgctgatcttcgccctggccctggctgccttcagtgaggctagctggaaaccaagatcgcagcagccagatgcccctctcggtaccggtgccaacagggatctcgaactcccatggctcgagcaacaggggcctgcttcacaccatcggcgtcaattggggcctcaaggcccgccccatctggttgccgatccttccaagaaacagggcccctggctcgaggaggaggaagaagcatacggatggatggattttggaagacgtagtgccgaagatgagaactag

SEQ ID NO: 16149 - DNA, 306 bp, Artificial Sequence
  derived and/or modified sequence
atgcagagactgtgcgtctatgtactaatttttgccctagccctggctgctttcagcgaggccagctggaagcctcgatctcagcagccagatgcgcctctggggacaggcgctaaccgggaccttgagctgccttggctggaacagcagggtccagcttctcatcatcggagacagcttgggccacagggacctcctcacctcgtggccgaccctagcaagaagcaaggaccgtggttggaggaagaagaagaagcatatggatggatggatttcggtaggcggagtgccgaagacgagaactag

SEQ ID NO: 16150 - DNA, 306 bp, Artificial Sequence
  derived and/or modified sequence
atgcagagactgtgcgtgtacgtgctgatcttcgccctggccctggccgccttcagcgaggccagctggaagcccagaagccagcagcccgacgcccccctgggcaccggcgccaacagagacctggagctgccctggctggagcagcagggccccgccagccaccacagaagacagctgggcccccagggccccccccacctggtggccgaccccagcaagaagcagggcccctggctggaggaggaggaggaggcctacggctggatggacttcggcagaagaagcgccgaggacgagaactag

SEQ ID NO: 16151 - protein, 451 aa, Artificial Sequence
  derived and/or modified sequence
MKTKLNIYNMQFLLFVFLVWDPARLVLANIQEDEAKNNITIFTRILDRLLDGYDNRLRPGLGDSITEVFTNIYVTSFGPVSDTDMEYTIDVFFRQKWKDERLKFKGPMNILRLNNLMASKIWTPDTFFHNGKKSVAHNMTMPNKLLRIQDDGTLLYTMRLTVQAECPMHLEDFPMDAHSCPLKFGSYAYTTSEVTYIWTYNASDSVQVAPDGSRLNQYDLLGQSIGKETIKSSTGEYTVMTAHFHLKRKIGYFVIQTYLPCIMTVILSQVSFWLNRESVPARTVFGVTTVLTMTTLSISARNSLPKVAYATAMDWFIAVCYAFVFSALIEFATVNYFTKRGWAWDGKSVVNDKKKEKASVMIQNNAYAVAVANYAPNLSKDPVLSTISKSATTPEPNKKPENKPAEAKKTFNSVSKIDRMSRIVFPVLFGTFNLVYWATYLNREPVLGVSP

SEQ ID NO: 16152 - protein, 367 aa, Artificial Sequence
  derived and/or modified sequence
MKTKLNIYNMQFLLFVFLVWDPARLVLANIQEDEAKNNITIFTRILDRLLDGYDNRLRPGLGDSITEVFTNIYVTSFGPVSDTDMEYTIDVFFRQKWKDERLKFKGPMNILRLNNLMASKIWTPDTFFHNGKKSVAHNMTMPNKLLRIQDDGTLLYTMRLTVQAECPMHLEDFPMDAHSCPLKFGSYAYTTSEVTYIWTYNASDSVQVAPDGSRLNQYDLLGQSIGKETIKSSTGEYTVMTAHFHLKRKIGYFVIQTYLPCIMTVILSQVSFWLNRESVPARTVFGVTTVLTMTTLSISARNSLPKVAYATAMDWFIAVCYAFVFSALIEFATVNYFTKRGWAWDGKSVVNDKVSESFRVIIIKKIP

SEQ ID NO: 16153 - DNA, 2770 bp, Artificial Sequence
  derived and/or modified sequence
aaacgcgtcgtttcgcagcacttgatcggaacccggctgcctctaagacttggtcttgggcaaccgtgggtgggcaggaagggaaattatttattttattttgttaaggggagtgaagaaaagaagacgtgaggaccgcagttcactgtaatgtagagtaattgcaaaagtgggctgcctgcccctagcttttcccgctgtggttgcggaggtggtcttggttgagggggttgtggcgtgaagtacccatctctcctctcctctcctttcctcccctcccctccaacccattccctttccagctgctatgccagtttaaagtccagggtgttattattacgtgtgcgcaaaacagtgtttgctgacgatgaggctgggggacgttcctggcagagagaagtctgattacttggtcatcttgctgttaaagaaagaaagaaagaaaaaaagaaagaaagaaacagaaaggaaaagggtgggggtgggggtccataaaaaagaaatcgtctctcaatcatcaagtcctacacagagtccaggaagtaatctccatagctttaacacgaatccctaactaaaaggatattctttggggttacttggatagtgaaactgaaggcaattttaagtgtattttgtttttcattccatggctttgtaaagagcggcggtgatgaagacaaaattgaacatctacaacatgcagttcctgctttttgttttcttggtgtgggaccctgccaggttggtgctggctaacatccaagaagatgaggctaaaaataacattaccatctttacgagaattcttgacagacttctggatggttacgataatcggcttagaccaggactgggagacagtattactgaagtcttcactaacatctacgtgaccagttttggccctgtctcagatacagatatggaatatacaattgatgttttctttcgacaaaaatggaaagatgaacgtttaaaatttaaaggtcctatgaatatccttcgactaaacaatttaatggctagcaaaatctggactccagataccttttttcacaatgggaaaaaatcagtagctcataatatgacaatgccaaataagttgcttcgaattcaggatgatgggactctgctgtataccatgaggcttacagttcaagctgaatgcccaatgcacttggaggatttcccaatggatgctcattcatgtcctctgaaatttggcagctatgcatatacaacttcagaggtcacttatatttggacttacaatgcatctgattcagtacaggttgctcctgatggctctaggttaaatcaatatgacctgctgggccaatcaatcggaaaggagacaattaaatccagtacaggtgaatatactgtaatgacagctcatttccacctgaaaagaaaaattgggtattttgtgattcaaacctatctgccttgcatcatgactgtcattctctcccaagtttcattctggcttaacagagaatctgtgcctgcaagaactgtgtttggagtaacaactgtcctaacaatgacaactctaagcatcagtgctcggaattctctccccaaagtggcttatgcaactgccatggactggtttattgctgtttgttatgcatttgtgttctctgccctaattgaatttgcaactgttaattacttcaccaaaagaggatgggcttgggatgggaagagtgtagtaaatgacaagaaaaaagaaaaggcttccgttatgatacagaacaacgcttatgcagtggctgttgccaattatgccccgaatctttcaaaagatccagttctctccaccatctccaagagtgcaaccacgccagaacccaacaagaagccagaaaacaagccagctgaagcaaagaaaactttcaacagtgttagcaaaattgacagaatgtccagaatagtttttccagttttgtttggtacctttaatttagtttactgggctacatatttaaacagagaacctgtattaggggtcagtccttgaattgagacccatgttatctttgggatgtatagcaacattaaatttggtttgttttgctatgtacagtctgactaataactgctaatttgtgatccaacatgtacagtatgtatatagtgacatagcttaccagtagacctttaatggagacatgcatttgctaactcatggaactgcagacagaaagcactccatgcgaaaacagccattgccttttttaaagatttaccctaggacctgatttaaagtgaatttcaagtgacctgattaatttcctattcttccaaatgagatgaaaatggggatcctgtacaaccctttgtggacccttttggtttagctcttaagtaggggtattttctactgttgcttaattatgatggaagataacattgtcattcctagatgaatcctttgaagtaacaaacattgtatctgacatcagctctgttcatgagtgctcagagtccctgctaatgtaattggaagcttggtacacataagaaaaactagagatttgaaatcagctatgaattactctatatagtatctatagccatgtacatattacagcatgacaagctcaaataattatgagtcagcccgaaaggatgttaattatgcctacgatgtaataactattggaatgtcatggtcattacatttttagcttcagagtttatttgaaagtaataattgaaatcctacaatttattttaatcattggaaactaccttaatt

SEQ ID NO: 16154 - DNA, 2525 bp, Artificial Sequence
  derived and/or modified sequence
cctagcgctcctctccggcttccaccagcccatcgctccacgctctcttggctgctgcagtctcggtctctctctctctctctctctctctctctctctctctctctctctctctctctctctctcccaagtttcctatctcgtcaagatcagggcaaaaggaagaaaacaccgaattctgcttgccgtttcagagcggcggtgatgaagacaaaattgaacatctacaacatgcagttcctgctttttgttttcttggtgtgggaccctgccaggttggtgctggctaacatccaagaagatgaggctaaaaataacattaccatctttacgagaattcttgacagacttctggatggttacgataatcggcttagaccaggactgggagacagtattactgaagtcttcactaacatctacgtgaccagttttggccctgtctcagatacagatatggaatatacaattgatgttttctttcgacaaaaatggaaagatgaacgtttaaaatttaaaggtcctatgaatatccttcgactaaacaatttaatggctagcaaaatctggactccagataccttttttcacaatgggaaaaaatcagtagctcataatatgacaatgccaaataagttgcttcgaattcaggatgatgggactctgctgtataccatgaggcttacagttcaagctgaatgcccaatgcacttggaggatttcccaatggatgctcattcatgtcctctgaaatttggcagctatgcatatacaacttcagaggtcacttatatttggacttacaatgcatctgattcagtacaggttgctcctgatggctctaggttaaatcaatatgacctgctgggccaatcaatcggaaaggagacaattaaatccagtacaggtgaatatactgtaatgacagctcatttccacctgaaaagaaaaattgggtattttgtgattcaaacctatctgccttgcatcatgactgtcattctctcccaagtttcattctggcttaacagagaatctgtgcctgcaagaactgtgtttggagtaacaactgtcctaacaatgacaactctaagcatcagtgctcggaattctctccccaaagtggcttatgcaactgccatggactggtttattgctgtttgttatgcatttgtgttctctgccctaattgaatttgcaactgttaattacttcaccaaaagaggatgggcttgggatgggaagagtgtagtaaatgacaagaaaaaagaaaaggcttccgttatgatacagaacaacgcttatgcagtggctgttgccaattatgccccgaatctttcaaaagatccagttctctccaccatctccaagagtgcaaccacgccagaacccaacaagaagccagaaaacaagccagctgaagcaaagaaaactttcaacagtgttagcaaaattgacagaatgtccagaatagtttttccagttttgtttggtacctttaatttagtttactgggctacatatttaaacagagaacctgtattaggggtcagtccttgaattgagacccatgttatctttgggatgtatagcaacattaaatttggtttgttttgctatgtacagtctgactaataactgctaatttgtgatccaacatgtacagtatgtatatagtgacatagcttaccagtagacctttaatggagacatgcatttgctaactcatggaactgcagacagaaagcactccatgcgaaaacagccattgccttttttaaagatttaccctaggacctgatttaaagtgaatttcaagtgacctgattaatttcctattcttccaaatgagatgaaaatggggatcctgtacaaccctttgtggacccttttggtttagctcttaagtaggggtattttctactgttgcttaattatgatggaagataacattgtcattcctagatgaatcctttgaagtaacaaacattgtatctgacatcagctctgttcatgagtgctcagagtccctgctaatgtaattggaagcttggtacacataagaaaaactagagatttgaaatcagctatgaattactctatatagtatctatagccatgtacatattacagcatgacaagctcaaataattatgagtcagcccgaaaggatgttaattatgcctacgatgtaataactattggaatgtcatggtcattacatttttagcttcagagtttatttgaaagtaataattgaaatcctacaatttattttaatcattggaaactaccttaattaaaaaaaaagaaaagaaatgtgtcttaacatttccaggtatgtgttgtattgaaattgatcagctaaattttacgggtgctggagactggaaaaagcatccagtttggttgctgtggagcaacatgcatattggattagaaaattgtgccaaaaactcccactgatgagaattcataggtgccccacactatgacaaacacttatatgattctcctctttcctg

SEQ ID NO: 16155 - DNA, 596 bp, Artificial Sequence
  derived and/or modified sequence
agcacttgatcggaacccggctgcctctaagacttggtcttgggcaaccgtgggtgggcaggaagggaaattatttattttattttgttaaggggagtgaagaaaagaagacgtgaggaccgcagttcactagcggcggtgatgaagacaaaattgaacatctacaacatgcagttcctgctttttgttttcttggtgtgggaccctgccaggttggtgctggctaacatccaagaagatgaggctaaaaataacattaccatctttacgagaattcttgacagacttctggatggttacgataatcggcttagaccaggactgggagacagtattactgaagtcttcactaacatctacgtgaccagttttggccctgtctcagatacagatatggaatatacaattgatgttttctttcgacaaaaatggaaagatgaacgtttaaaatttaaaggtcctatgaatatccttcgactaaacaatttaatggctagcaaaatctggactccagataccttttttcacaatgggaaaaaatcagtagctcataatatgacaatgccaaataagttgcttcgaattcaggatgatgg

SEQ ID NO: 16156 - DNA, 582 bp, Artificial Sequence
  derived and/or modified sequence
gtcaaacgcgtcgtttcgcagcacttgatcggaacccggctgcctctaagacttggtcttgggcaaccgtgggtgggcaggaagggaaattatttattttattttgttaaggggagtgaagaaaagaagacgtgaggaccgcagttcactgtaatgtagaagcggcggtgatgaagacaaaattgaacatctacaacatgcagttcctgctttttgttttcttggtgtgggaccctgccaggttggtgctggctaacatccaagaagatgaggctaaaaataacattaccatctttacgagaattcttgacagacttctggatggttacgataatcggcttagaccaggactgggagacagtattactgaagtcttcactaacatctacgtgaccagttttggccctgtctcagatacagatatggaatatacaattgatgttttctttcgacaaaaatggaaagatgaacgtttaaaatttaaaggtcctatgaatatccttcgactaaacaatttaatggctagcaaaatctggactccagataccttttttcacaatgggaaaaaatcagtagctcata

SEQ ID NO: 16157 - DNA, 3411 bp, Artificial Sequence
  derived and/or modified sequence
gagaacaagctttagagatgataaaagcacagtatcttggcaaccttttgtgttgggttatttttaaaaaatggataatattgtgctctagttctcatttattcagctacttgctgagtgatagcaacattacaactacagaacctgtatgtcatcttgacattagcggcggtgatgaagacaaaattgaacatctacaacatgcagttcctgctttttgttttcttggtgtgggaccctgccaggttggtgctggctaacatccaagaagatgaggctaaaaataacattaccatctttacgagaattcttgacagacttctggatggttacgataatcggcttagaccaggactgggagacagtattactgaagtcttcactaacatctacgtgaccagttttggccctgtctcagatacagatatggaatatacaattgatgttttctttcgacaaaaatggaaagatgaacgtttaaaatttaaaggtcctatgaatatccttcgactaaacaatttaatggctagcaaaatctggactccagataccttttttcacaatgggaaaaaatcagtagctcataatatgacaatgccaaataagttgcttcgaattcaggatgatgggactctgctgtataccatgaggcttacagttcaagctgaatgcccaatgcacttggaggatttcccaatggatgctcattcatgtcctctgaaatttggcagctatgcatatacaacttcagaggtcacttatatttggacttacaatgcatctgattcagtacaggttgctcctgatggctctaggttaaatcaatatgacctgctgggccaatcaatcggaaaggagacaattaaatccagtacaggtgaatatactgtaatgacagctcatttccacctgaaaagaaaaattgggtattttgtgattcaaacctatctgccttgcatcatgactgtcattctctcccaagtttcattctggcttaacagagaatctgtgcctgcaagaactgtgtttggagtaacaactgtcctaacaatgacaactctaagcatcagtgctcggaattctctccccaaagtggcttatgcaactgccatggactggtttattgctgtttgttatgcatttgtgttctctgccctaattgaatttgcaactgttaattacttcaccaaaagaggatgggcttgggatgggaagagtgtagtaaatgacaagaaaaaagaaaaggcttccgttatgatacagaacaacgcttatgcagtggctgttgccaattatgccccgaatctttcaaaagatccagttctctccaccatctccaagagtgcaaccacgccagaacccaacaagaagccagaaaacaagccagctgaagcaaagaaaactttcaacagtgttagcaaaattgacagaatgtccagaatagtttttccagttttgtttggtacctttaatttagtttactgggctacatatttaaacagagaacctgtattaggggtcagtccttgaattgagacccatgttatctttgggatgtatagcaacattaaatttggtttgttttgctatgtacagtctgactaataactgctaatttgtgatccaacatgtacagtatgtatatagtgacatagcttaccagtagacctttaatggagacatgcatttgctaactcatggaactgcagacagaaagcactccatgcgaaaacagccattgccttttttaaagatttaccctaggacctgatttaaagtgaatttcaagtgacctgattaatttcctattcttccaaatgagatgaaaatggggatcctgtacaaccctttgtggacccttttggtttagctcttaagtaggggtattttctactgttgcttaattatgatggaagataacattgtcattcctagatgaatcctttgaagtaacaaacattgtatctgacatcagctctgttcatgagtgctcagagtccctgctaatgtaattggaagcttggtacacataagaaaaactagagatttgaaatcagctatgaattactctatatagtatctatagccatgtacatattacagcatgacaagctcaaataattatgagtcagcccgaaaggatgttaattatgcctacgatgtaataactattggaatgtcatggtcattacatttttagcttcagagtttatttgaaagtaataattgaaatcctacaatttattttaatcattggaaactaccttaattaaaaaaaaagaaaagaaatgtgtcttaacatttccaggtatgtgttgtattgaaattgatcagctaaattttacgggtgctggagactggaaaaagcatccagtttggttgctgtggagcaacatgcatattggattagaaaattgtgccaaaaactcccactgatgagaattcataggtgccccacactatgacaaacacttatatgattctcctctttcctgtttactgcaaattctgccttaaggcttcttttcaagactcagaagccactaattataaaggaaagggcagttaattggcacatttttctcttgtgaaagcagttctttcagataagaattaatgtaaatctgcttttgtaaattgcaactttaaatttcgctgactcaaatttacaacagctttgtataccagaagaggttttggtaagggttgaacatttttacactgcaactttaaaacatcaccaatagattgtggattatttcacgtgcacaaacatacacacacacacacacacacacacacatacacagctaaattagaaaacacaattttaaattttatataattactagttattaatgggtaaaattcatttttcttttaatatcttaaaatattatttatgccccgaaatatgctaataaaagttaaagattgtgtattatgcctagattcaaagtttttggcaaacttcaaatacttttgattgacatgtacattagcagttattagttgacttttactaaaacatgcacctttacgatggtgtttttgtagaaacataagtagtcaaatagtaacatttattgcagttttgtacagtatttgagtatagtgcataaataggtatgttcataaaatcaataaaaggagtatctatggaaataagcaaaatatcagcaaaaattgctattcctttgcctcatttaatttttaaaatttctttgtttccatgtgattctattatatgctttgcatgcttgtataaaaccaaggtcacaaatgcaacttattaacggaatttgccaagaagacagccttgacattaaaaattccctcacaagaggtaatccataatccttaataaaataaaattgttacatgagccaataaatgtatttctttaattcc

SEQ ID NO: 16158 - DNA, 3401 bp, Artificial Sequence
  derived and/or modified sequence
tcaaacgcgtcgtttcgcagcacttgatcggaacccggctgcctctaagacttggtcttgggcaaccgtgggtgggcaggaagggaaattatttattttattttgttaaggggagtgaagaaaagaagacgtgaggaccgcagttcactgtaatgtagagtaattgcaaaaagcggcggtgatgaagacaaaattgaacatctacaacatgcagttcctgctttttgttttcttggtgtgggaccctgccaggttggtgctggctaacatccaagaagatgaggctaaaaataacattaccatctttacgagaattcttgacagacttctggatggttacgataatcggcttagaccaggactgggagacagtattactgaagtcttcactaacatctacgtgaccagttttggccctgtctcagatacagatatggaatatacaattgatgttttctttcgacaaaaatggaaagatgaacgtttaaaatttaaaggtcctatgaatatccttcgactaaacaatttaatggctagcaaaatctggactccagataccttttttcacaatgggaaaaaatcagtagctcataatatgacaatgccaaataagttgcttcgaattcaggatgatgggactctgctgtataccatgaggcttacagttcaagctgaatgcccaatgcacttggaggatttcccaatggatgctcattcatgtcctctgaaatttggcagctatgcatatacaacttcagaggtcacttatatttggacttacaatgcatctgattcagtacaggttgctcctgatggctctaggttaaatcaatatgacctgctgggccaatcaatcggaaaggagacaattaaatccagtacaggtgaatatactgtaatgacagctcatttccacctgaaaagaaaaattgggtattttgtgattcaaacctatctgccttgcatcatgactgtcattctctcccaagtttcattctggcttaacagagaatctgtgcctgcaagaactgtgtttggagtaacaactgtcctaacaatgacaactctaagcatcagtgctcggaattctctccccaaagtggcttatgcaactgccatggactggtttattgctgtttgttatgcatttgtgttctctgccctaattgaatttgcaactgttaattacttcaccaaaagaggatgggcttgggatgggaagagtgtagtaaatgacaagaaaaaagaaaaggcttccgttatgatacagaacaacgcttatgcagtggctgttgccaattatgccccgaatctttcaaaagatccagttctctccaccatctccaagagtgcaaccacgccagaacccaacaagaagccagaaaacaagccagctgaagcaaagaaaactttcaacagtgttagcaaaattgacagaatgtccagaatagtttttccagttttgtttggtacctttaatttagtttactgggctacatatttaaacagagaacctgtattaggggtcagtccttgaattgagacccatgttatctttgggatgtatagcaacattaaatttggtttgttttgctatgtacagtctgactaataactgctaatttgtgatccaacatgtacagtatgtatatagtgacatagcttaccagtagacctttaatggagacatgcatttgctaactcatggaactgcagacagaaagcactccatgcgaaaacagccattgccttttttaaagatttaccctaggacctgatttaaagtgaatttcaagtgacctgattaatttcctattcttccaaatgagatgaaaatggggatcctgtacaaccctttgtggacccttttggtttagctcttaagtaggggtattttctactgttgcttaattatgatggaagataacattgtcattcctagatgaatcctttgaagtaacaaacattgtatctgacatcagctctgttcatgagtgctcagagtccctgctaatgtaattggaagcttggtacacataagaaaaactagagatttgaaatcagctatgaattactctatatagtatctatagccatgtacatattacagcatgacaagctcaaataattatgagtcagcccgaaaggatgttaattatgcctacgatgtaataactattggaatgtcatggtcattacatttttagcttcagagtttatttgaaagtaataattgaaatcctacaatttattttaatcattggaaactaccttaattaaaaaaaaagaaaagaaatgtgtcttaacatttccaggtatgtgttgtattgaaattgatcagctaaattttacgggtgctggagactggaaaaagcatccagtttggttgctgtggagcaacatgcatattggattagaaaattgtgccaaaaactcccactgatgagaattcataggtgccccacactatgacaaacacttatatgattctcctctttcctgtttactgcaaattctgccttaaggcttcttttcaagactcagaagccactaattataaaggaaagggcagttaattggcacatttttctcttgtgaaagcagttctttcagataagaattaatgtaaatctgcttttgtaaattgcaactttaaatttcgctgactcaaatttacaacagctttgtataccagaagaggttttggtaagggttgaacatttttacactgcaactttaaaacatcaccaatagattgtggattatttcacgtgcacaaacatacacacacacacacacacacacacacatacacagctaaattagaaaacacaattttaaattttatataattactagttattaatgggtaaaattcatttttcttttaatatcttaaaatattatttatgccccgaaatatgctaataaaagttaaagattgtgtattatgcctagattcaaagtttttggcaaacttcaaatacttttgattgacatgtacattagcagttattagttgacttttactaaaacatgcacctttacgatggtgtttttgtagaaacataagtagtcaaatagtaacatttattgcagttttgtacagtatttgagtatagtgcataaataggtatgttcataaaatcaataaaaggagtatctatggaaataagcaaaatatcagcaaaaattgctattcctttgcctcatttaatttttaaaatttctttgtttccatgtgattctattatatgctttgcatgcttgtataaaaccaaggtcacaaatgcaacttattaacggaatttgccaagaagacagccttgacattaaaaattccctcacaagaggtaatccataatccttaataaaataaaattgttacatgagccaataaa

SEQ ID NO: 16159 - DNA, 2366 bp, Artificial Sequence
  derived and/or modified sequence
aagcggcctcggggagcagcccgaggctgcgcgtgggctccgctcctccggcgaggtgtgggcgaggggagcggcgctccgagcgcacccaggcgcccgacgccgcccgggtctgcgccgctgctagtgccaggcgggcgacgagcggcggtgatgaagacaaaattgaacatctacaacatgcagttcctgctttttgttttcttggtgtgggaccctgccaggttggtgctggctaacatccaagaagatgaggctaaaaataacattaccatctttacgagaattcttgacagacttctggatggttacgataatcggcttagaccaggactgggagacagtattactgaagtcttcactaacatctacgtgaccagttttggccctgtctcagatacagatatggaatatacaattgatgttttctttcgacaaaaatggaaagatgaacgtttaaaatttaaaggtcctatgaatatccttcgactaaacaatttaatggctagcaaaatctggactccagataccttttttcacaatgggaaaaaatcagtagctcataatatgacaatgccaaataagttgcttcgaattcaggatgatgggactctgctgtataccatgaggcttacagttcaagctgaatgcccaatgcacttggaggatttcccaatggatgctcattcatgtcctctgaaatttggcagctatgcatatacaacttcagaggtcacttatatttggacttacaatgcatctgattcagtacaggttgctcctgatggctctaggttaaatcaatatgacctgctgggccaatcaatcggaaaggagacaattaaatccagtacaggtgaatatactgtaatgacagctcatttccacctgaaaagaaaaattgggtattttgtgattcaaacctatctgccttgcatcatgactgtcattctctcccaagtttcattctggcttaacagagaatctgtgcctgcaagaactgtgtttggagtaacaactgtcctaacaatgacaactctaagcatcagtgctcggaattctctccccaaagtggcttatgcaactgccatggactggtttattgctgtttgttatgcatttgtgttctctgccctaattgaatttgcaactgttaattacttcaccaaaagaggatgggcttgggatgggaagagtgtagtaaatgacaaggtaagtgagagcttccgtgttatcattattaagaaaataccctaatgaattccgcttgtaacagatatgtttctaaaaactgacattaaagacatccatatatatatgaatttgaatcatatcaatttcttttaaagtgttcttgcctgaaatcctttaggagttcttgtagtactaatacttccattaaaaccactccgtagcatctgttgagctgtatgtgtcaggcactgtgctaagtgttttacatatgctctctcacataatctttatagcatccttatgactagactgccttcttattcttatttttactcatgaagaatctgaagcagtaaagttattttcttgcccaagcttacacaacttgttagtaagtatacttgaactccgatctacctgtctgactgttaagttcatggttttaacaccacactgcattattataaagagattagaaaaagaaaatgggcattaattttacttattatagaattccaggctctatcaatgaattgaatcctcttcacctgttccagtctctgctgattgattgtaaaagcccggatagcatttttttaaaatctttcccatgttgtatggaataaatatgtcggtgctggaatgcttaggaattttaaattgttcatatggtctaaaagggaaaagttatttgtttttaagattaacttcttttgagattattgctgtccatatttaggtttcaagtactgaatctaatgggagatttgtgcattgatataacagctgtttcctttcatactctgtagattatgtatctgcctaagaggaggctttgaatgtatcataatcatctatattcttaataatggtaaaaagttgtattcagaggatatctttaacattgtatcaacctaaatgcttcttttattaaatttggattaacatacttgcagatttgatttctttttcagttatttgaatatattttttcatttctatgaccatgttacagtttaaatatacaagcagtaaatgttatagtttaaaagtcttggtctttttccttaattttgtaagccatagaaattttaataagactgattatttatttcattttataagttgtgttttccctactaacggagccaacaaataaatattaaaaggaa

SEQ ID NO: 16160 - DNA, 1356 bp, Artificial Sequence
  derived and/or modified sequence
atgaaaactaagttgaatatttacaatatgcagtttcttctgttcgtgtttctcgtgtgggatcctgcccgactggtgcttgccaatattcaagaggacgaagctaagaacaacattaccattttcacccgaattctggatagactgctagatgggtacgataaccggctcaggcccggactgggtgactctatcactgaggtttttaccaatatttatgtgaccagctttgggccagtatctgatactgacatggagtacactatcgatgtcttcttccgtcaaaaatggaaggacgaacgtctgaagtttaagggccctatgaacatactcaggctcaataacctcatggcctccaagatctggactcccgacacattctttcataatggaaaaaagtcagtggcccacaatatgacgatgcccaacaagttgctccgaatccaggatgacgggacactgctctacactatgaggctgacagtgcaggctgagtgcccaatgcatcttgaggactttccaatggacgctcattcctgcccactgaagttcggtagctacgcctatacaacgagtgaggttacctacatttggacatacaacgctagtgacagcgttcaggtcgcccccgatggtagtcggttgaatcaatacgacctgctggggcagagtataggcaaggagacaatcaagtcttccaccggcgagtacaccgtcatgactgctcattttcaccttaagaggaagattggatattttgttatccagacctatctgccatgcatcatgaccgttattttgagccaagtgtcattttggttgaatcgggagtcagtaccagctcggaccgtattcggtgtgaccacagtccttacaatgacgaccctctcaatttccgccagaaactccttgcccaaggttgcctacgcaacagcgatggactggtttatcgccgtttgctatgcctttgtgttcagcgctctcatcgaattcgccacagtcaattattttacaaaacgggggtgggcatgggacggaaaatctgtcgttaatgacaagaaaaaagaaaaggcatcagtgatgatacaaaacaatgcctacgccgtggccgttgccaactacgctccaaatctgtctaaggatcccgtactcagtaccataagtaaaagcgccactaccccggaaccgaataaaaaaccagagaacaagcctgctgaagccaaaaaaacttttaacagtgttagcaagattgatagaatgtccaggatcgttttccccgttctgtttggcacctttaatctggtgtactgggcaacatatttaaacagagaacccgtgctgggggtcagtccgtag

SEQ ID NO: 16161 - DNA, 1356 bp, Artificial Sequence
  derived and/or modified sequence
atgaaaacaaaactgaacatctataatatgcagttccttctttttgttttcctggtttgggacccagccagattagtgttggccaacattcaggaggatgaggccaagaataatataaccattttcacgcggatcctggatcgcctattagatgggtacgataatagacttagacccggtctcggtgactctattactgaggtattcactaatatctacgtgacatcttttggccccgtgtccgataccgatatggaatacaccatcgacgtattctttcgccaaaaatggaaggatgagcgcttgaagttcaaaggccccatgaacattctacggcttaacaatctaatggcttctaagatctggaccccagacacctttttccacaacggaaagaaaagtgttgcccacaacatgaccatgcccaacaagctgctgcggatccaggatgatggcactttgttatatacaatgcggctgacggtgcaggccgagtgccctatgcacttggaggattttcctatggatgcacactcatgccccctgaaattcgggagctatgcctataccacctctgaggtgacctatatctggacctacaacgccagtgattccgtgcaggtggcccctgacggaagccggctcaaccagtatgatctgctggggcagagtatcggaaaagagactataaagagcagcacaggggagtacacagtgatgactgctcattttcaccttaaacgcaaaatcgggtatttcgtcattcagacatatctgccatgtataatgaccgtcatcctcagccaggtttccttttggctgaacagagaatccgtccccgcaaggactgtgttcggagttaccaccgtgctcactatgactaccctgagcatttcggcaagaaactctctgcctaaagtagcatatgcaaccgctatggattggttcattgcagtgtgctatgccttcgtattttcggcactgatcgaatttgctactgtcaactattttaccaagagagggtgggcatgggatggcaaatcagttgtgaatgacaaaaagaaagaaaaagccagtgtgatgattcagaacaatgcttatgccgtcgctgtggctaactatgcaccgaatttgtccaaagatccggtgctatccactatcagcaaatcagcgacaacgcctgaacccaataaaaaacctgagaacaaacctgctgaagcaaaaaagactttcaactcagtgtctaaaatagataggatgtccaggatcgtcttccctgtactatttggtacatttaatctagtgtactgggccacatatctgaatcgggagcctgtattgggcgtttcaccgtag

SEQ ID NO: 16162 - DNA, 459 bp, Artificial Sequence
  derived and/or modified sequence
atgaaaactaagttgaatatctacaatatgcaatttctattattcgtgttcttggtctgggatcctgcacggctggtattagcgaatattcaggaggatgaggccaaaaacaatattaccattttcacgcgcatcctggatcggctactagacggctatgataaccggctaaggccaggtctgggcgattcgatcactgaagtcttcaccaatatctatgtgacatcatttggccccgtgtctgataccgacatggagtacacgatcgatgtgttttttcggcagaagtggaaagatgaacgcctaaaatttaagggcccgatgaatatccttcggctaaacaatctgatggcgagcaagatttggacgcctgacacatttttccacaacggcaaaaaatccgtggctcacaacatgaccatgcctaataaactgttgcgcatacaagatgacggctag

SEQ ID NO: 16163 - DNA, 414 bp, Artificial Sequence
  derived and/or modified sequence
atgaagacaaaactaaatatctataatatgcaatttctgctcttcgtgtttctggtgtgggacccagcgcggttggtcctagccaatatacaggaagatgaggccaagaataacatcactattttcactcgcattctggatagactactggatggatacgataatcgtttaagaccaggtctgggtgatagcatcactgaggtctttacaaacatatacgtaacctcattcggccccgtgagcgacactgacatggagtataccattgatgtgttctttcggcagaagtggaaagatgaacgcctgaagtttaaggggcccatgaatatcctgaggctaaataacctgatggcgtccaaaatatggacacccgacacattttttcataacggtaaaaagagcgttgcccattag

SEQ ID NO: 16164 - DNA, 1356 bp, Artificial Sequence
  derived and/or modified sequence
atgaagaccaaattgaacatctacaacatgcaatttctcctcttcgtcttcctagtgtgggacccagcaaggctcgtgctcgcaaatatccaggaggatgaggctaaaaataacattacaatattcacacggatattggatcggctcctggatgggtacgataaccgccttcggccagggctgggtgactccataacggaggtgtttacaaatatctacgtaaccagcttcggtcccgttagtgatactgatatggaatacaccattgatgtcttctttaggcagaagtggaaggacgaacgcctcaagtttaaaggcccgatgaacattctgcgactgaataacttaatggccagtaagatatggacacccgacacattcttccacaacggtaaaaaatccgtggcacacaacatgaccatgcccaataagttgttgagaatccaggacgacggaactctcctctatacaatgagactcacggtgcaggccgaatgtccaatgcaccttgaagattttcccatggacgcccactcttgtccactgaagttcggcagttacgcctatactactagcgaggttacatatatatggacttacaacgcttccgatagcgtgcaggtggctcccgacggctctaggcttaatcaatacgatctcctggggcagtcaatagggaaagagactatcaagtcctcgaccggcgaatatacagttatgacagcgcactttcacttgaagcgcaaaataggctacttcgtcatccagacctatttaccatgcataatgacagtgatcctctcccaggttagcttctggctgaatcgcgaatccgtgcctgcacgcactgtgttcggagttacaaccgtgctcactatgacaactctgagtataagcgctcggaattcactgcccaaggtcgcatacgccactgctatggactggtttatcgctgtctgttacgcttttgtgttcagtgcactgatcgagtttgctaccgtgaactattttactaagagaggatgggcttgggacggcaaatctgttgtcaatgacaagaagaaagagaaggccagcgtcatgattcaaaacaacgcttacgcagtcgccgttgcgaactacgcccctaacctgtctaaggacccagtgctgtccacaatttctaagagtgcaacaacaccagaacctaataagaagccagaaaacaagccggcggaggcgaaaaagacctttaactccgtgagtaagatcgaccgcatgagtcgaattgtgtttcctgtgttgttcgggaccttcaatttagtgtattgggcgacctacttaaatcgggagccggtgctaggcgtgtctccctag

SEQ ID NO: 16165 - DNA, 1356 bp, Artificial Sequence
  derived and/or modified sequence
atgaaaaccaaactcaacatctacaatatgcaatttctcctgtttgtattcctggtgtgggaccctgcacgtctggtgcttgcaaacattcaggaggacgaggctaagaataatattaccattttcacaaggattctcgataggttgctcgacggctacgacaacaggctaaggccaggactgggagatagcatcacagaggtattcaccaacatctacgtgaccagctttggacccgtgtctgacaccgatatggagtatacgattgatgtgttcttccgtcagaaatggaaggacgaaagactaaagttcaaggggcctatgaacatcctaagactgaacaacttgatggccagcaagatctggacccccgatacattctttcataatggtaaaaaaagtgtagcccacaacatgacgatgcccaataagctcttgaggatacaagacgatggtactcttctttacaccatgcgactgactgtgcaggcagagtgtccaatgcatctggaggactttcctatggatgcccattcctgcccgctgaaatttgggagctacgcatatactacatccgaagtaacctacatctggacctataacgcttctgacagcgtccaggtcgccccagacgggtcccgattaaaccaatacgatctgcttggacaatccataggcaaggaaaccatcaagtccagtacgggcgagtacacggtgatgacagcacacttccacctgaaacgaaagatagggtacttcgttattcagacatacttgccctgtataatgacggtgatcttgtctcaggtgtccttttggctgaatcgggagtccgtgccagcccgaactgtgtttggcgtgacaaccgttctgactatgacgaccctgtccattagtgcgcgaaactcactccctaaggttgcatatgctactgcaatggattggtttatcgccgtttgttacgccttcgtcttctcagccctgatcgaattcgcgactgtcaactatttcactaaacgcggttgggcatgggatggaaaatctgtggtgaacgataaaaaaaaagagaaagcctctgttatgatccagaacaatgcctacgcagtggctgtggcaaattatgcccccaacctctccaaggatcccgtgctcagcaccatttctaaatctgccactactccagaaccgaacaaaaaacctgaaaacaaacctgccgaggcaaagaagacatttaactctgtcagtaagatagacagaatgagccggatagtctttcctgtgcttttcggtacctttaatctggtttactgggctacatatctcaatcgcgaaccagtcctcggagtgtcaccatag

SEQ ID NO: 16166 - DNA, 1104 bp, Artificial Sequence
  derived and/or modified sequence
atgaagactaagctcaatatttataacatgcagtttttactgttcgtgtttttagtgtgggacccagcccgcttagtcttagccaacatccaagaggacgaggcaaagaacaacataacaattttcacgcgtatactggataggttgctggatggctatgacaacagactgcgccctgggctcggtgacagcattactgaggtcttcacaaatatctatgtcacgagcttcggtcctgttagcgataccgatatggaatacactatcgacgtctttttccgccaaaagtggaaggatgagaggctcaagtttaagggcccgatgaatatactgagactgaataatttgatggcctcaaagatttggactccagacactttcttccataacgggaaaaaatccgtcgctcataatatgaccatgcctaacaaattgctgaggatacaagatgacggcactctcctgtataccatgaggctgaccgttcaagctgaatgcccaatgcacctggaggattttcccatggatgcccattcttgtcctctcaaatttgggagttacgcatataccacctctgaggttacctacatttggacctataacgccagcgattctgtccaggtagctccagatggaagtaggcttaaccagtatgatttactggggcaatcaattggcaaggaaactattaaatcatccactggggagtacacagtgatgacagcacactttcatctgaagaggaaaatcggatattttgtgatacagacctacctgccctgcataatgacagtcatcctgagccaggtgtctttctggcttaatagagaaagcgtgccagccagaactgtcttcggtgttactaccgtgctgacgatgacaactctgtccatcagtgcccgtaacagtctgcccaaggtggcctatgcaaccgccatggattggttcatcgctgtttgctacgcgtttgttttttctgcactgattgagttcgcaacagtgaattatttcaccaagcgcggttgggcctgggacggcaaatcagtggtgaacgataaagtctcggaatcttttcgcgtgattatcatcaagaaaatcccatag

SEQ ID NO: 16167 - DNA, 1356 bp, Artificial Sequence
  derived and/or modified sequence
atgaagaccaagctgaacatctacaacatgcagttcctgctgtttgtgttcctggtgtgggaccctgcccggctggtgctggccaacatccaggaggatgaggccaagaacaacatcaccatcttcacccgcatcctggaccggctgctggatggctatgacaaccggctgcggcccggcctgggggacagcatcacagaggtgttcaccaacatctacgtgaccagctttggacctgtgtctgacacagacatggagtacaccattgatgtgttcttccggcagaagtggaaggatgagcggctgaagttcaagggccccatgaacatcctgcggctgaacaacctgatggccagcaagatctggaccccagacaccttcttccacaacgggaagaagtctgtggcccacaacatgaccatgcccaacaagctgctgcgcatccaggatgatggcaccctgctgtacaccatgaggctgactgtgcaggctgaatgtcccatgcacctggaggacttccccatggatgcccacagctgccccctgaagtttggcagctatgcctacaccaccagcgaggtgacctacatctggacctacaatgccagtgacagcgtgcaggtggccccagatggcagccggctgaaccagtatgacctgctgggccagagcatcggcaaggagaccatcaagagcagcactggagagtacacagtgatgacagcccacttccacctgaagaggaagattggctactttgtgatccagacctacctgccctgcatcatgaccgtcatcctgagccaggtgtccttctggctgaaccgggagagcgtgcctgccaggacagtgtttggagtgaccaccgtgctgaccatgaccaccctgagcatcagcgccaggaacagcctgcccaaggtggcctatgccacagccatggactggttcatcgctgtgtgctacgcctttgtgttcagcgccctgattgaatttgccaccgtgaactacttcaccaagaggggctgggcctgggatggcaagtctgtggtgaatgacaagaagaaggagaaggcctctgtgatgatccagaacaatgcctatgctgtggccgtggccaactatgcccccaacctgagcaaggaccctgtgctgagcaccatcagcaagagcgccaccaccccagagcccaacaagaagccagagaacaagccagctgaggccaagaagaccttcaacagcgtgtccaagattgacaggatgagcagaattgtgtttcctgtgctgtttggcaccttcaacctggtgtactgggccacctacctgaaccgggagcctgtgctgggcgtgagcccctag

SEQ ID NO: 16168 - DNA, 459 bp, Artificial Sequence
  derived and/or modified sequence
atgaagaccaagctgaacatctacaacatgcagttcctgctgtttgtgttcctggtgtgggaccctgcccggctggtgctggccaacatccaggaggatgaggccaagaacaacatcaccatcttcacccgcatcctggaccggctgctggatggctatgacaaccggctgcggcccggcctgggggacagcatcacagaggtgttcaccaacatctacgtgaccagctttggacctgtgtctgacacagacatggagtacaccattgatgtgttcttccggcagaagtggaaggatgagcggctgaagttcaagggccccatgaacatcctgcggctgaacaacctgatggccagcaagatctggaccccagacaccttcttccacaacgggaagaagtctgtggcccacaacatgaccatgcccaacaagctgctgcgcatccaggatgatggatag

SEQ ID NO: 16169 - DNA, 414 bp, Artificial Sequence
  derived and/or modified sequence
atgaagaccaagctgaacatctacaacatgcagttcctgctgtttgtgttcctggtgtgggaccctgcccggctggtgctggccaacatccaggaggatgaggccaagaacaacatcaccatcttcacccgcatcctggaccggctgctggatggctatgacaaccggctgcggcccggcctgggggacagcatcacagaggtgttcaccaacatctacgtgaccagctttggacctgtgtctgacacagacatggagtacaccattgatgtgttcttccggcagaagtggaaggatgagcggctgaagttcaagggccccatgaacatcctgcggctgaacaacctgatggccagcaagatctggaccccagacaccttcttccacaacgggaagaagtctgtggcccactag

SEQ ID NO: 16170 - DNA, 1104 bp, Artificial Sequence
  derived and/or modified sequence
atgaagaccaagctgaacatctacaacatgcagttcctgctgtttgtgttcctggtgtgggaccctgcccggctggtgctggccaacatccaggaggatgaggccaagaacaacatcaccatcttcacccgcatcctggaccggctgctggatggctatgacaaccggctgcggcccggcctgggggacagcatcacagaggtgttcaccaacatctacgtgaccagctttggacctgtgtctgacacagacatggagtacaccattgatgtgttcttccggcagaagtggaaggatgagcggctgaagttcaagggccccatgaacatcctgcggctgaacaacctgatggccagcaagatctggaccccagacaccttcttccacaacgggaagaagtctgtggcccacaacatgaccatgcccaacaagctgctgcgcatccaggatgatggcaccctgctgtacaccatgaggctgactgtgcaggctgaatgtcccatgcacctggaggacttccccatggatgcccacagctgccccctgaagtttggcagctatgcctacaccaccagcgaggtgacctacatctggacctacaatgccagtgacagcgtgcaggtggccccagatggcagccggctgaaccagtatgacctgctgggccagagcatcggcaaggagaccatcaagagcagcactggagagtacacagtgatgacagcccacttccacctgaagaggaagattggctactttgtgatccagacctacctgccctgcatcatgaccgtcatcctgagccaggtgtccttctggctgaaccgggagagcgtgcctgccaggacagtgtttggagtgaccaccgtgctgaccatgaccaccctgagcatcagcgccaggaacagcctgcccaaggtggcctatgccacagccatggactggttcatcgctgtgtgctacgcctttgtgttcagcgccctgattgaatttgccaccgtgaactacttcaccaagaggggctgggcctgggatggcaagtctgtggtgaatgacaaggtgtctgagagcttccgggtcatcatcatcaagaagatcccctag

SEQ ID NO: 16171 - DNA, 1356 bp, Artificial Sequence
  derived and/or modified sequence
atgaagaccaagctgaacatctacaacatgcagttcctgctgttcgtttttctcgtgtgggatccagccaggttagtcctggcaaacatccaagaggacgaagccaaaaataacataacgatttttacgcggatcctcgataggctgctggatggatatgataaccgcttgagacctggtctaggggacagtatcactgaggtgttcacaaacatatacgtgacgagttttggccctgtaagcgacactgatatggaatacaccatcgacgtttttttccggcagaaatggaaggacgaacggctgaaatttaaaggacccatgaatatacttaggcttaacaatttgatggccagcaaaatctggactcccgacaccttttttcacaatggaaaaaaaagtgtggcccataatatgacaatgcctaataagctcctgcgcattcaggacgacgggacactgctgtacactatgcgcctgactgtgcaggccgaatgcccgatgcaccttgaggactttcctatggacgcgcatagctgtccactgaaattcgggtcatacgcctacacgacgagtgaggttacttatatctggacctacaacgcgagcgacagcgtgcaagtggccccggacggaagccggctaaatcagtacgatctgttggggcagagcatcggcaaagaaaccattaagtctagtactggcgaatacaccgtcatgaccgcccattttcatctgaagcgcaaaattgggtatttcgtgattcagacatacctgccttgtattatgacagtcattttatcccaggtgtccttttggcttaaccgggaatctgttcctgcgcgaacggtgttcggcgtgacaaccgtattaactatgactaccttatctattagcgcacgtaatagcctgccaaaggtcgcttacgctaccgctatggattggttcattgccgtctgttatgccttcgtgttctctgccctcatcgagttcgctacggtgaattattttactaagaggggttgggcatgggatggcaaatccgttgttaacgataagaagaaagaaaaagcctctgtcatgattcaaaacaacgcctatgccgtggcagttgctaattatgctcctaatttgtccaaggacccagtgctctcgacgatctctaagtccgcgaccactccagagccgaataagaagccagaaaataagccagccgaagcgaagaagacattcaattcagtatcaaagattgacagaatgagcaggatagtgttcccagtgctattcgggacgttcaacctcgtgtactgggccacctatcttaaccgggagcccgttttaggggtatctccttag

SEQ ID NO: 16172 - DNA, 1356 bp, Artificial Sequence
  derived and/or modified sequence
atgaagaccaagctgaacatctacaacatgcagttcctgctgttcgtttttctcgtttgggatccagcgcgcctagtgttggctaatattcaagaggacgaagctaaaaataacattacaatttttacacgaatcctcgaccggctcctggacggctacgataatcgcctcagacctggtttaggagactctataacagaagtgttcacaaatatatatgtgacatccttcgggcccgttagcgataccgacatggagtatactatcgacgtgtttttccggcagaagtggaaggatgagagacttaaatttaagggccctatgaatattctgcggttgaacaacctcatggcttccaaaatatggacaccagacacattttttcacaacggcaaaaaaagcgtggcgcataatatgactatgcccaataaactgctacgcatacaagacgacggtactctcctgtacacaatgcgcctgaccgtacaggctgagtgtccaatgcaccttgaagatttccctatggacgctcatagttgtccgttgaagtttggcagttacgcctacacaactagcgaagtgacctacatttggacatacaatgcctctgactcagtccaagtggctcctgacggttctcgcctgaaccagtacgacctgctggggcaatccattggtaaagaaacaataaaatcatctaccggagagtacactgtgatgacagcacactttcatctgaaacggaaaattgggtattttgtgatacaaacctatctgccgtgtattatgacagtgatcctatcccaagtgtcgttttggctgaacagggaaagtgttcccgctcgaacagtcttcggcgttaccacagtgctgacaatgacaacactgtctatctctgcccggaatagtctgccgaaagttgcttatgcaactgctatggattggtttatcgctgtgtgctacgcttttgtattcagcgccttgattgagtttgcaacagtgaactactttacaaaacgaggttgggcctgggatgggaagagtgtggtgaatgataaaaagaaggaaaaggctagcgtcatgatccagaacaatgcctacgctgtcgcggtcgcgaattacgcccccaatttgagcaaggacccagtgctctctactatatcaaaatctgcaacaacgccagagccaaataagaaacctgagaataagcccgcggaagcaaagaagaccttcaattccgtttccaagattgatcggatgtcacgcattgtgttcccggttctatttggaacattcaacctggtgtactgggctacatatctcaaccgcgagcccgtactcggggtgagcccctag

SEQ ID NO: 16173 - DNA, 459 bp, Artificial Sequence
  derived and/or modified sequence
atgaagaccaagctgaacatctacaacatgcagttcctgctgttcgttttcctggtgtgggatccagcaagattggtcttagctaacattcaggaagatgaagcaaaaaacaatataaccatcttcacccggatcctcgacaggctgctcgacggttatgacaaccgcctgcgccccggcttgggcgattcaattacagaggtgttcactaatatctacgttacaagtttcgggccggtgtccgacaccgacatggagtataccatcgacgtgttttttcgccaaaagtggaaggacgagcgactgaagtttaaaggtcctatgaatattttgcggctgaataatttgatggcatcaaaaatctggaccccagatacctttttccacaacggtaaaaaaagtgtcgcgcataatatgacgatgcccaataaactactccgcatacaagatgatggatag

SEQ ID NO: 16174 - DNA, 414 bp, Artificial Sequence
  derived and/or modified sequence
atgaagaccaagctgaacatctacaacatgcagttcctgctgttcgtgttccttgtgtgggatcctgctaggctcgtgttggcaaatattcaggaagacgaagcaaagaataacattaccattttcacaagaattttggaccgcctcctggatggttatgacaacaggttgcgcccaggtctgggggactctattactgaggtctttactaatatttacgtaaccagcttcggccctgtttcggacaccgacatggagtatactatagatgtcttcttccgccagaagtggaaagacgagcgactgaagttcaaggggcctatgaacatcctgcgtctgaataacctcatggcaagtaagatctggacaccagacacgttctttcacaacggcaaaaagtcggtggctcactag

SEQ ID NO: 16175 - DNA, 1356 bp, Artificial Sequence
  derived and/or modified sequence
atgaagaccaagctgaacatctacaacatgcagttcctgctgttcgtgttcctggtatgggacccagcaaggcttgtactggccaatatacaggaggacgaggccaagaacaacattaccatctttacaaggattctggatcggttattggacggttatgataaccgcctgcgacccggcctgggagatagtatcactgaagtcttcactaacatttacgtgacaagctttggaccagtgagcgataccgatatggaatatactatcgatgttttctttaggcaaaagtggaaggacgaaaggttgaagttcaagggtcccatgaacatacttagactaaacaatctgatggcaagcaagatctggacaccagatacattttttcataacggcaagaagtctgtagcacataatatgacgatgccgaataaacttttgcgcatacaggacgacggcactctgctgtacacgatgaggctcaccgttcaagcagagtgtccaatgcatctggaagattttcctatggatgcacatagctgtcctctgaagtttggctcctacgcatacactacatctgaagtgacttatatctggacgtataacgcctctgactccgtacaggtggcgccagacggttctcggctgaatcagtatgacctactgggacagtctattgggaaggagaccatcaagagctcaaccggagaatatacagtgatgacggctcactttcatctgaaaaggaagatcggatatttcgtgattcagacatacttgccttgcattatgaccgttatccttagccaagtgtccttttggcttaacagagagagcgtgccggctagaaccgtgttcggcgtgactacggtcctgacaatgaccaccctgtccatctctgcaagaaacagcctgcctaaggtggcatacgccacggccatggactggttcatagcagtgtgttatgcatttgtctttagcgcgctcatagagttcgctacagtcaactatttcaccaagagagggtgggcttgggacggcaagagcgtggtaaatgacaaaaagaaggagaaggccagcgtgatgatccaaaacaacgcttacgctgtcgccgtggccaactatgctcccaatctgtcaaaggaccccgtcctgtccactatctccaaatctgccaccacaccagaacccaataaaaagccagagaacaagccggccgaagccaaaaagacctttaattcagtgtcaaagatcgaccgaatgagccggatcgtgtttcccgtcctgttcggaacattcaacctggtgtactgggccacttacttgaatcgcgaaccggtgttaggcgtgtctccttag

SEQ ID NO: 16176 - DNA, 1356 bp, Artificial Sequence
  derived and/or modified sequence
atgaagaccaagctgaacatctacaacatgcagttcctgctgttcgtattcctggtctgggacccagcccgtcttgtcctggccaacattcaggaggacgaggcaaagaacaatatcactatctttacacgtatacttgatagactcttggatggctatgacaatcggttacggcccgggctgggagatagcatcactgaagtttttaccaatatctacgtgacaagtttcggtccagtctctgacaccgacatggaatatactatcgatgtgttctttagacagaagtggaaggacgagaggctcaaatttaaaggccccatgaacatcctccggctgaacaacctcatggcctctaagatctggacccccgatacattttttcacaatggaaagaaaagcgtggctcacaatatgaccatgccaaacaagcttttacgcatccaggacgacggcacactgctgtacactatgcggctgaccgtgcaggctgagtgtcccatgcacctcgaggacttcccaatggacgcccacagctgccctcttaaatttggatcatatgcatacactaccagtgaagtgacatacatctggacctacaacgcttccgactcagtccaggttgccccagatggaagtcgcttaaaccagtacgacttactggggcagagcatcggcaaggagacaattaagtcaagcacaggtgaatatactgtgatgacagcgcattttcacctaaagcggaaaatcggctactttgtcatccagacgtacctgccctgtattatgacggtgattctgagccaggtcagcttctggctgaatagggaatcggtgcctgctaggactgtgtttggggttacaacagtgttgaccatgaccactctgtccatctcagccaggaatagtctacccaaggtggcatacgccacagccatggattggtttatcgccgtctgctacgccttcgtattcagcgccctgatcgaatttgctaccgtaaattattttaccaagcgcggttgggcctgggacggcaagtcagtagtgaatgataagaagaaagaaaaagcctctgtgatgatccaaaacaatgcttacgccgtcgctgttgctaactacgcacctaacctgtctaaggatcccgtgctgtccaccatctcaaaaagcgcgaccaccccagaacctaataagaagcctgagaataagccagcagaggctaaaaagactttcaatagcgttagtaagatcgaccggatgtctaggatcgtatttcccgtcttattcggtacttttaatctggtttactgggcaacttacctgaaccgggagccggtcttgggagtcagcccatag

SEQ ID NO: 16177 - DNA, 1104 bp, Artificial Sequence
  derived and/or modified sequence
atgaagaccaagctgaacatctacaacatgcagttcctgctgttcgtctttctagtctgggaccctgcccggcttgtgctggccaatatccaggaagacgaggccaagaacaacattaccattttcactagaatcctcgatagattgttggacgggtatgacaacaggttgaggcccggactaggcgatagcataactgaggtgttcacgaacatctatgttacatcctttggacctgtcagcgatacggacatggagtacactatagatgtgttctttcgacagaaatggaaggatgagcgactgaaatttaaaggacctatgaatatcctcaggctgaataaccttatggcttcaaagatatggacacctgacacatttttccacaacggaaagaaatcggtggcacacaatatgacaatgcccaacaagctgttgagaattcaagacgatggcaccctcctgtataccatgcgcttaaccgtgcaggctgagtgtcctatgcacctggaagattttcctatggatgcccattcatgccctctgaagttcggaagttatgcttatacaacaagcgaggtgacatacatttggacttacaatgcttcagattcggtacaggtggcacccgatggatccagactgaaccaatatgatttgcttggccagtcaattggaaaggagaccattaagagttcaaccggagagtatacagtaatgacggcccacttccatctaaagcgcaagattggctatttcgtcattcaaacttacctgccatgcattatgacggtaattcttagccaagtgtctttctggctgaaccgcgagtcagtccctgctagaacagtcttcggtgttacaactgtgttaactatgaccacgctatctattagcgcaaggaattcccttcccaaagtcgcttatgctaccgcaatggattggtttatcgccgtgtgctacgccttcgtgttttccgccctcattgagttcgccaccgtgaactatttcacaaaaagaggatgggcttgggatggtaaatcagttgtcaatgataaggtgagtgagagcttccgtgtcatcataatcaaaaagattccatag

SEQ ID NO: 16178 - DNA, 1356 bp, Artificial Sequence
  derived and/or modified sequence
atgaagacaaaactgaacatttataacatgcagttcctgctctttgtctttttggtctgggacccagcgaggctggttttagcaaacatccaggaggacgaagcaaagaataatattactatctttacgcgcatcttggatcggttgttggatggatatgataaccgtctgcggccaggccttggcgattctataacggaggtgtttacaaatatatacgttacgtcttttggccctgtgtccgataccgatatggaatacactatcgacgtgttttttaggcagaagtggaaagacgaacgtcttaaattcaagggccctatgaacattctgaggctgaataacttaatggcatcgaagatttggacccccgataccttctttcataatggcaagaagtctgtggcacataatatgacaatgcctaacaaactgctgcggattcaggacgacgggacacttctctataccatgcgcctgacagtgcaggcagaatgtcccatgcatctggaggactttccaatggacgcccacagttgtcctctcaagttcggaagttacgcctacactacttctgaagtcacgtacatctggacctacaacgcgtccgactctgtccaggtggcgcctgatggatccaggttaaaccaatatgatctccttggccagtccatcggcaaagaaaccatcaaatccagtactggagagtatactgtgatgactgctcattttcatctgaagcggaaaatcggatatttcgtaatacaaacctatctgccctgtattatgaccgtcatcctgtctcaggtgtccttttggctcaatcgggaatctgtgcctgccaggacggtctttggcgtgactacagtgcttactatgacgacactgagcattagcgctagaaactctttgccgaaggtggcatacgctactgccatggactggtttatcgccgtgtgttacgcatttgttttctcggccttgattgaattcgctaccgtcaattatttcactaaaagaggctgggcgtgggatggaaaatccgttgtgaacgacaagaagaaggaaaaagccagtgtcatgatccagaataatgcatatgcagtggctgtggctaattacgcaccaaaccttagcaaggaccccgtgctgtccacaataagcaaatccgcaaccacccccgaacccaacaagaaacccgaaaacaaaccagctgaggcgaaaaaaacatttaattccgtgtctaagattgataggatgtcacggatcgtgttccccgtgctgttcggaaccttcaatctcgtctactgggctacatacctcaatagagagcccgtgctcggtgtctctccttag

SEQ ID NO: 16179 - DNA, 1356 bp, Artificial Sequence
  derived and/or modified sequence
atgaagactaagctcaacatttacaacatgcaattcttattgtttgtgttcttggtctgggacccggcacggcttgtgctggcgaacatccaggaggacgaggcgaaaaataacatcaccatttttacgaggattctggatcgactccttgatggatacgataacaggctgagaccgggactgggcgattctataactgaagtctttacaaatatctatgtaaccagtttcggcccagtatctgataccgacatggaatatactattgacgtgttcttccggcagaagtggaaagacgagagactcaaatttaagggtcccatgaatatcctaagactgaacaatctgatggcaagtaaaatttggacccctgatactttctttcataatggcaaaaagagtgtggctcataatatgacaatgccaaacaagctcctccgaatacaggatgacggcacactcttgtacactatgagactgaccgtacaggccgagtgccctatgcacctagaggacttccctatggacgcacactcctgcccgcttaagttcggaagttatgcgtacactacatctgaggtgacctacatctggacctataatgcctctgacagcgttcaggtcgcccctgacggatcccggctgaaccagtacgatctgctgggtcaatccatcggtaaagagaccattaagtcctctaccggagagtacacagtcatgaccgcccatttccatctgaaaagaaaaatcggatattttgtgattcagacttacctgccatgcattatgaccgtgattctctcacaggtgagtttttggttaaatcgcgagagcgtacctgctagaacggtatttggagtgaccaccgtcctcacaatgaccaccctgagcatcagcgccagaaacagcctgcccaaagttgcctacgcaacagctatggactggttcatcgccgtgtgctacgcttttgtcttctctgctttaatcgagtttgctacagtgaactatttcacaaagagagggtgggcctgggacgggaagagtgtggtgaacgacaaaaagaaggaaaaagcgtcagtgatgatccagaacaacgcttacgccgtcgccgtggccaattatgcaccgaatttaagtaaggatcctgtgctctctaccatttccaagagcgctaccacgcctgaacccaacaaaaaaccagagaacaaaccggctgaagccaagaaaacatttaactcagtaagcaaaatcgatcgaatgtctcgcatcgttttccctgtcttgttcggcacattcaatctggtatactgggccacatacctaaatcgtgagcccgtgttaggggtgtccccgtag

SEQ ID NO: 16180 - DNA, 459 bp, Artificial Sequence
  derived and/or modified sequence
atgaaaacaaagctaaacatctataatatgcagttccttcttttcgtgttcctggtgtgggatcccgcacggctggtgctggctaatatccaggaagatgaggctaagaacaacattaccattttcacgcggatccttgatcggctattggacggctatgacaaccggcttcgtccaggcctcggggattccattacagaggtgtttacaaatatttacgtgacctcctttggcccagtgtctgacacggacatggagtatacaatcgatgtgttcttccgccagaaatggaaggacgagcgccttaaattcaagggtcccatgaacattctgcgcctgaacaacttaatggccagcaagatctggacaccggacactttctttcataatggtaaaaagtcagtggctcacaacatgacaatgcctaacaagctgctgagaatccaagatgatggttag

SEQ ID NO: 16181 - DNA, 414 bp, Artificial Sequence
  derived and/or modified sequence
atgaagacaaaactgaacatctataatatgcagttcctcctcttcgttttcctcgtgtgggatcccgctcggttggttctagccaatatacaggaggacgaagccaagaacaacataacaatcttcacccgtattctagaccgcttactcgatggctacgacaatcgtctgcgtccgggactaggtgattcaatcacggaagtttttactaacatttatgttacctcattcggtccggtaagcgatacagatatggagtatacaatagacgtctttttccggcagaaatggaaagacgagagactcaagttcaagggccctatgaacattctgcggctcaataacctcatggcctcaaaaatttggacaccagataccttcttccataacgggaaaaaatctgtggcacattag

SEQ ID NO: 16182 - DNA, 1356 bp, Artificial Sequence
  derived and/or modified sequence
atgaagacaaagctgaacatttacaacatgcaattcctgctcttcgtgttcctggtatgggatccagccagactagtcctggccaacatccaagaggacgaggcaaaaaataatattacaatatttacccgaatcttggatagactcctggacggatatgacaaccgtttgcgtcctgggttgggagacagcatcactgaagttttcactaacatttatgttacaagttttggccctgtctccgatacagatatggagtataccatcgacgtgttcttcaggcagaagtggaaagatgaacgcctgaaattcaaaggccctatgaacatcctcagactgaacaacctgatggcaagtaagatatggacgcctgacactttttttcacaatggaaagaaaagcgtcgctcataacatgactatgcccaacaaactgctgaggatccaggacgatggaactctgctgtacaccatgcgcttaacagtccaggctgaatgccctatgcacctggaagattttcctatggatgcacattcgtgtcccctcaagtttgggtcatatgcctatacaacttctgaggtgacttacatctggacttacaatgcaagcgattccgtgcaggtggcacccgacgggtctcgactgaatcagtacgacctactgggccagagtattgggaaggagactataaagtcaagtacgggtgaatacaccgtcatgactgcccattttcatctcaaacggaaaatcggttatttcgtgatccagacttatctgccatgtattatgacagttatcctgtctcaggtgtcattttggctgaaccgtgagtccgtgcccgctaggaccgtgtttggagttaccacagtacttacaatgaccacgttaagtatctcagccaggaactccttgcctaaggtggcctatgccactgccatggactggttcatcgctgtttgttatgcatttgtgttttcggccctcatagagttcgctaccgtcaactacttcactaagagaggatgggcctgggacggcaagtccgtcgtaaacgataagaagaaggaaaaagcaagcgtaatgattcaaaacaatgcttacgctgtggcagtggccaactacgcccctaacctgagcaaagatccggtgctcagcaccatctctaagtcagctaccacaccagagcccaacaagaagccggagaataagccagccgaagctaaaaaaacattcaatagcgtcagtaagatcgacagaatgtccaggatcgttttccctgtacttttcgggacctttaacttagtgtactgggccacatacctgaacagagagccagtgctgggcgtgtccccctag

SEQ ID NO: 16183 - DNA, 1356 bp, Artificial Sequence
  derived and/or modified sequence
atgaagaccaagttaaacatctacaacatgcagtttctactctttgtgttcctcgtttgggatccagctagactggtccttgccaatattcaggaagacgaggccaagaataacatcacgatatttacgcgcatactggacaggctgctagacggatacgataatcgccttcggcctggcctgggagatagcatcacagaagtcttcaccaatatctacgtgacgtccttcgggcctgtatccgatacagacatggagtacactatcgacgtgttcttccgacaaaaatggaaggacgagagactcaaatttaaagggcctatgaacatcctgcgtctgaacaacctgatggcgagcaaaatctggaccccagatacattcttccacaacggtaaaaaaagtgtcgcccacaacatgaccatgccaaataaactcttgcgcatacaggacgatggaaccctgctgtatactatgcggctcacagtgcaggccgaatgccccatgcacctggaggatttccctatggacgcccatagttgtccattgaagtttggtagctatgcatatacaaccagcgaggtgacttacatctggacctataacgccagcgattccgtacaagttgccccagacggcagcaggttaaatcagtatgacctgttgggccagtccatcggaaaagagaccattaaatcctcaaccggggagtataccgtcatgactgcccactttcacttgaaacgcaaaatcggttacttcgtgatccagacttatctcccttgtatcatgacagtcattctctctcaggtctcattctggctgaaccgggagagtgttcccgcacgtactgtattcggggtcaccaccgtgttgaccatgacgacactgagtatctcagccaggaactctttgcctaaggttgcctatgccacagctatggattggtttatcgccgtttgttacgcatttgtcttctctgcactgattgagtttgctacagtcaactatttcacaaagagaggatgggcctgggacggcaaaagcgtggtgaacgataagaagaaggaaaaggcttcagtcatgattcagaacaacgcctatgcagtggccgtcgccaattatgcaccaaatttgagcaaagaccccgtgctcagtacaatcagcaagagtgctacaaccccagagccaaataagaagccagaaaacaagccggctgaagctaaaaaaacattcaattccgttagcaaaatagaccggatgagccgcattgtattccccgtgctgtttggcacattcaatctggtatattgggccacttatctgaatcgggagccggtgctaggtgtgtccccctag

SEQ ID NO: 16184 - DNA, 1104 bp, Artificial Sequence
  derived and/or modified sequence
atgaaaacgaaactgaacatctacaacatgcagtttctgctgttcgtttttctcgtttgggatccagcgagacttgtcttggccaatatccaggaagacgaagcaaaaaataacattaccatcttcacaaggatcctggataggcttctggacggctacgacaatcggttgcgccctgggctgggcgactccatcaccgaggtttttactaatatatacgtgacttcttttgggcctgtctctgacacagatatggagtacaccattgatgtgttcttccgccagaagtggaaagacgaacggttgaagttcaagggaccgatgaacatcctgcgcctgaacaatctgatggcgtccaagatttggacccccgacaccttcttccataatggcaaaaaaagtgtggcccacaacatgaccatgcccaacaaattgttgaggatccaagatgacgggaccctgctgtataccatgcggctgacagtgcaggctgagtgtcctatgcatctagaagattttccaatggacgctcactcctgtccactgaaatttggcagctatgcttacacaacaagcgaagtcacatatatttggacatataacgccagtgacagcgtgcaggtggcacccgacgggagccggctgaatcagtatgaccttcttgggcagagcattggtaaggagactataaaatcctcaaccggagagtatacagtgatgaccgctcatttccacttgaaacgtaagatcggctacttcgtcatccagacctacctcccgtgtatcatgaccgtcatactgtcccaggtttccttttggctcaatcgcgagagtgtgcctgcacgcaccgtgttcggggtgactactgtcctcactatgaccaccctatctatctccgctaggaactctttgcctaaggttgcatacgctacggctatggactggtttatagccgtctgttatgccttcgtcttttctgccttgatcgagtttgctaccgtgaactactttactaagcggggatgggcatgggacgggaagtcagtggtcaacgataaggtgtcagaatctttccgtgtaattataattaagaagatcccatag

SEQ ID NO: 16185 - DNA, 1356 bp, Artificial Sequence
  derived and/or modified sequence
atgaagaccaagctgaacatctacaacatgcagttcctgctgttcgtgttcctggtgtgggaccccgccagactggtgctggccaacatccaggaggacgaggccaagaacaacatcaccatcttcaccagaatcctggacagactgctggacggctacgacaacagactgagacccggcctgggcgacagcatcaccgaggtgttcaccaacatctacgtgaccagcttcggccccgtgagcgacaccgacatggagtacaccatcgacgtgttcttcagacagaagtggaaggacgagagactgaagttcaagggccccatgaacatcctgagactgaacaacctgatggccagcaagatctggacccccgacaccttcttccacaacggcaagaagagcgtggcccacaacatgaccatgcccaacaagctgctgagaatccaggacgacggcaccctgctgtacaccatgagactgaccgtgcaggccgagtgccccatgcacctggaggacttccccatggacgcccacagctgccccctgaagttcggcagctacgcctacaccaccagcgaggtgacctacatctggacctacaacgccagcgacagcgtgcaggtggcccccgacggcagcagactgaaccagtacgacctgctgggccagagcatcggcaaggagaccatcaagagcagcaccggcgagtacaccgtgatgaccgcccacttccacctgaagagaaagatcggctacttcgtgatccagacctacctgccctgcatcatgaccgtgatcctgagccaggtgagcttctggctgaacagagagagcgtgcccgccagaaccgtgttcggcgtgaccaccgtgctgaccatgaccaccctgagcatcagcgccagaaacagcctgcccaaggtggcctacgccaccgccatggactggttcatcgccgtgtgctacgccttcgtgttcagcgccctgatcgagttcgccaccgtgaactacttcaccaagagaggctgggcctgggacggcaagagcgtggtgaacgacaagaagaaggagaaggccagcgtgatgatccagaacaacgcctacgccgtggccgtggccaactacgcccccaacctgagcaaggaccccgtgctgagcaccatcagcaagagcgccaccacccccgagcccaacaagaagcccgagaacaagcccgccgaggccaagaagaccttcaacagcgtgagcaagatcgacagaatgagcagaatcgtgttccccgtgctgttcggcaccttcaacctggtgtactgggccacctacctgaacagagagcccgtgctgggcgtgagcccctag

SEQ ID NO: 16186 - DNA, 459 bp, Artificial Sequence
  derived and/or modified sequence
atgaagaccaagctgaacatctacaacatgcagttcctgctgttcgtgttcctggtgtgggaccccgccagactggtgctggccaacatccaggaggacgaggccaagaacaacatcaccatcttcaccagaatcctggacagactgctggacggctacgacaacagactgagacccggcctgggcgacagcatcaccgaggtgttcaccaacatctacgtgaccagcttcggccccgtgagcgacaccgacatggagtacaccatcgacgtgttcttcagacagaagtggaaggacgagagactgaagttcaagggccccatgaacatcctgagactgaacaacctgatggccagcaagatctggacccccgacaccttcttccacaacggcaagaagagcgtggcccacaacatgaccatgcccaacaagctgctgagaatccaggacgacggctag

SEQ ID NO: 16187 - DNA, 414 bp, Artificial Sequence
  derived and/or modified sequence
atgaagaccaagctgaacatctacaacatgcagttcctgctgttcgtgttcctggtgtgggaccccgccagactggtgctggccaacatccaggaggacgaggccaagaacaacatcaccatcttcaccagaatcctggacagactgctggacggctacgacaacagactgagacccggcctgggcgacagcatcaccgaggtgttcaccaacatctacgtgaccagcttcggccccgtgagcgacaccgacatggagtacaccatcgacgtgttcttcagacagaagtggaaggacgagagactgaagttcaagggccccatgaacatcctgagactgaacaacctgatggccagcaagatctggacccccgacaccttcttccacaacggcaagaagagcgtggcccactag

SEQ ID NO: 16188 - DNA, 1104 bp, Artificial Sequence
  derived and/or modified sequence
atgaagaccaagctgaacatctacaacatgcagttcctgctgttcgtgttcctggtgtgggaccccgccagactggtgctggccaacatccaggaggacgaggccaagaacaacatcaccatcttcaccagaatcctggacagactgctggacggctacgacaacagactgagacccggcctgggcgacagcatcaccgaggtgttcaccaacatctacgtgaccagcttcggccccgtgagcgacaccgacatggagtacaccatcgacgtgttcttcagacagaagtggaaggacgagagactgaagttcaagggccccatgaacatcctgagactgaacaacctgatggccagcaagatctggacccccgacaccttcttccacaacggcaagaagagcgtggcccacaacatgaccatgcccaacaagctgctgagaatccaggacgacggcaccctgctgtacaccatgagactgaccgtgcaggccgagtgccccatgcacctggaggacttccccatggacgcccacagctgccccctgaagttcggcagctacgcctacaccaccagcgaggtgacctacatctggacctacaacgccagcgacagcgtgcaggtggcccccgacggcagcagactgaaccagtacgacctgctgggccagagcatcggcaaggagaccatcaagagcagcaccggcgagtacaccgtgatgaccgcccacttccacctgaagagaaagatcggctacttcgtgatccagacctacctgccctgcatcatgaccgtgatcctgagccaggtgagcttctggctgaacagagagagcgtgcccgccagaaccgtgttcggcgtgaccaccgtgctgaccatgaccaccctgagcatcagcgccagaaacagcctgcccaaggtggcctacgccaccgccatggactggttcatcgccgtgtgctacgccttcgtgttcagcgccctgatcgagttcgccaccgtgaactacttcaccaagagaggctgggcctgggacggcaagagcgtggtgaacgacaaggtgagcgagagcttcagagtgatcatcatcaagaagatcccctag

SEQ ID NO: 16189 - protein, 492 aa, Artificial Sequence
  derived and/or modified sequence
MIITQTSHCYMTSLGILFLINILPGTTGQGESRRQEPGDFVKQDIGGLSPKHAPDIPDDSTDNITIFTRILDRLLDGYDNRLRPGLGDAVTEVKTDIYVTSFGPVSDTDMEYTIDVFFRQTWHDERLKFDGPMKILPLNNLLASKIWTPDTFFHNGKKSVAHNMTTPNKLLRLVDNGTLLYTMRLTIHAECPMHLEDFPMDVHACPLKFGSYAYTTAEVVYSWTLGKNKSVEVAQDGSRLNQYDLLGHVVGTEIIRSSTGEYVVMTTHFHLKRKIGYFVIQTYLPCIMTVILSQVSFWLNRESVPARTVFGVTTVLTMTTLSISARNSLPKVAYATAMDWFIAVCYAFVFSALIEFATVNYFTKRSWAWEGKKVPEALEMKKKTPAAPAKKTSTTFNIVGTTYPINLAKDTEFSTISKGAAPSASSTPTIIASPKATYVQDSPTETKTYNSVSKVDKISRIIFPVLFAIFNLVYWATYVNRESAIKGMIRKQ

SEQ ID NO: 16190 - DNA, 1785 bp, Artificial Sequence
  derived and/or modified sequence
tttgatgtacatttttctagctcattattgtccccagagatggaatctgaacagacaggattgtcaaacctttatttgcagcctgggttagaaggcacgcccataaggatataagggagacagagggaaaaaggaggaagctcactcttcagtctcggagcagcaagtaagcatcacacatcagctacaactgtgaatctcacaggtctctccaagtttgtgcctaagaagatgataatcacacaaacaagtcactgttacatgaccagccttgggattcttttcctgattaatattctccctggaaccactggtcaaggggaatcaagacgacaagaacccggggactttgtgaagcaggacattggcgggctgtctcctaagcatgccccagatattcctgatgacagcactgacaacatcactatcttcaccagaatcttggatcgtcttctggacggctatgacaaccggctgcgacctgggcttggagatgcagtgactgaagtgaagactgacatctacgtgaccagttttggccctgtgtcagacactgacatggagtacactattgatgtattttttcggcagacatggcatgatgaaagactgaaatttgatggccccatgaagatccttccactgaacaatctcctggctagtaagatctggacaccggacaccttcttccacaatggcaagaaatcagtggctcataacatgaccacgcccaacaagctgctcagattggtggacaacggaaccctcctctatacaatgaggttaacaattcatgctgagtgtcccatgcatttggaagattttcccatggatgtgcatgcctgcccactgaagtttggaagctatgcctatacaacagctgaagtggtttattcttggactctcggaaagaacaaatccgtggaagtggcacaggatggttctcgcttgaaccagtatgaccttttgggccatgttgttgggacagagataatccggtctagtacaggagaatatgtcgtcatgacaacccacttccatctcaagcgaaaaattggctactttgtgatccagacctacttgccatgtatcatgactgtcattctgtcacaagtgtcgttctggctcaacagagagtctgttcctgcccgtacagtctttggtgtcaccactgtgcttaccatgaccaccttgagtatcagtgccagaaattccttacctaaagtggcatatgcgacggccatggactggttcatagccgtctgttatgcctttgtattttctgcactgattgaatttgccactgtcaactatttcaccaagcggagttgggcttgggaaggcaagaaggtgccagaggccctggagatgaagaagaaaacaccagcagccccagcaaagaaaaccagcactaccttcaacatcgtggggaccacctatcccatcaacctggccaaggacactgaattttccaccatctccaagggcgctgctcccagtgcctcctcaaccccaacaatcattgcttcacccaaggccacctacgtgcaggacagcccgactgagaccaagacctacaacagtgtcagcaaggttgacaaaatttcccgcatcatctttcctgtgctctttgccatattcaatctggtctattgggccacatatgtcaaccgggagtcagctatcaagggcatgatccgcaaacagtagatagtggtggcagtgcagcaaccagagcactgtataccccgtgaagcatccaggcacccaaaccccggggctccc

SEQ ID NO: 16191 - DNA, 3712 bp, Artificial Sequence
  derived and/or modified sequence
agagagagagagagagagagagagagagagagcgagagagcgtgagcgcgcgcaagctagcgagcaaaccagagagacagaccgagagagggaccaggagagagacccagagagagaagaagaagccagaagccgagctctgtcagggctcaacctccaacttgtttcagttcattcatccttctctcctttccgctcagactgtagagctcggtctctccaagtttgtgcctaagaagatgataatcacacaaacaagtcactgttacatgaccagccttgggattcttttcctgattaatattctccctggaaccactggtcaaggggaatcaagacgacaagaacccggggactttgtgaagcaggacattggcgggctgtctcctaagcatgccccagatattcctgatgacagcactgacaacatcactatcttcaccagaatcttggatcgtcttctggacggctatgacaaccggctgcgacctgggcttggagatgcagtgactgaagtgaagactgacatctacgtgaccagttttggccctgtgtcagacactgacatggagtacactattgatgtattttttcggcagacatggcatgatgaaagactgaaatttgatggccccatgaagatccttccactgaacaatctcctggctagtaagatctggacaccggacaccttcttccacaatggcaagaaatcagtggctcataacatgaccacgcccaacaagctgctcagattggtggacaacggaaccctcctctatacaatgaggttaacaattcatgctgagtgtcccatgcatttggaagattttcccatggatgtgcatgcctgcccactgaagtttggaagctatgcctatacaacagctgaagtggtttattcttggactctcggaaagaacaaatccgtggaagtggcacaggatggttctcgcttgaaccagtatgaccttttgggccatgttgttgggacagagataatccggtctagtacaggagaatatgtcgtcatgacaacccacttccatctcaagcgaaaaattggctactttgtgatccagacctacttgccatgtatcatgactgtcattctgtcacaagtgtcgttctggctcaacagagagtctgttcctgcccgtacagtctttggtgtcaccactgtgcttaccatgaccaccttgagtatcagtgccagaaattccttacctaaagtggcatatgcgacggccatggactggttcatagccgtctgttatgcctttgtattttctgcactgattgaatttgccactgtcaactatttcaccaagcggagttgggcttgggaaggcaagaaggtgccagaggccctggagatgaagaagaaaacaccagcagccccagcaaagaaaaccagcactaccttcaacatcgtggggaccacctatcccatcaacctggccaaggacactgaattttccaccatctccaagggcgctgctcccagtgcctcctcaaccccaacaatcattgcttcacccaaggccacctacgtgcaggacagcccgactgagaccaagacctacaacagtgtcagcaaggttgacaaaatttcccgcatcatctttcctgtgctctttgccatattcaatctggtctattgggccacatatgtcaaccgggagtcagctatcaagggcatgatccgcaaacagtagatagtggtggcagtgcagcaaccagagcactgtataccccgtgaagcatccaggcacccaaaccccggggctccccttcgcgtatttcaggattctcctttttacccctctaccaagctgtgaccctcaattcatatttatgaatctctacgcaaaaaataactacagaaaaattacttgtccctccaatattgcccagtataaccccatcaaagccaaacactgccatttgtccagttgctcatcttagtctgccaatctcccctagctgagggcactgcatgtattttattgcactctgcccgctgcaaaaagaacaagagattctactctccatagtggaagccttggctgtttgagaggcccagaacaaggagaattgttgactcccatctagatcagatgactctaacttactaggcagccaggttaggctaggccatgtgatcctgcgtgccacctcccctgccttcagcaaggcctactaggcataagtactgatagcaaaggtgggagccagttctacacccccaacccatttattggtttggaaattagtggggacaattggtactaaccaccgtctaccatgtatggccaaaataaatagaactagctctgccagcctggcaccaagatggctggtgccctgccatgtccagcccctcgggaaaatagtcccctccttggtacatctctcctccagaaaatcttcttcccccactgcctttggcacccttgtagccaactgagcactacttaatttggactcattaccacctgtaaacttttcaggaaaaaatgatcaagcattttttatttatatcgaaaagttgcaaatagaaacaaagtgatctagatttaaaaaaaacatttttttaaaatatgggagagatacaaaagtcacctccctgccaaggcaactagcctatactggattgggtaagaggtttggagtggatggtagttgaggattgaagtctggctcaaaagagaaggctactggcagatgaaagtcaaattcttccttccatacactccacattccacaccctggcccaggcacttttctcccaccatatcgggaacctccggtcctctgttgatgccgattctatgaggggtgaattggaaattcatacaaataaatatctctagtcaatattgagtcaactagatcattaactttattgccaattttataatatattatttagaggccatttgttcttaatcttaatgtgagtaaaagacacaggcataaatacgcaatttttataaggtagataaactgaatcccagaagtttgaatgatttgcctaggctccttacaagtgtctttaataaagagctatcgtgcgcccctttccaaaggccaaaataaaggactgagaagccaggtccaccgtgacctcagaatcagcacaatctcagcgggccttctgggtcactagtggaacttggttgggcaccaaaaaggtttttagaaagtcacaatgtgtcacccaagaagatcacttttaatagtctcagcccaagagaatgagactgtttatgatggcagccccagccactttggctctgaatacctgcactagtccagagtatcctagaagcccagggtaaagccacagagggcaccacaagcagattctccctgcccaccggctgaacaaagctcctaaggggtgtatcattagctgctggttgccttttcatccatcctttccccgtcccctgcttccttgccattgctgggataatgcatgcccgtcccattattcctaagactgtgtctgtaggtaaattcatgactagaagagtgtagtcttgtggatatgtggggatatggggggtgggagggcggggctgttaatggttgtcttaaggaacttagaatggaagcctgatctttgcctctctgtagaaattgtgtttccaaatgctttggtgcaatgtttagctgctgtttattaaaccctttctgaattgta

SEQ ID NO: 16192 - DNA, 1697 bp, Artificial Sequence
  derived and/or modified sequence
agtgccgcttcatcacgcagcatggttgtctgggaatgtgccgtgggatctccatttgcattaattccttcagctcctggaccaaagccatttttaaaaattcatgttctgtgtatcacataacacagtatttgtgattgcacctgtactatgtccatttatttctgcatcatggctacttcctcctgtttcgtctctccaagtttgtgcctaagaagatgataatcacacaaacaagtcactgttacatgaccagccttgggattcttttcctgattaatattctccctggaaccactggtcaaggggaatcaagacgacaagaacccggggactttgtgaagcaggacattggcgggctgtctcctaagcatgccccagatattcctgatgacagcactgacaacatcactatcttcaccagaatcttggatcgtcttctggacggctatgacaaccggctgcgacctgggcttggagatgcagtgactgaagtgaagactgacatctacgtgaccagttttggccctgtgtcagacactgacatggagtacactattgatgtattttttcggcagacatggcatgatgaaagactgaaatttgatggccccatgaagatccttccactgaacaatctcctggctagtaagatctggacaccggacaccttcttccacaatggcaagaaatcagtggctcataacatgaccacgcccaacaagctgctcagattggtggacaacggaaccctcctctatacaatgaggttaacaattcatgctgagtgtcccatgcatttggaagattttcccatggatgtgcatgcctgcccactgaagtttggaagctatgcctatacaacagctgaagtggtttattcttggactctcggaaagaacaaatccgtggaagtggcacaggatggttctcgcttgaaccagtatgaccttttgggccatgttgttgggacagagataatccggtctagtacaggagaatatgtcgtcatgacaacccacttccatctcaagcgaaaaattggctactttgtgatccagacctacttgccatgtatcatgactgtcattctgtcacaagtgtcgttctggctcaacagagagtctgttcctgcccgtacagtctttggtgtcaccactgtgcttaccatgaccaccttgagtatcagtgccagaaattccttacctaaagtggcatatgcgacggccatggactggttcatagccgtctgttatgcctttgtattttctgcactgattgaatttgccactgtcaactatttcaccaagcggagttgggcttgggaaggcaagaaggtgccagaggccctggagatgaagaagaaaacaccagcagccccagcaaagaaaaccagcactaccttcaacatcgtggggaccacctatcccatcaacctggccaaggacactgaattttccaccatctccaagggcgctgctcccagtgcctcctcaaccccaacaatcattgcttcacccaaggccacctacgtgcaggacagcccgactgagaccaagacctacaacagtgtcagcaaggttgacaaaatttcccgcatcatctttcctgtgctctttgccatattcaatctggtctattgggccacatatgtcaaccgggagtcagctatcaagggcatgatccgcaaacagtag

SEQ ID NO: 16193 - DNA, 1479 bp, Artificial Sequence
  derived and/or modified sequence
atgatcattacccagacctcccactgctatatgacttcactcggaattcttttcctgattaacattctacccggaacaaccgggcaaggagagagcagacgtcaggaacccggagatttcgttaagcaagatatcggcgggttatctcccaagcatgcccccgatatcccggacgactcaaccgacaatattacgattttcaccagaatccttgatcgcctattggatggttacgataaccgcctcagaccaggtttgggggacgcagtcaccgaggttaagactgatatttatgtcacatctttcggccctgtttcagacacagacatggaatacacaatcgacgtattctttcgccagacctggcatgatgagaggctcaagttcgatggccccatgaagattctgccactgaacaatttgctggccagtaaaatctggacaccagacactttctttcataatggcaagaaatccgtcgctcacaacatgaccacaccaaataagttgttgcggctggtggataacggcacactgctgtatactatgaggttgacgatccatgcagagtgccccatgcatcttgaggacttcccgatggacgtacatgcctgtcctttgaaatttggctcttatgcctacacaaccgccgaagtggtgtacagttggacactaggtaaaaataaatccgtggaggtggctcaagacgggtcaaggttaaatcagtacgacctgttgggccacgtggtcggcactgaaatcatcaggtcatctactggggaatatgtcgtgatgaccacacattttcacctgaaaagaaagattggctattttgtgattcagacatacctcccatgtataatgactgtaattctctcccaggtgagcttctggctgaatagagaaagtgtgcccgcgcgcaccgtgttcggtgtgacaacggtgctcacgatgacgaccctttccatctccgcccggaattccctgcccaaagttgcttatgctactgccatggactggtttatcgcggtttgctacgcttttgtcttctctgccctgattgagttcgccacagtcaattacttcaccaaaagaagttgggcgtgggaagggaaaaaggttccggaggcactggagatgaagaaaaaaaccccagccgctcccgccaagaagacatccaccaccttcaacattgtggggaccacgtatcccattaacttggccaaagacaccgagttcagcactattagtaagggggcagccccgtctgcatcctctaccccaactattattgcctcccctaaggctacctatgtgcaggacagtcccactgaaacaaaaacatacaactctgtgagcaaggtggacaaaatttcccgcattatttttccggtgctgttcgccatcttcaatctagtatattgggcaacctatgtaaatcgcgaatcagcgatcaaagggatgatccgcaaacaatag

SEQ ID NO: 16194 - DNA, 1479 bp, Artificial Sequence
  derived and/or modified sequence
atgataataacgcagacctcccactgctacatgactagtctgggtattctgttcttgattaatatcctaccagggacaacagggcagggcgagagccgacgtcaggaacccggcgatttcgtcaagcaagacatcggcggtctgagtccaaaacacgcccctgacatcccagacgactccacagacaacataacaatattcaccaggatcctagacagactgctcgatgggtatgacaacaggctgcgccctggcctgggggacgccgtgacagaggttaaaactgacatctacgtcaccagcttcggtccagttagtgacacggatatggagtacaccattgatgtgttctttcggcagacctggcacgatgagaggcttaagtttgacggaccaatgaaaatcctgccattaaataacctgctggcatcaaagatttggacgcccgacactttcttccataacggtaaaaagagcgttgctcacaatatgacaacccctaataagttattgcgcctcgtagacaatgggactttgctctatactatgaggctgactattcatgcagaatgccctatgcacctagaagacttcccgatggatgtgcacgcttgtcctttgaagtttggcagctatgcttatactaccgccgaggtggtctattcctggaccctcggcaagaataagtcagttgaggtggcacaggacggctcgcgtctcaaccaatacgacttgctgggtcatgtggttgggaccgaaatcattaggtccagcactggcgagtacgtggtgatgacaacccattttcatctaaaaaggaagatcggctactttgtgatccagacataccttccttgcataatgaccgtgatcctgtcccaggtgtcgttttggctcaacagggaatccgttcccgcaaggaccgtgttcggcgttaccacagtgctgactatgactacgttatccatttcagcaagaaactctctgcctaaagtggcgtatgccactgctatggactggttcattgccgtctgctatgccttcgtgttttccgcccttatcgagttcgccacggtgaattactttacaaaacgttcctgggcatgggaggggaaaaaagtgcccgaggccttggagatgaaaaagaaaaccccagcggccccggctaagaaaacctccaccaccttcaatatagtgggaaccacatatccaatcaacctcgccaaagacacggagttttcgactatttcaaaaggcgccgccccttccgcaagttcgacgcccaccattattgccagccctaaagccacgtacgtacaggactcaccaacagaaaccaagacctataattctgtcagcaaagtggacaagatttctaggatcatcttcccagttctgttcgccatcttcaatcttgtttactgggctacttacgtaaatcgcgaaagtgccataaagggcatgatacggaagcagtag

SEQ ID NO: 16195 - DNA, 1479 bp, Artificial Sequence
  derived and/or modified sequence
atgatcattacacagacatcacactgttacatgactagcctgggtatactgttccttattaatatacttcccgggacaactggccagggagagtctagacgccaggagcccggggattttgtcaagcaggatatcgggggtctttcccctaaacatgcaccagatatcccagacgactcaactgataatatcaccatcttcactcgcatcctggacagattgctggacggttatgataatcggctgcgcccaggtctgggggacgctgtaacagaagtgaagaccgatatttacgtgactagctttggacctgtctccgatacagacatggagtacactatcgacgtttttttcagacagacttggcacgacgaacgactgaaatttgatgggccaatgaaaatcctgcccctgaataatctcctcgcaagcaaaatctggactcccgatactttcttccacaacggtaaaaaatccgtggcccacaacatgacgacgcccaataagctcctcagattggtggacaacggtactctcctgtacactatgcgcctcactattcacgctgaatgtcccatgcatctggaggactttccaatggacgtacacgcctgccctttgaaatttgggtcatacgcctacaccactgcagaggtggtatattcgtggactctgggtaagaacaagtctgtcgaagtggcccaggacggcagccggctaaaccagtacgacctgctaggacacgtggtcggcactgagattatccgcagcagcacaggtgagtacgtggtcatgacgacccacttccatttaaagaggaagattggatactttgtgattcagacctacctcccctgtattatgactgtaatcctgagtcaggtgagtttctggttgaatagggagagcgtgccagctagaaccgtctttggcgtgacaaccgtgctcactatgacgacactgagcatcagcgctaggaattcacttcctaaagttgcctacgcaacagccatggattggttcatcgcagtgtgctacgcctttgttttttcagccttaatcgagttcgccacagttaactatttcaccaaacgctcttgggcctgggaggggaaaaaagtgcccgaagctctcgaaatgaaaaagaaaaccccagcagcccccgccaaaaaaaccagtacaacgtttaatatagttggaacaacttatcccattaacctggctaaagataccgagttctctactatatctaaaggggctgcgccgagcgcttctagcacccccactatcatcgcctcaccgaaagctacctatgttcaggattcacctacagagactaagacatataacagtgtgtctaaggtcgacaaaatatctcggataattttcccggttctgtttgctatctttaatcttgtctattgggcgacctacgttaacagggagagtgccatcaaagggatgatcagaaagcagtag

SEQ ID NO: 16196 - DNA, 1479 bp, Artificial Sequence
  derived and/or modified sequence
atgatcatcacccagaccagccactgctacatgaccagcctgggcatcctcttcctgatcaacatcctgcccggcaccaccggccagggcgagagccggcggcaggagcccggggactttgtgaagcaggacattggaggcctgagccccaagcacgccccagacatcccagatgacagcacagacaacatcaccatcttcacccgcatcctggaccggctgctggatggctatgacaaccggctgcggcccggcctgggagatgctgtgacagaggtgaagacagacatctacgtgaccagctttggacctgtgtctgacacagacatggagtacaccattgatgtgttcttccggcagacctggcatgatgagcggctgaagtttgatggccccatgaagatcctgcccctgaacaacctgctggccagcaagatctggaccccagacaccttcttccacaacgggaagaagtctgtggcccacaacatgaccacccccaacaagctgctgcggctggtggacaatggcaccctgctgtacaccatgaggctgaccatccatgctgagtgccccatgcacctggaggacttccccatggatgtgcacgcctgccccctgaagtttggcagctatgcctacaccacagctgaggtggtgtacagctggaccctgggcaagaacaagtctgtggaggtggcccaggacggcagccggctgaaccagtatgacctgctgggccacgtggtgggcacagagatcatccgcagcagcactggagaatatgtggtgatgaccacccacttccacctgaagaggaagattggctacttcgtcatccagacctacctgccctgcatcatgaccgtcatcctgagccaggtgtccttctggctgaaccgggagagcgtgcctgccaggacagtgtttggagtgaccaccgtgctgaccatgaccaccctgagcatcagcgccaggaacagcctgcccaaggtggcctatgccacagccatggactggttcatcgctgtgtgctacgcctttgtgttttctgccctgattgaatttgccaccgtgaactacttcaccaagaggtcctgggcctgggagggcaagaaggtgcctgaggccctggagatgaagaagaagaccccagctgccccagccaagaagaccagcaccaccttcaacatcgtgggcaccacctaccccatcaacctggccaaggacacagagttcagcaccatcagcaagggggccgcccccagcgccagcagcacccccaccatcatcgccagccccaaggccacctacgtgcaggacagccccacagagaccaagacctacaacagcgtgtccaaggtggacaagatcagccgcatcatcttccctgtgctgtttgccatcttcaacctggtgtactgggccacctacgtgaaccgggagagcgccatcaagggcatgatcaggaagcagtag

SEQ ID NO: 16197 - DNA, 1479 bp, Artificial Sequence
  derived and/or modified sequence
atgatcatcacccagaccagccactgctacatgaccagcctgggcatcttgtttctaataaacatactgccaggaactacagggcagggagagagccgacgacaggaacctggagattttgtaaaacaggatataggggggctctccccaaagcatgcgccagacattccagatgatagcactgataatatcactatatttacccgaatcctggaccggttgctcgacggctatgacaaccgcctgagaccaggcctcggagatgcggtcacagaagtgaaaacagacatatatgtgacctcttttggtcccgtgagtgacaccgacatggagtacactatcgatgttttttttagacaaacttggcatgacgagaggttaaaatttgacggcccaatgaagatcctgcccctcaacaatctgctggccagcaagatctggacacctgataccttcttccacaatggcaagaagagtgtagcccataacatgaccacgccaaacaagctcttaagactcgtcgataacggcacccttctgtacacaatgaggttaaccattcacgcggagtgtccaatgcacctggaagacttccctatggatgtgcatgcctgtcctctgaaattcggtagttacgcctataccactgccgaagtggtgtacagctggaccctagggaagaacaagagcgttgaagtggctcaggacggctcgcggctgaaccagtacgacttactcggacacgtggtgggtacggagataattcggagttctactggcgaatatgtagtgatgacgacccactttcacctgaagcgaaagattggatattttgtgatccaaacgtatctcccttgtatcatgacagtcatcctttcgcaggtgagcttctggctgaacagagagagtgtgccagccagaaccgtattcggggtcacaaccgttctgactatgactactctatcaatttctgcccgcaactcgctgccgaaagtggcttacgccacagcaatggattggtttatcgcagtttgctacgcatttgtcttttctgctttgatcgagtttgcaacagtgaattactttacgaagagatcctgggcatgggagggaaaaaaggtgcctgaagctctagaaatgaagaaaaagaccccggccgcaccagccaaaaagacaagcaccacgtttaatattgtaggaacgacctacccaataaacctggcgaaggataccgaattttctactattagcaagggggccgccccatctgctagcagcacacccaccatcatcgcaagcccaaaagctacatacgtgcaggactctcctaccgagactaaaacttataattctgtgtctaaggttgacaagatctccaggatcatatttccagttctctttgccatcttcaatctggtgtactgggcaacctacgtgaacagggaatctgcaattaagggcatgatcagaaagcaatag

SEQ ID NO: 16198 - DNA, 1479 bp, Artificial Sequence
  derived and/or modified sequence
atgatcatcacccagaccagccactgctacatgaccagcctgggcatactgtttcttatcaatattctgcctgggaccacgggccagggcgagagcagacgtcaagagcctggcgacttcgtcaagcaggacattggcggtctttcgccaaagcacgccccggatatccctgacgattccacagataacattacaatcttcacacggatactggacaggctgttggacggttatgacaataggctgcgccctggtctgggagacgctgtgactgaggtaaaaaccgacatttacgtgaccagcttcggtcctgtctcagacactgatatggaatacaccatcgacgtgtttttcaggcagacatggcacgatgaacgcttaaagtttgatggacctatgaagatcttaccactcaacaatctgttggccagtaaaatttggacgcctgacactttcttccacaatggaaaaaaaagtgtggctcacaatatgaccacacccaataaattactccggctggtggacaatggaaccctgctgtacactatgcgtctcacaattcacgctgaatgccccatgcacctcgaagactttcccatggatgtgcacgcttgcccgctcaagttcggttcttatgcttataccaccgctgaagtggtatacagttggaccctgggaaagaacaagtcagtcgaagtcgcgcaggacggttcccggttaaatcagtatgaccttctgggccatgttgttgggactgaaatcatccgttcctctacaggcgagtatgtagtgatgaccacccacttccaccttaagcggaagattgggtacttcgtgatccagacctaccttccttgcattatgacggtgatcctttcccaggtcagtttctggctgaacagggagtccgttccagcaaggacagtgtttggagtcacaactgttttgacaatgacgaccctatccatttctgcgcgcaactcactgcccaaagttgcctacgctacagctatggattggtttatcgccgtgtgttatgccttcgtgttctctgcccttattgagtttgcaacagtcaactattttaccaaacgcagctgggcttgggaagggaaaaaagtgcctgaggctctggaaatgaagaaaaaaacccctgcagcacctgccaagaagacaagcaccacgttcaatatcgtgggcacaacctaccccattaatctcgcaaaggacaccgaattctctacgatctcaaaaggtgccgccccctctgccagctccacaccaaccattattgctagtcccaaagccacctacgtgcaggactccccgacagagacaaagacctacaactctgtcagtaaggtcgacaagataagccggattatcttcccggtgctgtttgccatctttaacttagtgtattgggccacgtacgttaatagagaaagcgctattaaaggcatgatccggaaacagtag

SEQ ID NO: 16199 - DNA, 1479 bp, Artificial Sequence
  derived and/or modified sequence
atgatcatcacccagaccagccactgctacatgaccagcctgggcatcctgttcctgatcaacattctgccggggaccaccggtcagggggagtcgcggcgacaggagcctggcgatttcgttaaacaagacatcggagggttgtccccaaagcatgccccggacatcccagatgattctactgataatataactatcttcacccggatcttggacagattgttagatggctacgataatagactccggcctggcctgggggatgcagtcaccgaggttaaaaccgacatctatgtgacaagctttggtccagtttctgacaccgacatggagtacactatcgatgtgttcttcaggcagacatggcacgacgagcggctgaaattcgacgggccaatgaaaattctgccactgaacaatctgctagctagtaaaatatggacccctgacacgttcttccacaatggcaagaaaagtgtcgcgcataacatgacaacccccaacaagttgctgaggctggtcgacaatgggaccctgctgtataccatgcgcctgaccattcatgccgagtgtccgatgcatctcgaagacttccccatggacgtccatgcttgtcccctgaaatttggatcttacgcttacactacagccgaggttgtgtacagttggacacttggcaaaaataagagcgtagaggtcgcgcaggacggctctcgcttgaaccagtatgatctgctgggtcatgtggtgggcactgagataatcagatcctccactggagagtatgtcgtgatgactactcactttcatcttaaacggaagataggatacttcgtgatccagacttatttaccttgcattatgacagtcattcttagtcaggtgagtttctggcttaacagggaaagcgtcccagcaagaacagtattcggagtgacaactgtgcttacaatgacgaccctgagtatttcagctcggaattccctgccgaaggtagcttacgccaccgcgatggactggttcattgcagtttgttatgcatttgtattcagcgccctgatcgagtttgcaactgtgaactacttcacgaaacgctcttgggcatgggagggaaagaaagtcccagaagcactggaaatgaagaaaaagacacccgccgcgccggccaaaaagacctcgacaaccttcaacattgtcggaaccacctatcccattaacctcgccaaagacaccgaattcagtaccatatccaaaggagccgctcccagcgctagctcaactcccacaattatcgcatctccaaaggccacatatgtacaggacagtcctaccgagactaagacttataattcggtgtctaaagtggataaaattagccgcataatcttccccgtgcttttcgcaatctttaatctggtgtattgggcaacctatgtgaatcgagagagtgccatcaagggcatgattagaaagcagtag

SEQ ID NO: 16200 - DNA, 1479 bp, Artificial Sequence
  derived and/or modified sequence
atgattatcactcagacttcccattgttacatgacctcccttgggattctgtttctgatcaatatactgcctggcaccacaggtcagggagagtcccggaggcaggagccaggcgacttcgtaaaacaagacattggcggactgtcacccaaacacgctcctgatatcccagatgatagcaccgacaacataaccattttcaccaggatattggacagacttctggatggatacgataatcggttgcgtccagggcttggggacgcagtaacggaagtgaagaccgatatctatgtcacttccttcgggcctgtgtccgacactgacatggagtacacgattgatgtgttttttcgacagacgtggcacgacgagaggctaaaattcgacggacctatgaagatcctgcctttaaacaaccttctcgcctcaaagatatggaccccagatacattttttcacaatggcaaaaagtctgtagcacacaacatgacgaccccgaataaactcctcagactggtggacaacggcacgcttctctacaccatgagactgactatccacgccgagtgtcctatgcatctggaggattttcctatggatgtccatgcctgtcctctgaagttcggttcttatgcgtacactactgcagaagtggtgtactcctggaccctcggaaaaaacaagtcagtggaggtcgcgcaggatggctcaagactcaatcagtatgacttgctgggtcatgtagtagggactgagatcatccgaagctccacgggcgagtacgtggtgatgactacgcacttccacttgaagaggaaaattggatactttgttatccagacttacttaccctgcatcatgacggtgatcctgtcccaggtcagcttctggttgaatagagaaagtgtccccgctaggaccgtattcggagtgaccacggtgctcaccatgactaccctcagtatctcagcacggaacagcctgccaaaagtggcctacgccaccgctatggactggtttattgcggtgtgctatgcatttgttttctcagcccttattgaatttgctacggtgaattattttaccaagcggtcctgggcctgggaagggaagaaggttcctgaggcacttgagatgaagaaaaaaacgcccgctgccccagccaaaaagacaagtaccaccttcaacatcgtgggcacaacctaccctattaacctggcaaaagataccgagttctctaccatttccaaaggcgcagctcccagcgcgagtagtacacctacaatcatcgccagccccaaagcaacgtacgttcaggattcacccaccgagacaaaaacctataactctgtgtcaaaggtcgataaaattagcaggataatcttccccgtactctttgcaatattcaacctcgtctactgggctacctacgttaacagggaatccgcaattaaaggcatgatccgtaaacaatag

SEQ ID NO: 16201 - DNA, 1479 bp, Artificial Sequence
  derived and/or modified sequence
atgatcatcacccagaccagtcactgttacatgacgtcgctcggaattttatttctgatcaatatactgcccggaaccacaggtcaaggcgagagtcggagacaggagcccggagactttgtgaaacaggatatcggcggactcagccccaagcacgctcctgacattcccgacgactctactgacaacattactatatttacacgcatcctagaccggcttttagatgggtacgacaaccggcttcggccagggctgggggatgccgttaccgaggttaagaccgacatctacgtgacatctttcgggcctgtatcagatacagatatggaatacacaatcgacgttttcttccgccagacatggcacgatgaaagactgaagttcgacggacccatgaaaatcctgccactgaataacctcctcgcgtccaaaatttggacccctgacacgttcttccataatggaaagaagagtgtcgcccacaatatgacaaccccaaacaaactcctgcgactcgtggataatggcaccctgctctacaccatgcggctgacaatccatgctgagtgccccatgcatctggaagatttcccgatggacgtacacgcctgccctctgaaattcggaagttatgcttacacaaccgcagaagtagtgtacagctggactctcgggaaaaacaagtcagtagaggtagcccaggatgggagccggctcaatcagtacgatctcctgggtcacgttgtcggtacagagattataagatccagtacgggcgagtacgtggttatgactacccactttcacttgaaacgcaagatagggtactttgtaattcagacatacttgccctgcatcatgactgtgattctgtctcaagtgtccttctggttgaacagagaatccgtccctgcaagaacggtgtttggcgttaccactgtgttgaccatgactactcttagtatttccgcgaggaattcccttcccaaagtcgcttacgctacagcaatggactggttcatcgccgtctgctatgcatttgtgtttagcgccttgatcgagttcgccacagtcaattactttaccaagaggtcatgggcttgggaagggaaaaaagtccccgaggccttggaaatgaaaaagaaaaccccagcggcacctgccaagaaaacatctacgacattcaatatcgtcggcactacctatccaataaatctagcgaaggatacagaattttccaccattagcaagggtgccgcaccctcagcctcaagcacacccaccattattgcctcccccaaagccacatacgtccaggatagtcccaccgagaccaagacttacaactccgtgtcgaaggtcgataaaatttctaggattattttcccagtgctatttgcaatattcaacctcgtctactgggctacttacgtaaacagagagtcggccatcaaggggatgatccgaaaacagtag

SEQ ID NO: 16202 - DNA, 1479 bp, Artificial Sequence
  derived and/or modified sequence
atgatcattacccagacaagccattgctatatgacctctctcggcatcttgtttctgatcaacattctccccggtacaactggtcagggggagtctagacgccaagagcctggtgactttgtcaaacaggatatagggggactttcgccgaaacatgcaccggacattcctgatgatagcacagataacatcaccatatttactcgtatcttggataggttattagatggctatgacaatcggctgagaccaggtctgggggacgctgtgactgaagtgaagaccgatatctatgtcaccagctttggacccgtttctgataccgacatggagtacaccattgatgttttttttagacagacttggcatgatgagcgcttgaagtttgatgggccaatgaagattctgccactcaataacctgctggcctctaagatttggacaccagacaccttcttccataacggcaagaaatctgtcgctcacaatatgaccacccctaataagctcctgcggctggtggacaatggcacattgttgtacacaatgcggttgacaatacacgctgaatgtcccatgcatttggaagatttcccgatggatgtgcacgcttgtcctttgaaattcggtagctacgcctatacgaccgccgaggtcgtctactcttggacactgggaaagaacaagagtgtggaggtggcacaagacgggtctaggctcaatcagtacgatctgctgggccatgtggtcgggactgaaataatccggtccagtacaggcgaatatgtcgtcatgaccacgcattttcacctcaagcgcaagataggatacttcgtgattcagacatacctgccatgcattatgacggtgattttatcacaggtgagcttctggctgaaccgggaatccgtaccagcccgaactgtgttcggggtgacaactgtactaaccatgaccacacttagcatttcagctcgcaatagcctgcccaaggtcgcctacgccaccgcaatggactggtttatcgctgtgtgttatgcttttgtgttctccgcccttattgagtttgccaccgtgaattactttaccaaacgaagctgggcctgggagggcaagaaggttcccgaagctttagagatgaaaaaaaaaaccccagcagcccctgcaaaaaaaacatctactaccttcaacatcgtcggcacgacctaccccataaacctcgctaaggacaccgaattctcgacaatcagtaaaggtgccgcaccgagtgcttcttccacccctacaatcattgcttcacctaaggctacctacgtgcaagattccccaacagaaaccaagacttataacagcgtgtctaaggtggacaagatcagcagaataattttccctgtgttgtttgccatattcaacctggtttattgggccacctacgtgaaccgagaatccgctatcaaaggaatgattcgaaagcagtag

SEQ ID NO: 16203 - DNA, 1479 bp, Artificial Sequence
  derived and/or modified sequence
atgatcatcacccagaccagccactgctacatgaccagcctgggcatcctgttcctgatcaacatcctgcccggcaccaccggccagggcgagagcagaagacaggagcccggcgacttcgtgaagcaggacatcggcggcctgagccccaagcacgcccccgacatccccgacgacagcaccgacaacatcaccatcttcaccagaatcctggacagactgctggacggctacgacaacagactgagacccggcctgggcgacgccgtgaccgaggtgaagaccgacatctacgtgaccagcttcggccccgtgagcgacaccgacatggagtacaccatcgacgtgttcttcagacagacctggcacgacgagagactgaagttcgacggccccatgaagatcctgcccctgaacaacctgctggccagcaagatctggacccccgacaccttcttccacaacggcaagaagagcgtggcccacaacatgaccacccccaacaagctgctgagactggtggacaacggcaccctgctgtacaccatgagactgaccatccacgccgagtgccccatgcacctggaggacttccccatggacgtgcacgcctgccccctgaagttcggcagctacgcctacaccaccgccgaggtggtgtacagctggaccctgggcaagaacaagagcgtggaggtggcccaggacggcagcagactgaaccagtacgacctgctgggccacgtggtgggcaccgagatcatcagaagcagcaccggcgagtacgtggtgatgaccacccacttccacctgaagagaaagatcggctacttcgtgatccagacctacctgccctgcatcatgaccgtgatcctgagccaggtgagcttctggctgaacagagagagcgtgcccgccagaaccgtgttcggcgtgaccaccgtgctgaccatgaccaccctgagcatcagcgccagaaacagcctgcccaaggtggcctacgccaccgccatggactggttcatcgccgtgtgctacgccttcgtgttcagcgccctgatcgagttcgccaccgtgaactacttcaccaagagaagctgggcctgggagggcaagaaggtgcccgaggccctggagatgaagaagaagacccccgccgcccccgccaagaagaccagcaccaccttcaacatcgtgggcaccacctaccccatcaacctggccaaggacaccgagttcagcaccatcagcaagggcgccgcccccagcgccagcagcacccccaccatcatcgccagccccaaggccacctacgtgcaggacagccccaccgagaccaagacctacaacagcgtgagcaaggtggacaagatcagcagaatcatcttccccgtgctgttcgccatcttcaacctggtgtactgggccacctacgtgaacagagagagcgccatcaagggcatgatcagaaagcagtag

SEQ ID NO: 16204 - protein, 554 aa, Artificial Sequence [sequence omitted]

SEQ ID NO: 16205 - DNA, 11973 bp, Artificial Sequence
  derived and/or modified sequence
agtcaacctctggaagtaagtcaactccattctgaaaaagaagagtgtcgcaagaagtgaaagtgattttgaccagaggtcgcttgtctccacctctcccctcctctccagaaaaggatggagcagcaaagcggagggtgtgcgcgtgtctggtggaggcgggtaaagaaatggggtgtctttaaagcaatagcttagcaaatactgggactagagtgcggctcgagtccacttcccaatagtttggcgagagtccgccgggtgagctgcaacccctgttaccaggaagaatctttctgctttcattgctctccctaccgccccccataacacctgaatgggagggtctcaaaggtggtttgagcccggacttgatcccctctcctcaccaccgctaccacccgacgcccagcagtccccgtcacccgccctttctccacctccaaccttgactctgggtacaaacaggtcctcgcacaacctgatgacagaggagcttcattggttagatccaaatcccagcggaagggagggggccaggaggtaggaggacgaacactgctgtgggcggggagcccacttggggtcgggggctgcgaagccggaggaggggcgagagaccccgttcctcatccccggagttacagtcggaacaaacttgccgagtcttgcagcgcaagcgcgcggatacgaaccccagaaccttcagcgcgcgggcacgaaagggtgtggagcggtatacatagctctacatacacattgagcgctgagcgagaaaggagggggcgaggaaggcaggttccgcctcccctggccccgtgcacacacacgcccaccgcggctcgggctggctgagcgcgggcgagtgtgagcgcgagtgtgcgcacgccgcgggagcctctctgccctctcctcgcaccctgctcagggcatctgaagagcctggaaacgtgaacaggcttgaagtatggcatgttgcaaagatggtttctgccaagaaggtacccgcgatcgctctgtccgccggggtcagtttcgccctcctgcgcttcctgtgcctggcggtttgtttaaacgaatccccaggacagaaccaaaaggaggagaaattgtgcacagaaaatttcacccgcatcctggacagtttgctcgatggttatgacaacaggctgcgtcctggatttgggggtcctgttacagaagtgaaaactgacatatatgtcaccagctttggacctgtttctgatgttgaaatggaatacacaatggatgtgttcttcaggcagacatggattgacaaaagattaaaatatgacggccccattgaaattttgagattgaacaatatgatggtaacgaaagtgtggacccctgatactttcttcaggaatggaaagaaatctgtctcacataatatgacagctccaaataagctttttagaattatgagaaatggtactattttatacacaatgagactcaccataagtgcggagtgtcccatgagattggtggattttcccatggatggtcatgcatgccctttgaaattcgggagttatgcctatccaaagagtgagatgatctatacctggacaaaaggtcctgagaaatcagttgaagttccgaaggagtcttccagcttagttcaatatgatttgattgggcaaaccgtatcaagtgaaaccatcaaatcaattacgggtgaatatattgttatgacggtttacttccacctcagacggaagatgggttattttatgattcagacctatattccgtgcattatgacagtgattctttctcaagtttcattttggataaataaagaatcagttcccgctaggactgtatttggaataacaactgtcctcaccatgaccacactaagcatcagtgcacgacattctttgcccaaagtgtcctatgctaccgccatggactggttcatagctgtctgctttgcttttgtattttcggcccttatcgagtttgctgctgtcaactatttcaccaatattcaaatggaaaaagccaaaaggaagacatcaaagccccctcaggaagttcccgctgctccagtgcagagagagaagcatcctgaagcccctctgcagaatacaaatgccaatttgaacatgagaaaaagaacaaatgctttggttcactctgaatctgatgttggcaacagaactgaggtgggaaaccattcaagcaaatcttccacagttgttcaagaatcttctaaaggcacacctcggtcttacttagcttccagtccaaacccattcagccgtgcaaatgcagctgaaaccatatctgcagcaagagcacttccatctgcttctcctacttctatccgaactggatatatgcctcgaaaggcttcagttggatctgcttctactcgtcacgtgtttggatcaagactgcagaggataaagaccacagttaataccataggggctactgggaagttgtcagctactcctcctccatcggctccaccaccttctggatctggcacaagtaaaatagacaaatatgcccgtattctctttccagtcacatttggggcatttaacatggtttattgggttgtttatttatctaaggacactatggagaaatcagaaagtctaatgtaatttcgttgctatagtagtttgctaaaagatgatgaaaatgcagaatgtctttttaaatgtttttaaatataaacaaatattctttactaaaataaaaactctgtgtaatttttccatttaaagatataagccagttattgggagagttaattaattcctgagtgaaaaagtgaactatgttttttttcagaaaaattattttaaaagaactcagcattcagttagatagaatacacaccatcctggaaagttgggataagagaaatagagctattagagacaagtggcgcatattttttcattgatatttgaaaacagactatgacattttaaaaatctgccctatgagtatcaacctgccaccctaaatttcccagtggcactacccttaaccagaattgtttattagatgtcatatgcagtgacctttggtgatcttcttaggaacttcaagaaaaggaattttcctgttaaattaaacattggcaaaaggaaatggaatagtataaacactgatcaatagagtaaaatatctgctgcataaaaaactaagacaaagaccagaggaaatatcttccctttcttatgttggctaaacagtacttaacagttgacttgaaattttgttctctgagccaaagtttaactcattgtatgaattctttttcatggtagttcattcagttatgtgtttatttactacatagttattcagagcctactgtgttccaggaactatgctagaaactgtctctctaggaaagctcttgcacctttatctacaatattacttaaaaagtagaacagtcaatgcatgccaaagaaccataaactagcagaggacattgcattctttagtgaaggacatttatttagagtctgacaacatattcaaaatatttttcagcctctactgatagtggataacaaatatatttgttcacataaccactttgatgtcagtacaacttcagcaattggttttcaaaatagatgagaatatggtacagattgttctataagtgaaaagcattatgtacttgaaagtaaaaatcagggcaatataagacttaatagattaactgtcgcaaatttgatcagagtcacagagtagaatttgatcagaatcacagaatcatcagacataggaactgagcacaggctttttcaggtgctttccccaagatagatctagatattagctagtgaaatgctaaattttgaagagttttgtgtccgtagttctgtaattctgggcagtcatcatgttggtttttttgggagtttttttaaggtttaataactaaggggaatattttaaaattaagagagcagcaaatgaaaggagtaaagaaaaaaatagctgtcgggtaggatgccactgactctgctatgtgatttatcagggttttcatctactgacttctttctcattaggtaggcttaacaacttacttgagaattttgcaactgtctatgcagctgaatctaagtatggttttttgtcatattgcctctagattttcttctgtgcttctctctatctgctctggaatggatgagtgaatgtgttctgggtgttttagggaacatattgatagaaatgaccaccttgcagacaaaatctctctctctctttttgtttttatagaaaagaagtgatagtagttaattggcatcgatttttcagatattgcactaccttataatggttgtttttgatacctgaaaattgtgcaaatgccaaatattaattgtaagtcatatctgagaaatcattcttggctgtctttctaggtattccatagaatcaacacattttaaggctgaaagatactgtcgaaatcacccagtcccaaccccccaatttaaaattgattctagtaaaattaggtccagtaacacctgtatatatgtatatatttaataaagagtacttgtacaaaaaagcttatcataaattatttcatgaatgtgaatagatttctggccttgaggacgatgtttggaaatatggttggaagcacaattcattcgctactagttattcagagcgtactttgttccaggaactatgctggaaactgatagttcactattctgatgaaaaggctggttttgttgttgttgttgttgttgttgttgttgtttttggtgaggaactcttactctttgctaatctattggcctatcttaagaaataattatttggttattcattggcttcctttaaaaaaaagtgttcttctacaaatcttacagagtgtaaagagataaaaagaaatgattttttttcttacctttacatatgaaggtttaaaaatacatcatgtggccaaagaatgagaaaggacagaattaaccaaggattcttaattgttaatttgaagaacacattaaccagaaagcttaaacattattattaaaataaattatttcatttgcacacaatgataataatgatgataataataataataataataataataataataataataataatatgttgtttgctttccttaactgaatttcatcaaattcattcagtgatttttattttggtcattatttctatcttcccaataacccagaggtacatcaagtaaaaacacttttgcaaagagccagtcacttttccctcttagaaaatctcagaagaatgattaggggcacccaaagttctggttatctatgaataataatgaataattttggctgagaatggtacctttatataactcttttaaagatgaaattcagaataattttattcaggacctagtatctgcagtccatgttggccactaactgctacataattactttcaatttcctccaggcatgactaggtataaacatatatttacatgattaatccacattttaaaatgacttgcacttgtgcatatacatagtactttgaataatgtatattttaaattggacctcacaaatcttgtattaaagtaggtagagagtagagtcacactttttttgatgaaatgagtcacagagaagttacatgacaaagataaaatcacagggttggaaagaactttgaaaggtcatttttcaataatctcaccttaaaagtgaccccttttcaaacaaagcataaacaatttatttgtggcttattttacccatgagctggccaatacttcctggcctagaaaaatatctccactctccccattcctgttcttaatggtcttctcttctcaatttgtaaatattctccagtaaaagacaccaggtgtggagatgggtcacttaatttcaagttctgagtgtcttgtggttttaaacaagtctcttaacctctctaagactgattcctcatttataacagggaggaggtggattatgtaatatctaagagcttttcagttttaatactctctgattctcatagtaaatacaagcatactcttgtaagaaaaacactgaatactttgaaccacaaataagtgtttatggacaaaaatttagttctactgcttgattactttaagttcattgcttgcttcaaactaaggtttccctaccttcaaaaatatatataacatctctccatttagataaagtatattcttccccagggaagactgtattctttaaagacagtagaatattggctatttctcttttctgggatttcctgggcttttattcactaaatgggctcctgcccagtttgggtactgtgctgatttttagatatacagagataaaaatagcccctttccttgcaggtagtcacagtccggaagagatgatagatgcatagacaaaaaattatgggatgtaactaatgcttcagtagaatacagcagggccaaaactagagtgatactcatctcaggcacaaatatatatggggacatcaaaacttcaataatcaagatacctaatatttaagtgaatatttttaaaactcaaaattaatgcaaaagatttatgatgaacagaatatacaaattttaaataaattaatagaatcagtagtaataatattttcttctgcctcaggctccaaaattgctcagcatagcactgatctagatagaggtggataaaagatccacataacttaattacattgttgaaggagaggaacaagagtgatagcagagaaggtttcacagatataatcttaagctaaattttatagaatgatttggagttcttatagcctccattcccacttccacaaacaaacaaaaaaatgaaagcgcaattttatcagcacctgaggcaggagaagagatgaggatgtggaaagtcaaggggaactcttactacaaattcttagttctgtgtttggaggtaagggtgaatgcagggaagtgagagttgttgatgttggaaagacctaaagagcctggattaggaagagttttgtgtaaattactgaaggaatggaatttgatcaggattagtggcaatttattaaaaatcttgaagaataatacgatgaaaactaacatccttatttttctgttttagagaaagcacctgattattgtgtgaactatggtttggagggccacaaatctagaggtagtggaacagttgagatctcttattttttctttcctgtcttaaactttgccttctattccttttttctttttttgaccgcaatgacttcattgtcatttgtaaaagtgatacatgactgttaaagatagacattgtagaaacttaaaaacaatctcaaaattctaccacccagaaatcagaaatattttgtatttggatatgtttgtctagaagagtagattgcttgattaaaagacagagttttataaatgtagaagccaatatgacatacatgctgccattaaataataaaaaattaaattgacttttatctcaagataagattaaaattggagggtaaaactgaagaaattgttgaaatttggatggtgcttctttaaagcaagagatttagagagtcagagctttttatcccaggtttcaatctttatttcaggaaaattttctgcaattttgtctaagttaattttttttttttaagaaatgccaattatgtcaaatcccttttgtctctatacaatagtccccaactgttttggcaacaggcacgggtgagggtgggggaatggttttcagatgaaattgttccatctcagatcatcaggcattagtcgattctcataaggagcggacaaccttgcatgccctcctatgagaatctaatgccgccgctaatctgacaggaggcagagctcaggcgataatgctcaatgggtgccactcacctcctgttgtgctgcccaattcctaacaggtcatggataagtactggtcagtggcccaggggttggggaccactgctctgtaactatttacagtattctttgtaactactttggtatctttaaaattttctttaacttttgtcaaccataaccctagtgagttttcagttgtgattattctattttgtaacttccaatgtacttttcaacttcataatggttaattttgttttccattgctttcttggtcactgtcatttcatttttcttctctttctctatttttaccattgctttattgaaatatcttctttgagcttctcatgtttctctattaatgagatcatgtctataatattttttgagactacagagacctatttatataaactcttcctctatttcttgaaaaagtttttatctggcgtgagcttcatctgctttttcattgaggttttatctcccttgcctatttttggggctggtttctttctattaatcactgagcagagccagctatttactgaactacagtgtgggaagtggtgggagggtgagtcagatcagcccacagaagctatttaaatttcaggtttcaagcccacctccccaaaaccgttttatgtgttttttcttctgcccaggcaccatatttttatatctatttttgacatttgggcggcctatgtagttcacagtgtaaaactctctgttttactttctttatgttattgctagtgattattgcttgtagtcccacccccttccccacattagccttagtattctatattattcagcaagcttgttcacaactctcaaatatagtctatcagaatttttatctttacctctacattccactattcggaagtatatagtaaaatcgtatgaagacagattttgtctttttcttgcctgtttacactctatcttacagaggtttcaaacaaaccatctttgtttgaaacatcgcaggataatgatacttattgaaatctacatcctgcccaagatatatgccagtcaatttcctttctcctattagtgcaaatggctacctacttaaaagctgctgactatagtttgtcatcaattacttgttaattacagatatggttttcatttttttttctcaatttttcattatgttatttttggagactgtcttaggtggggagtgaattataaatatttttatttcaccacctttaactgagtcaccatatgttatttgcacttccaatagaccagggattgaccagagtatcttttactgatatgaccaccagagctacatggcttttaccttctgtatatcagatgtcactggaatcaagcattaaacctagattaaatctggattaaaccagctgtatggcaccttagaaaattgagaaggactaggaagctgatagaaagaactcctgtataaaaaataaattctttttacattttccttggtagtatttctgcaagcttctttagtttctataggggaatcccagagttttcctctgagattgcttccctttcctttgtattttcatttttccctcttgggctttacttttcagtcgtgtatttctatcccaatgttaatttattacactgtttatattttcctgtccttcaattcatcagtagattagtgaagtacttattcctttaattataagtataaacgtttttaatttctttttggataacgatacatttaatggaaaatttttaaatgctatggtttcttaatagcttttctctaccactaattacttccgttaaaaaaaaaaagaaatacccatgcgtaatataaaagaaattttgaataaaatgttatcctttccttttactagagacaaacatctccacttcaaaatggaaaaatggaactatgcaaaggaaatttacgatattcaagagtatgatattatcactgaaccgattaatttaattgaaaatactaacctgcaaaaaagaattacacaaatgtatttgaaatgtcatcagatacctcaagctatgacagagttgattatgttacacaagtagtaaaggataaattaaatatattctatattaacactaagatttaaaactaattatagtcttctttaatttttctactgtatacatttcatctagttttcagtaaaacaaacttttcattacttttacttatcccatgcaaatctagttgctataagatataacctaatttggaaatacctccctgtaatacattggaattttggtgtgagtgtgtgtgatcagagaggataaacaaatggtgtcagcaaaatagaatgtaaaatatggagataatgtggatttacacaatttgataaaaattctcccttgaattttgcagatcatatatgaatatcatcatgtgaagtgcaattaggattttttcatatattaatacatatacatcatctctttaataaaatattttgctgaactcgtttaatatttctcatgtctcatatttcatattttctcatatgtctcatattttatattttctcatatgtgtctcatttttattattactatagtatccattaaaggagactggcaaatacctgaacaaagttatgttgttggcaatataagatattaccaattgcataatattatttccaaaggcaaattaatatgcaaactatagatttccatgggtatctatacaaattattacttgaagtccatagaaaacagcttccttagagggaagtaaaagaagctctgataacagacaatgtatagcatttcagttaaagtttgattgacatatttttttctcagtcttttatacttgtgaattatagtctacattttgtctttacagatgttgctaacacagtgcagcatgttggcttgtcattttactgattatgtatattgtctcctagttcaagtatacagtaaatcagagctttcatttttcaaggggcagaaaaataattgttggttgataaggtaaggttatatgattttgagggagcttcattgtaaattgaatgagaatccggttttcatgcaaaggtgtatctatgcgataatactttgaatgtctgtagtttgaaatagaaggttaattttttccactggcttatccttaatgaaggaaatcccctgataattactttgattctgaaaatgttgaaaactccagaagaaataaagcttttctttgatttctcagctgaagtgttgtacaaactgaggaatatgaagtccattcccttctttcttctcttgaataattttaaaattgtttgtttagttgtacaattgaaaatattccttattatagaagtaaaaaaacaataatgcatatttcctcatatcataaaaactaaatttgttatcatctgagcttcaatattcttgctcaattagaatagtaaatataaagtgtgatatttataacagttcaaggtttgataggagatagaggtgttttgattttatgggaaaattacttcctcaagaacacatttcttgaggttttagtaatcacatttgactccctgaaattggcaattttattcaatgtaggaatattatcatggtatattatagtgaggagcacatagtcattattattttgtttttgcaaatttattttgaaaaaaaggagcattatcaaatattggtttactattttaaagtaattcatcaggaaatgattttttaaacactgtccctttaagtaaatgtcccttgcttttcaaagctcaacttattacttatggtaatagagttactttgcttcttaaaacaaagtttatactagagcatagcattgtagaattattcaggtctcaatttctcactggaaaatgagtctttaaaatagtaaggatttaaatttctataaaatttaatcacagatacttatattttaagataaatgtgttggagctaaactctggaattattaaaatataaaacattatatccctctaatgtattttttctatttaaatttaaaacaataaacataaatatctttggaa

SEQ ID NO: 16206 - DNA, 1665 bp, Artificial Sequence
  derived and/or modified sequence
atggttagcgctaagaaagttccggctatcgcgttgagtgccggcgtatcctttgcacttctgcgctttctctgcctggccgtttgcctcaacgagtcacccgggcagaatcagaaggaagagaagctgtgcactgagaacttcacccggatcctggactcgttgcttgacggctacgacaatagattgagaccggggttcggcgggccggtcaccgaagtgaagacagatatctacgtgacgagctttgggcccgtaagtgatgttgaaatggagtatactatggacgtctttttccggcagacgtggattgataagagactcaagtacgatggacccatcgaaatcttgcgtctcaacaatatgatggtgactaaggtgtggacccctgacacattttttcgcaacggcaaaaagagcgtctctcataatatgaccgcaccgaataagctctttagaataatgcgtaatggcaccatcctgtatacgatgcgactgaccataagcgccgagtgtccaatgaggctcgttgactttcctatggatggtcacgcttgccccctgaaatttggaagctatgcttatcctaagagcgaaatgatttatacgtggaccaagggccctgaaaagagcgtggaggttcccaaagagagcagctccttggtccagtacgacttgatcggccaaacagtgtcctccgaaaccattaaatccataactggagagtatatcgttatgacggtttactttcacctgagacggaagatgggatatttcatgattcaaacctatatcccatgcatcatgaccgtcatcttatctcaggtgagcttctggatcaataaggagtcggtcccagctcggaccgtatttggcattaccactgtgctaaccatgaccaccctatcaatctctgcccgccattcactgccaaaagtgagttatgccactgcaatggactggttcattgcggtttgttttgctttcgtcttctcggctcttattgaattcgcagctgttaactattttacaaacatacagatggagaaagctaaacgcaaaacatctaagcccccgcaagaggtgccggccgcccctgtgcagcgtgagaagcaccccgaagcacctttgcagaatacaaacgccaacctaaacatgcgaaagcgcaccaacgcactggtgcactcagagtcagacgtgggtaatcggactgaggtgggcaaccatagctcaaaaagctcaacggtggtgcaagagagctccaagggaacccccagaagctatctggccagcagtccaaatcccttcagtcgcgcaaacgccgcagagacaatctcagctgccagagccctgccaagcgccagccctacttccatccgcacggggtatatgccccggaaagcatcagttgggtcagcgagcacacggcacgtgttcgggtccaggctccagaggattaagacaaccgtaaacacaattggtgccaccggcaagttgtccgcaaccccaccaccgtcggcgcccccaccctccggtagcggcacgagcaagatcgataaatacgctagaatcctctttcccgtcacgttcggagcatttaatatggtgtattgggtggtttacctgagcaaggatacaatggagaaaagcgaaagcttaatgtag

SEQ ID NO: 16207 - DNA, 1665 bp, Artificial Sequence
  derived and/or modified sequence
atggtgtctgccaagaaggtgcctgccatcgccctgtctgctggggtgtcctttgccctgctgcgcttcctgtgcctggccgtgtgcctgaatgaaagccctggccagaaccagaaggaggagaagctgtgcacagagaacttcacccgcatcctggacagcctgctggatggctatgacaaccggctgcggcccggctttggaggccctgtgacagaggtgaagacagacatctacgtgaccagctttggacctgtgtctgatgtggagatggagtacaccatggatgtgttcttccggcagacctggattgacaagaggctgaagtatgatggccccatcgagatcctgcggctgaacaacatgatggtgaccaaggtgtggaccccagacaccttcttcagaaatggcaagaagtctgtgagccacaacatgacagcccccaacaagctgttccgcatcatgagaaatggcaccatcctgtacaccatgaggctgaccatctctgcagaatgtcccatgaggctggtggacttccccatggatggccacgcctgccccctgaagtttggcagctatgcctaccccaagtctgagatgatctacacctggaccaagggccctgagaagtctgtggaggtgcccaaggagagcagcagcctggtgcagtatgacctgattggccagacagtgtcctctgagaccatcaagagcatcaccggggagtacatcgtgatgacagtgtacttccacctgcggaggaagatgggctacttcatgatccagacctacatcccctgcatcatgaccgtcatcctgagccaggtgtccttctggatcaacaaggagagcgtgcctgccaggacagtgtttggcatcaccaccgtgctgaccatgaccaccctgagcatcagcgcccggcacagcctgcccaaggtgtcctatgccacagccatggactggttcatcgctgtgtgctttgcctttgtgttcagcgccctgattgaatttgctgctgtgaactacttcaccaacatccagatggagaaggccaagaggaagaccagcaagccaccccaggaggtgcctgctgcccctgtgcagcgggagaagcaccctgaggcccccctgcagaacaccaatgccaacctgaacatgaggaagaggaccaatgccctggtgcacagcgagagtgatgtgggcaacagaacagaggtgggcaaccacagcagcaagagcagcacagtggtgcaggagagcagcaagggcacccccaggagctacctggccagcagccccaaccccttcagccgggccaatgctgctgagaccatctctgctgcccgggccctgcccagcgccagccccaccagcatcagaacaggctacatgcccaggaaggcctctgtgggcagcgccagcaccaggcatgtgtttggcagccggctgcagaggatcaagaccaccgtgaacaccatcggggccaccgggaagctgagcgccaccccaccacccagcgcccctcctccttctggcagcggcaccagcaagattgacaagtatgcccgcatcctcttccctgtgaccttcggggccttcaacatggtgtactgggtggtgtacctgagcaaggacaccatggagaagtctgagagcctgatgtag

SEQ ID NO: 16208 - DNA, 1665 bp, Artificial Sequence
  derived and/or modified sequence
atggtgagcgccaagaaggtgcccgccatcgccctgagcgccggcgtctcttttgctctgctgaggtttctctgcctcgcggtatgcctgaatgagtcccccggccagaaccaaaaagaagaaaaactgtgtacagaaaatttcaccaggatcctggattctttactggacggttatgataaccggctgcgcccgggtttcggcgggcccgtaaccgaagtgaagaccgatatttacgtgacaagtttcggaccggtttccgacgtggagatggagtacaccatggacgtttttttccggcagacatggatagataagagactgaaatacgatgggcccatcgagattctgcgcctcaacaacatgatggtgaccaaggtttggacacctgacaccttcttcaggaacggtaaaaaatctgtgtcacataatatgaccgcacccaataagctatttcggattatgcggaatggcaccattctttacaccatgagacttaccatctccgctgaatgcccgatgcgcctggtcgattttccaatggacgggcacgcctgtccactcaagtttggcagctatgcttacccgaaaagcgagatgatctacacctggacaaagggccccgagaagtccgtcgaagtgccaaaggagtcttcctctctggttcagtacgacctgataggacaaacggtgtcaagcgagacaatcaagtcaattaccggggagtatatcgtgatgacagtctacttccatcttagacgcaagatgggatattttatgatccagacatatatcccttgtattatgaccgtgatcctcagccaggtcagcttctggatcaataaagagtcagtccccgcgagaactgtttttggtattactactgtgttaaccatgaccacactgtccatcagtgccagacactccttgcctaaggtgtcttacgccactgccatggattggtttatcgccgtttgctttgcgttcgtgttctctgcgttgatcgagttcgccgccgtgaactacttcaccaatattcaaatggaaaaggcgaagaggaagacctcaaaaccaccccaggaagtccccgctgctcccgtgcaacgcgaaaagcatcccgaagctcccctgcagaacactaatgctaatctgaatatgcggaagcggaccaatgctctggtccactccgagagcgatgtgggcaaccgtaccgaggttggcaaccactcttccaagagttccacggttgtgcaagagtccagcaaaggaacaccaagatcctatctggctagtagcccaaaccccttttccagagcaaacgccgctgaaaccatttctgccgcccgagcactaccaagcgcatctcctacaagcatccggactggctatatgccgcgaaaggcgtccgtgggctctgcttcgaccagacacgtattcggctcgcggctacaacgcatcaaaacgacagtcaataccatcggcgccaccggaaagctgtcggccacccccccgccatcggccccccctccatcaggtagcggcactagtaagatcgacaaatacgcacgtattctgttcccggttacttttggggccttcaatatggtgtattgggtagtgtacctctctaaggatacaatggagaagtccgaatcactgatgtag

SEQ ID NO: 16209 - DNA, 1665 bp, Artificial Sequence
  derived and/or modified sequence
atggtgtccgccaagaaggtgcccgctattgccttaagtgccggtgtgtctttcgccctcctcaggttcctttgcctagccgtttgcctcaacgaaagcccagggcagaaccaaaaggaggagaagctctgcactgagaattttacccgtattctggatagcctcttggacggctatgataatcgcctgcggccaggatttggaggtcccgtgacggaggtgaaaacagacatttacgtcacatccttcggccctgtctctgacgtggaaatggagtacaccatggacgtctttttccgccaaacgtggatagacaagcgccttaagtacgacggccctattgaaattttacgtttgaacaacatgatggtaacgaaggtgtggacacccgatacattttttcgcaatgggaagaaaagtgtgtcacacaatatgaccgcgcctaacaaactgttcagaattatgagaaatggaactatcctctatactatgagacttacaatcagcgctgagtgtcctatgagacttgtggacttccctatggatggtcacgcctgtcccctgaaattcggttcctacgcctatcccaagtccgagatgatttacacctggacaaaaggccctgaaaagtcggtggaggtgccaaaggaatccagttcattggtacagtatgacctcatcggccaaacagtgtccagcgagacaatcaagtccatcacaggtgaatatattgttatgacagtatacttccacctcagaaggaaaatgggctattttatgattcagacatacatcccatgtattatgactgtaatcctctcacaggtgagtttttggattaacaaggagtcggtgcccgcacgcactgtgtttggaatcacgacagtgctgaccatgaccaccctaagcatctccgcccgacatagcctccctaaggtttcttacgccactgccatggactggttcatcgcagtgtgcttcgcttttgtgttctctgcgttgatagagttcgccgcagtgaattattttacaaacattcagatggagaaagctaaacgcaagacctctaagcctcctcaggaggtgcctgcagctccagtccaacgcgagaaacacccggaggccccattacagaatactaatgccaacctgaacatgagaaaacgcacaaatgctcttgtccactccgagagcgacgttgggaaccggacagaggtgggaaatcactcctctaagtcctccacggtggtgcaagagagctccaagggtactccacgttcttacctggcatcttctccaaatcctttttctcgcgctaacgcagcagaaactatttcagccgctcgtgctttacctagcgcgtctcctacatccatcagaacgggttacatgccgaggaaagcctctgtcggatcagcttcgacccggcatgtcttcggatccaggttgcagaggattaaaacaaccgttaacacaatcggcgcaaccggaaagctcagcgctacccctccaccatctgccccacctcctagcggcagcggtaccagtaaaatcgataagtacgcaagaatcttgtttcctgtgacttttggtgccttcaacatggtatactgggtagtttacctgtctaaagacacaatggagaagagtgagtccctcatgtag

SEQ ID NO: 16210 - DNA, 1665 bp, Artificial Sequence
  derived and/or modified sequence
atggtgagcgccaagaaggtgcccgccatcgccctgagcgccggcgtgagcttcgccctgctgagattcctgtgcctggccgtgtgcctgaacgagagccccggccagaaccagaaggaggagaagctgtgcaccgagaacttcaccagaatcctggacagcctgctggacggctacgacaacagactgagacccggcttcggcggccccgtgaccgaggtgaagaccgacatctacgtgaccagcttcggccccgtgagcgacgtggagatggagtacaccatggacgtgttcttcagacagacctggatcgacaagagactgaagtacgacggccccatcgagatcctgagactgaacaacatgatggtgaccaaggtgtggacccccgacaccttcttcagaaacggcaagaagagcgtgagccacaacatgaccgcccccaacaagctgttcagaatcatgagaaacggcaccatcctgtacaccatgagactgaccatcagcgccgagtgccccatgagactggtggacttccccatggacggccacgcctgccccctgaagttcggcagctacgcctaccccaagagcgagatgatctacacctggaccaagggccccgagaagagcgtggaggtgcccaaggagagcagcagcctggtgcagtacgacctgatcggccagaccgtgagcagcgagaccatcaagagcatcaccggcgagtacatcgtgatgaccgtgtacttccacctgagaagaaagatgggctacttcatgatccagacctacatcccctgcatcatgaccgtgatcctgagccaggtgagcttctggatcaacaaggagagcgtgcccgccagaaccgtgttcggcatcaccaccgtgctgaccatgaccaccctgagcatcagcgccagacacagcctgcccaaggtgagctacgccaccgccatggactggttcatcgccgtgtgcttcgccttcgtgttcagcgccctgatcgagttcgccgccgtgaactacttcaccaacatccagatggagaaggccaagagaaagaccagcaagcccccccaggaggtgcccgccgcccccgtgcagagagagaagcaccccgaggcccccctgcagaacaccaacgccaacctgaacatgagaaagagaaccaacgccctggtgcacagcgagagcgacgtgggcaacagaaccgaggtgggcaaccacagcagcaagagcagcaccgtggtgcaggagagcagcaagggcacccccagaagctacctggccagcagccccaaccccttcagcagagccaacgccgccgagaccatcagcgccgccagagccctgcccagcgccagccccaccagcatcagaaccggctacatgcccagaaaggccagcgtgggcagcgccagcaccagacacgtgttcggcagcagactgcagagaatcaagaccaccgtgaacaccatcggcgccaccggcaagctgagcgccacccccccccccagcgcccccccccccagcggcagcggcaccagcaagatcgacaagtacgccagaatcctgttccccgtgaccttcggcgccttcaacatggtgtactgggtggtgtacctgagcaaggacaccatggagaagagcgagagcctgatgtag

SEQ ID NO: 16211 - protein, 453 aa, Artificial Sequence
  derived and/or modified sequence
MASSLPWLCIILWLENALGKLEVEGNFYSENVSRILDNLLEGYDNRLRPGFGGAVTEVKTDIYVTSFGPVSDVEMEYTMDVFFRQTWTDERLKFGGPTEILSLNNLMVSKIWTPDTFFRNGKKSIAHNMTTPNKLFRIMQNGTILYTMRLTINADCPMRLVNFPMDGHACPLKFGSYAYPKSEIIYTWKKGPLYSVEVPEESSSLLQYDLIGQTVSSETIKSNTGEYVIMTVYFHLQRKMGYFMIQIYTPCIMTVILSQVSFWINKESVPARTVFGITTVLTMTTLSISARHSLPKVSYATAMDWFIAVCFAFVFSALIEFAAVNYFTNLQTQKAKRKAQFAAPPTVTISKATEPLEAEIVLHPDSKYHLKKRITSLSLPIVSSSEANKVLTRAPILQSTPVTPPPLSPAFGGTSKIDQYSRILFPVAFAGFNLVYWVVYLSKDTMEVSSSVE

SEQ ID NO: 16212 - protein, 443 aa, Artificial Sequence
  derived and/or modified sequence
MASSLPWLCIILWLENALGKLEVEGNFYSENVSRILDNLLEGYDNRLRPGFGGAVTEVKTDIYVTSFGPVSDVEMTWTDERLKFGGPTEILSLNNLMVSKIWTPDTFFRNGKKSIAHNMTTPNKLFRIMQNGTILYTMRLTINADCPMRLVNFPMDGHACPLKFGSYAYPKSEIIYTWKKGPLYSVEVPEESSSLLQYDLIGQTVSSETIKSNTGEYVIMTVYFHLQRKMGYFMIQIYTPCIMTVILSQVSFWINKESVPARTVFGITTVLTMTTLSISARHSLPKVSYATAMDWFIAVCFAFVFSALIEFAAVNYFTNLQTQKAKRKAQFAAPPTVTISKATEPLEAEIVLHPDSKYHLKKRITSLSLPIVSSSEANKVLTRAPILQSTPVTPPPLSPAFGGTSKIDQYSRILFPVAFAGFNLVYWVVYLSKDTMEVSSSVE

SEQ ID NO: 16213 - DNA, 2128 bp, Artificial Sequence
  derived and/or modified sequence
aagatgccaatgctttccagatttcctcacagggccctgctaattccatgccaaaactggcagtggatttcttccttctaatctcccttaatgccttattcgattattgtcactgctctccgaccatgcactgtcccttcagactctcctttcccaactgagtcagtcagaggagcctgggtgtctgcaggacataatctaagaccacaaaccaccttgttccacgtgagaaggaaacaagaaagaagggagccaggggaatcctgcaaatttttaggcaacctctttatctattggattactgacttgaggcaaacaaggaacagagatatgaagggtttgaaagatttctccagttgattggcagagaagagctggctagcagggaggacgaccctaggagggtgaattctgcatttcagtgcactgcaggatggcgtcgtctctgccctggctgtgcattattctgtggctagaaaatgccctagggaaactcgaagttgaaggcaacttctactcagaaaacgtcagtcggatcctggacaacttgcttgaaggctatgacaatcggctgcggccgggatttggaggtgctgtcactgaagtcaaaacagacatttatgtgaccagttttgggcccgtgtcagatgtggagatggagtatacgatggatgtttttttccgccagacctggactgatgagaggttgaagtttggggggccaactgagattctgagtctgaataatttgatggtcagtaaaatctggacgcctgacacctttttcagaaatggtaaaaagtccattgctcacaacatgacaactcctaataaactcttcagaataatgcagaatggaaccattttatacaccatgaggcttaccatcaatgctgactgtcccatgaggctggttaactttcctatggatgggcatgcttgtccactcaagtttgggagctatgcttatcccaaaagtgaaatcatatatacgtggaaaaaaggaccactttactcagtagaagtcccagaagaatcttcaagccttctccagtatgatctgattggacaaacagtatctagtgagacaattaaatctaacacaggtgaatacgttataatgacagtttacttccacttgcaaaggaagatgggctacttcatgatacagatatacactccttgcattatgacagtcattctttcccaggtgtctttctggattaataaggagtccgtcccagcaagaactgtttttgggatcaccactgttttaactatgaccactttgagcatcagtgcccggcactctttgccaaaagtgtcatatgccactgccatggattggttcatagctgtttgctttgcattcgtcttctctgcgcttatcgagttcgcagctgtcaactactttaccaatcttcagacacagaaggccaaaaggaaggcacagtttgcagccccacccacagtgacaatatcaaaagctactgaacctttggaagctgagattgttttgcatcctgactccaaatatcatctgaagaaaaggatcacttctctgtctttgccaatagtttcatcttccgaggccaataaagtgctcacgagagcgcccatcttacaatcaacacctgtcacacccccaccactctcgccagcctttggaggcaccagtaaaatagaccagtattctcgaattctcttcccagttgcatttgcaggattcaaccttgtgtactgggtagtttatctttccaaagatacaatggaagtcagtagcagtgttgaatagcttgcggccaggacaacctgaattctataagttcttgttttctgtttcctatgttttcttaaaaaatagcattgagacttgtgtagatgcttctcagaacatgaaatcaaattggaaatctgtaacgcagcttccgtaagcatgtgtgggcaaaaaagcaataatcctactcctcaaaatagaaagttgaagattgctgaaaaatatgacttttctgtatgttagagaaaaactttatgaggatgaaatgggttcaagatgaatttgtcaacttttgtcttccattgttcagtatttttaattgtcactgtaaataacatttaccacaaggca

SEQ ID NO: 16214 - DNA, 2393 bp, Artificial Sequence
  derived and/or modified sequence
acataatctaagaccacaaaccaccttgttccacgtgagaaggaaacaagaaagaagggagccaggggaatcctgcaaatttttaggcaacctctttatctattggattactgacttgaggcaaacaaggaacagagatatgaagggtttgaaagatttctccagttgattggcagagaagagctggctagcagggaggacgaccctaggagggtgaattctgcatttcagtgcactgcaggatggcgtcgtctctgccctggctgtgcattattctgtggctagaaaatgccctagggaaactcgaagttgaaggcaacttctactcagaaaacgtcagtcggatcctggacaacttgcttgaaggctatgacaatcggctgcggccgggatttggaggtgctgtcactgaagtcaaaacagacatttatgtgaccagttttgggcccgtgtcagatgtggagatgacctggactgatgagaggttgaagtttggggggccaactgagattctgagtctgaataatttgatggtcagtaaaatctggacgcctgacacctttttcagaaatggtaaaaagtccattgctcacaacatgacaactcctaataaactcttcagaataatgcagaatggaaccattttatacaccatgaggcttaccatcaatgctgactgtcccatgaggctggttaactttcctatggatgggcatgcttgtccactcaagtttgggagctatgcttatcccaaaagtgaaatcatatatacgtggaaaaaaggaccactttactcagtagaagtcccagaagaatcttcaagccttctccagtatgatctgattggacaaacagtatctagtgagacaattaaatctaacacaggtgaatacgttataatgacagtttacttccacttgcaaaggaagatgggctacttcatgatacagatatacactccttgcattatgacagtcattctttcccaggtgtctttctggattaataaggagtccgtcccagcaagaactgtttttgggatcaccactgttttaactatgaccactttgagcatcagtgcccggcactctttgccaaaagtgtcatatgccactgccatggattggttcatagctgtttgctttgcattcgtcttctctgcgcttatcgagttcgcagctgtcaactactttaccaatcttcagacacagaaggccaaaaggaaggcacagtttgcagccccacccacagtgacaatatcaaaagctactgaacctttggaagctgagattgttttgcatcctgactccaaatatcatctgaagaaaaggatcacttctctgtctttgccaatagtttcatcttccgaggccaataaagtgctcacgagagcgcccatcttacaatcaacacctgtcacacccccaccactctcgccagcctttggaggcaccagtaaaatagaccagtattctcgaattctcttcccagttgcatttgcaggattcaaccttgtgtactgggtagtttatctttccaaagatacaatggaagtcagtagcagtgttgaatagcttgcggccaggacaacctgaattctataagttcttgttttctgtttcctatgttttcttaaaaaatagcattgagacttgtgtagatgcttctcagaacatgaaatcaaattggaaatctgtaacgcagcttccgtaagcatgtgtgggcaaaaaagcaataatcctactcctcaaaatagaaagttgaagattgctgaaaaatatgacttttctgtatgttagagaaaaactttatgaggatgaaatgggttcaagatgaatttgtcaacttttgtcttccattgttcagtatttttaattgtcactgtaaataacatttaccacaaggcagataaaataagaaatgctgacacttccaaaggttgccttaaaatatgtttattttggcttagttcccgagagggcaaaatataaatacagtctaaatatttatcagtaggttaataccagcatgttggaggcctttatgctagtaaaatggctttcagtggcattgtaaagcctacattgagcttagccatttgtttttaacctcgctgtgctcttttacctcaataaaatgtggtgtttgtatacatataaattatacatagctcataaattatgtatgcatatgtacatagctgtagttggactaaaattcagtgtgttttatcctactaaattctccttttaaaataatacacttaccataattctatgaggttgtagaaaaaagtactcattataaggaagccttgtatattatgactatggttatctcttgtgttttccacatttccaattataacactaaataaaacaacaataaacatg

SEQ ID NO: 16215 - DNA, 1362 bp, Artificial Sequence
  derived and/or modified sequence
atggcaagctctctgccctggctgtgcattattctgtggctggagaatgccctcggcaaattggaggtggagggcaacttttactccgagaatgtttcacggattttagacaatctcctggagggatacgataatcgcctgcggccaggattcggtggggccgtaacggaagtcaaaacagatatttatgtgacttcgttcggtccagtcagtgacgtggaaatggagtacacgatggacgtgttctttcggcaaacctggacagacgaacggctcaagttcggcggtcctacagagatcttatccctgaataatttaatggttagtaagatatggactcctgacacattcttcaggaacggtaaaaaatccattgcccataacatgactacccccaacaagctcttccggataatgcagaacggcacaatcctgtatacaatgcgtcttaccattaatgcagattgcccgatgcgcttggtcaactttccaatggatggacacgcatgccccctgaagtttggctcctacgcctaccccaaatcagagatcatttatacgtggaagaagggacctctctacagcgttgaggtgcccgaggaatctagctcactgctgcagtacgatctgattgggcagaccgtgagctccgaaactatcaagagtaataccggggagtacgtcattatgactgtttacttccacctgcagcgcaaaatgggctactttatgattcagatctacacaccctgcattatgacggtgattcttagccaggtcagcttttggattaataaagagtcagtccctgcgcgcaccgtctttggcatcactacggtgttaaccatgaccacactttctattagtgctcggcacagcctgcccaaagtatcgtatgcaactgctatggattggtttattgcagtttgcttcgccttcgtcttcagtgccctgatcgagtttgctgcggttaattatttcacgaacctgcaaacacagaaggccaagcgcaaggcccagttcgcagcacctccaacagtgacaatcagcaaggccacagagcctctggaagcagagattgtgctgcaccctgactccaagtatcatcttaagaaacgcatcacaagcctgagcctgcctatagtgtcttcctctgaggcaaacaaagtgttaactcgtgctcctatcttacagagtactcccgtgacacctccacctctgtctcctgcttttggaggtacatctaagatagaccagtattcgcgcattttattcccagtggcgttcgcggggttcaatctcgtatactgggtggtgtacctgtccaaggataccatggaggtgagcagtagtgtggaatag

SEQ ID NO: 16216 - DNA, 1332 bp, Artificial Sequence
  derived and/or modified sequence
atggctagctcactgccatggctgtgcattattctttggcttgagaacgctctggggaagctagaggtggagggaaacttttatagcgagaatgtctccaggatcttggataatctgctggagggctacgacaaccggctgcggccaggatttggcggcgccgtcacagaggtcaaaaccgatatttacgtgaccagcttcggtcccgtgagtgatgtagagatgacctggactgatgagaggctgaaattcggtgggccaaccgagatcctatcacttaacaacttgatggtttctaagatatggacccctgacacgttttttcgcaacggaaaaaagagtatcgcacataacatgaccacccccaacaagctatttaggatcatgcagaacgggaccatcttgtataccatgcgtctcacgatcaatgcggattgccctatgaggctggtgaactttccaatggatggccacgcgtgccctttgaagtttggatcatatgcctatccaaagagcgagattatttatacctggaaaaagggaccgctctactcagtcgaagtaccagaagaatccagttcattattgcagtacgatttgattggccagaccgtgagcagcgaaaccataaaatccaacaccggggagtacgtgatcatgacggtctacttccatcttcaaaggaagatgggctactttatgattcagatttatacaccttgcataatgaccgttatcctgtcacaggtgtccttctggatcaataaggagtccgtccccgcgcgcactgtcttcgggatcactacagtcttgaccatgacaacactttctatttcggcaaggcatagcctcccaaaagtcagctacgccaccgccatggactggtttatcgccgtatgcttcgcattcgtcttttcggctcttatagagtttgccgctgtgaactacttcacaaatctccagactcagaaggccaaaaggaaggctcagttcgctgccccgcccacggttacgatctcaaaagccaccgaacctctcgaggcagagatcgtgttacaccccgattcgaaatatcatctgaaaaagaggattacctcgctctcactgcccatcgtatcctcctccgaggccaataaagtactaactcgtgcgcctattcttcaatccacccctgtgacaccaccacctctcagcccagccttcggggggacttcaaaaattgaccagtattctcgcattctgtttccagttgcatttgcagggttcaacctggtgtattgggtggtatacctgtctaaagacacaatggaggtaagcagcagtgtggagtag

SEQ ID NO: 16217 - DNA, 1362 bp, Artificial Sequence
  derived and/or modified sequence
atggccagcagcctgccctggctgtgcatcatcctgtggctggagaatgccctgggcaagctggaggtggagggcaacttctacagtgaaaatgtgagccgcatcctggacaacctgctggagggctatgacaaccggctgcggcccggctttggaggagctgtgacagaggtgaagacagacatctacgtgaccagctttggacctgtgtctgatgtggagatggagtacaccatggatgtgttcttccggcagacctggacagatgagcggctgaagtttggaggccccacagagatcctgagcctgaacaacctgatggtgtccaagatctggaccccagacaccttcttcagaaatggcaagaagagcatcgcccacaacatgaccacccccaacaagctgttccgcatcatgcagaatggcaccatcctgtacaccatgaggctgaccatcaatgctgactgccccatgaggctggtgaacttccccatggatggccacgcctgccccctgaagtttggcagctatgcctaccccaagtctgagatcatctacacctggaagaagggccccctgtacagcgtggaggtgcctgaggagagcagcagcctgctgcagtatgacctgattggccagacagtgtcctctgagaccatcaagagcaacacaggagaatatgtgatcatgacagtgtacttccacctgcagaggaagatgggctacttcatgatccagatctacaccccctgcatcatgaccgtcatcctgagccaggtgtccttctggatcaacaaggagagcgtgcctgccaggacagtgtttggcatcaccaccgtgctgaccatgaccaccctgagcatcagcgcccggcacagcctgcccaaggtgtcctatgccacagccatggactggttcatcgctgtgtgctttgcctttgtgttcagcgccctgattgaatttgctgctgtgaactacttcaccaacctgcagacccagaaggccaagaggaaggcccagtttgctgccccacccaccgtgaccatcagcaaggccacagagcccctggaggccgagatcgtgctgcacccagacagcaagtaccacctgaagaagaggatcaccagcctgagcctgcccatcgtgagcagcagcgaggccaacaaggtgctgacccgggcccccatcctgcagagcacccctgtgaccccaccacccctgagccctgcctttggaggcaccagcaagattgaccagtacagccgcatcctcttccctgtggcctttgctggcttcaacctggtgtactgggtggtgtacctgagcaaggacaccatggaggtgagcagctctgtggagtag

SEQ ID NO: 16218 - DNA, 1332 bp, Artificial Sequence
  derived and/or modified sequence
atggccagcagcctgccctggctgtgcatcatcctgtggctggagaatgccctgggcaagctggaggtggagggcaacttctacagtgaaaatgtgagccgcatcctggacaacctgctggagggctatgacaaccggctgcggcccggctttggaggagctgtgacagaggtgaagacagacatctacgtgaccagctttggacctgtgtctgatgtggagatgacctggacagatgagcggctgaagtttggaggccccacagagatcctgagcctgaacaacctgatggtgtccaagatctggaccccagacaccttcttcagaaatggcaagaagagcatcgcccacaacatgaccacccccaacaagctgttccgcatcatgcagaatggcaccatcctgtacaccatgaggctgaccatcaatgctgactgccccatgaggctggtgaacttccccatggatggccacgcctgccccctgaagtttggcagctatgcctaccccaagtctgagatcatctacacctggaagaagggccccctgtacagcgtggaggtgcctgaggagagcagcagcctgctgcagtatgacctgattggccagacagtgtcctctgagaccatcaagagcaacacaggagaatatgtgatcatgacagtgtacttccacctgcagaggaagatgggctacttcatgatccagatctacaccccctgcatcatgaccgtcatcctgagccaggtgtccttctggatcaacaaggagagcgtgcctgccaggacagtgtttggcatcaccaccgtgctgaccatgaccaccctgagcatcagcgcccggcacagcctgcccaaggtgtcctatgccacagccatggactggttcatcgctgtgtgctttgcctttgtgttcagcgccctgattgaatttgctgctgtgaactacttcaccaacctgcagacccagaaggccaagaggaaggcccagtttgctgccccacccaccgtgaccatcagcaaggccacagagcccctggaggccgagatcgtgctgcacccagacagcaagtaccacctgaagaagaggatcaccagcctgagcctgcccatcgtgagcagcagcgaggccaacaaggtgctgacccgggcccccatcctgcagagcacccctgtgaccccaccacccctgagccctgcctttggaggcaccagcaagattgaccagtacagccgcatcctcttccctgtggcctttgctggcttcaacctggtgtactgggtggtgtacctgagcaaggacaccatggaggtgagcagctctgtggagtag

SEQ ID NO: 16219 - DNA, 1362 bp, Artificial Sequence
  derived and/or modified sequence
atggccagcagcctgccctggctgtgcatcatcctgtggctggagaacgccctcggcaaactggaggttgagggaaatttctactcagagaatgtatctcggattttagacaatctcttggaagggtacgacaataggcttagaccaggcttcgggggcgctgtgacagaagtgaagaccgacatctatgtaacttctttcggccccgtctcggatgtggaaatggagtacaccatggacgtgttctttcggcaaacctggaccgacgagcgcctcaagttcggaggtcctacagagatcttgtccctgaataatctgatggtgtctaaaatatggacccccgacacatttttcaggaatggtaagaagtcgatagcccataacatgacaacacctaacaaactcttccgaatcatgcagaatggaaccatcttgtatacgatgcgcctgaccattaacgctgattgccccatgagactggtgaatttccctatggatgggcacgcttgccccctcaagttcggctcttacgcataccctaaaagcgagataatctatacgtggaagaagggcccactctattccgttgaagtgcctgaggaatctagctctctgctgcagtatgacctcatcgggcagaccgtgtcgtctgaaactatcaagtcaaacacaggcgagtatgttatcatgacagtgtattttcacctacagagaaaaatggggtacttcatgatacagatttacacaccctgcatcatgacagtcattctgtcgcaggtgtccttctggattaacaaggaatccgtgcccgccagaactgtcttcgggataactaccgtgttgactatgactactctttcaattagcgcccgccactccctccctaaggtgagctatgctacagcaatggattggtttatcgccgtttgtttcgcctttgtcttttcagccctgatagagtttgctgccgtgaattacttcactaaccttcagactcaaaaagccaaacggaaggctcaatttgctgccccccccactgtgactatttccaaggctacagagcctctggaggcggaaatcgttcttcacccagacagcaagtaccatctaaagaaaagaataacctccctgagtttgcctattgtgtcctcatcagaagcaaacaaagtgctgacacgtgccccaattctacaatctacacccgtgacacccccccccttaagcccggcattcggcggcacttccaagattgaccagtatagccgtatattgttcccagtcgcattcgccggctttaatctggtgtattgggtggtctatcttagcaaagatacaatggaagtgtcatccagtgtcgagtag

SEQ ID NO: 16220 - DNA, 1332 bp, Artificial Sequence
  derived and/or modified sequence
atggccagcagcctgccctggctgtgcatcatcctgtggctggagaacgcgctgggcaagctggaagtggaagggaacttctattccgaaaacgtttccaggatcctcgacaacctcctcgaggggtatgataataggttaagacctggttttggaggagccgtaacggaagtcaaaacagacatttatgtaacttcttttgggcccgtgagtgacgttgagatgacgtggaccgatgagcgcctaaaattcggtggtcctacagaaattctgtcactgaataacttaatggtgagcaagatttggacgccagacacattttttagaaacggaaagaagagcatcgcacacaacatgacaacccctaacaagcttttcagaataatgcagaacggtacgatattgtacacaatgagactgacaattaatgccgactgccctatgcgcttagtcaacttcccgatggacggacacgcctgcccacttaagtttggctcctacgcgtacccaaaaagcgaaattatatacacctggaaaaaggggcccctttactcagtggaggtgccagaggaaagtagcagcctgctgcagtacgatctgatcggccagaccgtgtccagcgagactataaagagcaacaccggggaatacgtcatcatgactgtgtatttccatcttcaacgcaagatgggctattttatgatacagatttatactccctgtataatgactgtcattttaagccaagtatctttttggatcaataaagagtcggtgccggcgcgtacagtatttggaattaccaccgtactcacgatgactaccctgtccatttccgccaggcactctctgcccaaagtgtcgtacgcaaccgcaatggattggtttatcgcggtctgtttcgcttttgttttttccgctctgatcgagtttgctgccgtcaattatttcaccaacctgcagacccagaaggctaaaaggaaagcccaatttgctgcccctcccaccgttactatctcaaaggccaccgaacccctggaggctgaaattgttctccacccggacagtaagtatcatcttaaaaagcgcatcacatccctatctctgcccattgtttcttcttccgaagctaacaaggttttaacccgagcccccatcctgcaatcaacccccgtcacacctccacctctgagcccagcgttcgggggcacatccaagatcgatcaatattccagaattctgtttcccgtagcgttcgctggttttaatctggtgtattgggtggtgtatttgtccaaggacactatggaagtgagttctagcgttgagtag

SEQ ID NO: 16221 - DNA, 1362 bp, Artificial Sequence
  derived and/or modified sequence
atggcctcatctctcccatggttgtgcatcattctttggctggaaaacgccctcggaaaattggaggtagaggggaacttctattctgaaaacgtcagcagaattttggacaacttgttggagggctacgacaatcggttacgaccaggctttgggggtgccgttaccgaagtgaaaacagatatctatgttacctcttttggccctgtaagcgacgtagagatggagtacacaatggatgtctttttccgacaaacttggaccgacgagcggctgaaatttggtggcccaacggagatcctaagcctgaataacctaatggtatcgaaaatttggacccccgatacattcttccgcaacggcaagaagagcatagcccataatatgaccactcctaataaactattccggatcatgcagaacggcacaatcctatatactatgcgtctgacgatcaacgctgattgtcctatgcgcctggtgaacttccccatggatggccacgcatgccccttgaagttcggatcctacgcctatcccaaatcggagatcatttatacttggaagaaaggcccactctattcagtagaggtcccagaggagagttcctcactgctacaatatgacctgatcggtcagacagtctccagtgaaactattaaatctaacacaggagaatatgtcatcatgaccgtgtatttccacctgcagagaaagatgggttatttcatgatccagatctacactccatgtatcatgacagtgattctgagccaggtttccttttggataaacaaggagagcgtcccagccaggacagtttttggaatcacgacggttctgacaatgacaaccttgagcatcagcgctaggcacagtttgcccaaggtgagttacgccactgcaatggattggtttattgctgtatgcttcgcattcgtcttttcagctctgatcgagtttgccgcagtgaactacttcaccaatttgcagacacagaaagcaaaacgaaaggcccagttcgccgcaccaccaactgtgaccatctccaaagccacggagccgctggaagcagaaatcgtgctgcacccagactctaagtatcacctcaagaagagaattacttctctttcactgcccatcgtttcttcgtccgaagccaataaagtcctgacaagagctcctatcttgcagtccacacccgtgacgccaccaccacttagccctgccttcggcggaacctcaaaaatcgaccaatatagcagaatactgtttcctgtagctttcgccggtttcaacttagtttactgggtcgtttacttgtcgaaagataccatggaagtctcttcttccgtcgagtag

SEQ ID NO: 16222 - DNA, 1332 bp, Artificial Sequence
  derived and/or modified sequence
atggcttcatctctcccttggctgtgtattatcctgtggctggaaaacgctctgggcaaactagaagtggaggggaatttttacagtgaaaatgtctcccggatactggataatctgttggagggctacgacaatcgcttgaggccaggatttggaggtgctgtcacagaggtgaaaactgacatctatgttacgagtttcggccctgtaagtgacgtagaaatgacctggactgacgagcgactgaaattcggaggacccacagagatcttgtccttaaataacctgatggttagtaaaatttggacccctgacacatttttccgcaacgggaagaagtcaattgcccacaacatgacaacccctaataaactatttcggatcatgcagaatggcacaatcctgtatactatgaggctgaccatcaacgccgactgtccaatgcggttagtgaattttccgatggatggccacgcctgccccctaaaattcggtagctacgcttatcctaagtccgaaattatctatacatggaaaaagggtcctctgtactccgtggaagttcctgaggagagcagctctctgttacagtatgacctgatcgggcaaacagtctcatcagagaccatcaagtctaacacaggggagtatgtaatcatgaccgtgtacttccacttgcagcggaagatgggttatttcatgattcagatctacaccccctgtattatgacagtgatcctatctcaagtgtctttctggattaataaagagtcagtgcctgcaagaactgtgttcggtatcaccaccgtgttgacaatgacgacgctgtccatctctgcaagacactcactccctaaagtgtcttatgcaacagctatggattggtttatagctgtttgctttgcattcgtcttctcggcattgattgaattcgcggcagtgaactattttactaacttacaaacacagaaagcaaagagaaaagcacagtttgctgcccctcccacagtgaccatctccaaagctaccgaacccctggaggccgagatcgtcctccaccctgatagcaagtaccacctcaaaaagagaatcacaagtctgagcctgcctatcgtgagctccagtgaggccaataaggtactgacacgtgctcccatcctgcagtctactcccgtgaccccgccaccccttagccctgcgtttgggggaacaagcaagattgatcagtactcccggattcttttccccgtcgcctttgctggtttcaatctcgtctactgggtggtgtacctgtctaaggatacaatggaagtgtcttccagcgttgaatag

SEQ ID NO: 16223 - DNA, 1362 bp, Artificial Sequence
  derived and/or modified sequence
atggccagcagcctgccctggctgtgcatcatcctgtggctggagaacgccctgggcaagctggaggtggagggcaacttctacagcgagaacgtgagcagaatcctggacaacctgctggagggctacgacaacagactgagacccggcttcggcggcgccgtgaccgaggtgaagaccgacatctacgtgaccagcttcggccccgtgagcgacgtggagatggagtacaccatggacgtgttcttcagacagacctggaccgacgagagactgaagttcggcggccccaccgagatcctgagcctgaacaacctgatggtgagcaagatctggacccccgacaccttcttcagaaacggcaagaagagcatcgcccacaacatgaccacccccaacaagctgttcagaatcatgcagaacggcaccatcctgtacaccatgagactgaccatcaacgccgactgccccatgagactggtgaacttccccatggacggccacgcctgccccctgaagttcggcagctacgcctaccccaagagcgagatcatctacacctggaagaagggccccctgtacagcgtggaggtgcccgaggagagcagcagcctgctgcagtacgacctgatcggccagaccgtgagcagcgagaccatcaagagcaacaccggcgagtacgtgatcatgaccgtgtacttccacctgcagagaaagatgggctacttcatgatccagatctacaccccctgcatcatgaccgtgatcctgagccaggtgagcttctggatcaacaaggagagcgtgcccgccagaaccgtgttcggcatcaccaccgtgctgaccatgaccaccctgagcatcagcgccagacacagcctgcccaaggtgagctacgccaccgccatggactggttcatcgccgtgtgcttcgccttcgtgttcagcgccctgatcgagttcgccgccgtgaactacttcaccaacctgcagacccagaaggccaagagaaaggcccagttcgccgccccccccaccgtgaccatcagcaaggccaccgagcccctggaggccgagatcgtgctgcaccccgacagcaagtaccacctgaagaagagaatcaccagcctgagcctgcccatcgtgagcagcagcgaggccaacaaggtgctgaccagagcccccatcctgcagagcacccccgtgacccccccccccctgagccccgccttcggcggcaccagcaagatcgaccagtacagcagaatcctgttccccgtggccttcgccggcttcaacctggtgtactgggtggtgtacctgagcaaggacaccatggaggtgagcagcagcgtggagtag

SEQ ID NO: 16224 - DNA, 1332 bp, Artificial Sequence
  derived and/or modified sequence
atggccagcagcctgccctggctgtgcatcatcctgtggctggagaacgccctgggcaagctggaggtggagggcaacttctacagcgagaacgtgagcagaatcctggacaacctgctggagggctacgacaacagactgagacccggcttcggcggcgccgtgaccgaggtgaagaccgacatctacgtgaccagcttcggccccgtgagcgacgtggagatgacctggaccgacgagagactgaagttcggcggccccaccgagatcctgagcctgaacaacctgatggtgagcaagatctggacccccgacaccttcttcagaaacggcaagaagagcatcgcccacaacatgaccacccccaacaagctgttcagaatcatgcagaacggcaccatcctgtacaccatgagactgaccatcaacgccgactgccccatgagactggtgaacttccccatggacggccacgcctgccccctgaagttcggcagctacgcctaccccaagagcgagatcatctacacctggaagaagggccccctgtacagcgtggaggtgcccgaggagagcagcagcctgctgcagtacgacctgatcggccagaccgtgagcagcgagaccatcaagagcaacaccggcgagtacgtgatcatgaccgtgtacttccacctgcagagaaagatgggctacttcatgatccagatctacaccccctgcatcatgaccgtgatcctgagccaggtgagcttctggatcaacaaggagagcgtgcccgccagaaccgtgttcggcatcaccaccgtgctgaccatgaccaccctgagcatcagcgccagacacagcctgcccaaggtgagctacgccaccgccatggactggttcatcgccgtgtgcttcgccttcgtgttcagcgccctgatcgagttcgccgccgtgaactacttcaccaacctgcagacccagaaggccaagagaaaggcccagttcgccgccccccccaccgtgaccatcagcaaggccaccgagcccctggaggccgagatcgtgctgcaccccgacagcaagtaccacctgaagaagagaatcaccagcctgagcctgcccatcgtgagcagcagcgaggccaacaaggtgctgaccagagcccccatcctgcagagcacccccgtgacccccccccccctgagccccgccttcggcggcaccagcaagatcgaccagtacagcagaatcctgttccccgtggccttcgccggcttcaacctggtgtactgggtggtgtacctgagcaaggacaccatggaggtgagcagcagcgtggagtag

SEQ ID NO: 16225 - protein, 474 aa, Artificial Sequence
  derived and/or modified sequence
MWTVQNRESLGLLSFPVMITMVCCAHSTNEPSNMSYVKETVDRLLKGYDIRLRPDFGGPPVDVGMRIDVASIDMVSEVNMDYTLTMYFQQSWKDKRLSYSGIPLNLTLDNRVADQLWVPDTYFLNDKKSFVHGVTVKNRMIRLHPDGTVLYGLRITTTAACMMDLRRYPLDEQNCTLEIESYGYTTDDIEFYWNGGEGAVTGVNKIELPQFSIVDYKMVSKKVEFTTGAYPRLSLSFRLKRNIGYFILQTYMPSTLITILSWVSFWINYDASAARVALGITTVLTMTTISTHLRETLPKIPYVKAIDIYLMGCFVFVFLALLEYAFVNYIFFGKGPQKKGASKQDQSANEKNKLEMNKVQVDAHGNILLSTLEIRNETSGSEVLTSVSDPKATMYSYDSASIQYRKPLSSREAYGRALDRHGVPSKGRIRRRASQLKVKIPDLTDVNSIDKWSRMFFPITFSLFNVVYWLYYVH

SEQ ID NO: 16226 - protein, 404 aa, Artificial Sequence
  derived and/or modified sequence
MTFACGRTSEDYTLTMYFQQSWKDKRLSYSGIPLNLTLDNRVADQLWVPDTYFLNDKKSFVHGVTVKNRMIRLHPDGTVLYGLRITTTAACMMDLRRYPLDEQNCTLEIESYGYTTDDIEFYWNGGEGAVTGVNKIELPQFSIVDYKMVSKKVEFTTGAYPRLSLSFRLKRNIGYFILQTYMPSTLITILSWVSFWINYDASAARVALGITTVLTMTTISTHLRETLPKIPYVKAIDIYLMGCFVFVFLALLEYAFVNYIFFGKGPQKKGASKQDQSANEKNKLEMNKVQVDAHGNILLSTLEIRNETSGSEVLTSVSDPKATMYSYDSASIQYRKPLSSREAYGRALDRHGVPSKGRIRRRASQLKVKIPDLTDVNSIDKWSRMFFPITFSLFNVVYWLYYVH

SEQ ID NO: 16227 - DNA, 2143 bp, Artificial Sequence
  derived and/or modified sequence
aatgcatgaaggaaactccgtttacacatgctcgtaggatcccctgcgtggaaacagcagcttgtctctgactacccggaggacatggagcaccccaaataggaactttagagggattgaaatctgttgcctgttccactaggaatattgtttgcaaggcacaaggtgtcttttggtagtgagcgcgctctgcgcatgcgcaggtccattcgggaattactgcccagcagccgactaagttgcattccttgaatcttcgcagaaaagacaattcttttaatcagagttagtaatgtggacagtacaaaatcgagagagtctggggcttctctctttccctgtgatgattaccatggtctgttgtgcacacagcaccaatgaacccagcaacatgtcatacgtgaaagagacagtggacagattgctcaaaggatatgacattcgcttgcggccggacttcggagggccccccgtcgacgttgggatgcggatcgatgtcgccagcatagacatggtctccgaagtgaatatggattatacactcaccatgtatttccagcagtcttggaaagacaaaaggctttcttattctggaatcccactgaacctcaccctagacaatagggtagctgaccaactctgggtaccagacacctactttctgaatgacaagaaatcatttgtgcatggggtcacagtgaaaaatcgaatgattcgactgcatcctgatggaacagttctctatggactccgaatcacaaccacagctgcatgtatgatggatcttcgaagatatccattggatgagcagaactgcaccctggagatcgaaagttatggctataccactgatgacattgaattttactggaatggaggagaaggggcagtcactggtgttaataaaatcgaacttcctcaattttcaattgttgactacaagatggtgtctaagaaggtggagttcacaacaggagcgtatccacgactgtcactaagttttcgtctaaagagaaacattggttacttcattttgcaaacctacatgccttctacactgattacaattctgtcctgggtgtctttttggatcaactatgatgcatctgcagccagagtcgcactaggaatcacgacagtgcttacaatgacaaccatcagcacccacctcagggagaccctgccaaagatcccttatgtcaaagcgattgatatttatctgatgggttgctttgtgtttgtgttcctggctctgctggagtatgcctttgtaaattacatcttctttgggaaaggccctcagaaaaagggagctagcaaacaagaccagagtgccaatgagaagaataaactggagatgaataaagtccaggtcgacgcccacggtaacattctcctcagcaccctggaaatccggaatgagacgagtggctcggaagtgctcacgagcgtgagcgaccccaaggccaccatgtactcctatgacagcgccagcatccagtaccgcaagcccctgagcagccgcgaggcctacgggcgcgccctggaccggcacggggtacccagcaaggggcgcatccgcaggcgtgcctcccagctcaaagtcaagatccccgacttgactgatgtgaattccatagacaagtggtcccgaatgtttttccccatcaccttttctctttttaatgtcgtctattggctttactatgtacactgaggtctgttctaatggttccatttagactactttcctcttctattgttttttaaccttacaggtccccaacagcgatactgctgtttctcgaggtaagagattcagccatccaattggttttaggtcttgcatatcagttttattactgcaccatgtttacttcaaaaagacaaaacaaaaaaaaaattatttttccagtctaccgtggtccaggttatcagctctttaagagctctattaattgccatgtttacaaacaaacacaaagagagaagttagacaggtagatctttagcagtcttttctagtttccctggatttcactgatttattttttagggaaaatgaaaagaggaccttgctgtccgcctgcactgcttcctggtaaactataacaaacttatgctgccaaaaaaaaaaaaaaaa

SEQ ID NO: 16228 - DNA, 1425 bp, Artificial Sequence
  derived and/or modified sequence
atgtggaccgtccaaaatcgggagtctctaggactcctgtcttttccagtgatgatcaccatggtctgctgtgctcatagcaccaatgaacctagtaacatgagttacgtgaaagaaacagtggatagactgctaaagggctacgacatccggctgcgacctgactttggtggaccccccgtcgacgtgggcatgagaattgacgttgcctctatcgatatggtttcagaagtgaatatggattataccctcaccatgtatttccagcagtcttggaaagacaagcgcttgtcctacagcggcatccctctcaatctgaccctggacaatagggttgcagaccagttgtgggtgcctgacacttacttccttaatgacaaaaaatcgtttgtgcacggcgtgaccgtaaaaaatcgcatgattcgcttgcatcctgacggcacagtcctttatggactgcgtatcacaacaacagcggcttgtatgatggatctgagaaggtatcctctcgacgagcaaaactgtacactggaaatcgagtcatacggctacaccactgacgacattgaattctattggaacggaggagagggagcagtcactggagtcaacaaaatcgagttgccacaattctcaattgtcgattacaagatggtcagcaaaaaggtcgaatttaccacaggggcgtatccaagactctcattgtcctttagactcaagcgtaacatcggatatttcattctgcagacgtacatgccatcgacgctgatcacgatcctcagttgggtttccttctggattaactatgacgcctccgcggcacgcgtcgcgctggggataaccaccgtgttaactatgactacgatatctacgcatctgcgagaaacgttaccaaagataccctatgtaaaggctattgacatctacctcatggggtgctttgtattcgtttttctggccctcctggagtatgccttcgtcaactatatcttctttggaaaaggcccacagaagaagggagcttcaaaacaggatcagagcgccaacgagaagaacaagctggaaatgaacaaggtccaggtggatgcccatgggaatatcctactctcgacactggaaatacgcaatgaaacttctggttctgaagtgctcacatccgtgtccgatcccaaggccacaatgtatagttatgattccgcgagtatccagtatcgcaagcctctgagctctcgcgaagcctacggacgtgccctggaccgacacggcgtgccaagcaaaggccggatccgccgaagggcctcccaactgaaggtcaagattcccgaccttactgatgtgaactccatagataaatggtcgcggatgttttttcctatcacttttagcctgttcaatgtggtgtactggttatattatgtccactag

SEQ ID NO: 16229 - DNA, 1425 bp, Artificial Sequence
  derived and/or modified sequence
atgtggacagtgcagaaccgggagagcctgggcctgctgtccttccctgtgatgatcaccatggtgtgctgtgcccacagcaccaatgagcccagcaacatgtcctatgtgaaggagaccgtggaccggctgctgaagggctatgacatccggctgcggccagactttggaggcccccctgtggatgtgggcatgagaattgatgtggccagcattgacatggtgtctgaggtgaacatggactacaccctgaccatgtacttccagcagagctggaaggacaagaggctgagctacagcggcatccccctgaacctgaccctggacaacagagtggccgaccagctgtgggtgcctgacacctacttcctgaatgacaagaagagctttgtgcacggcgtgacagtgaagaacaggatgatccggctgcacccagatggcaccgtgctgtatggcctgcgcatcaccaccacagctgcctgcatgatggacctgcggcgctaccccctggatgagcagaactgcaccctggagattgagagctatggctacaccacagatgacatcgagttctactggaatggaggagagggcgctgtgactggagtgaacaagattgagctgccccagttcagcatcgtggactacaagatggtgtccaagaaggtggagttcaccactggagcctacccccggctgagcctgtccttccggctgaagagaaatattggctacttcatcctgcagacctacatgcccagcaccctcatcaccatcctgtcctgggtgtccttctggatcaactatgatgccagcgctgcccgggtggccctgggcatcaccaccgtgctgaccatgaccaccatcagcacccacctgcgggagaccctgcccaagatcccctacgtgaaggccatcgacatctacctgatgggctgctttgtgtttgtgttcctggccctgctggagtatgcctttgtgaactacatcttcttcggcaagggcccccagaagaagggggccagcaagcaggaccagagcgccaatgagaagaacaagctggagatgaacaaggtgcaggtggatgcccacggcaacatcctgctgagcaccctggagatcagaaatgagaccagcggcagcgaggtgctgacctctgtgtctgaccccaaggccaccatgtacagctatgattctgccagcatccagtacaggaagcccctgagcagccgggaggcctacggccgggccctggacagacatggagtgcccagcaagggccgcatcagaagaagagccagccagctgaaggtgaagatcccagacctgacagatgtgaacagcattgacaagtggagcaggatgttcttccccatcaccttcagcctcttcaacgtggtgtactggctgtactacgtgcactag

SEQ ID NO: 16230 - DNA, 1425 bp, Artificial Sequence
  derived and/or modified sequence
atgtggaccgtgcagaaccgggagagcctgggcctgctgagcttccctgtgatgatcacaatggtttgttgtgcccatagtactaacgagccttcaaatatgtcttacgtgaaagaaaccgtcgatagactgctaaaaggctatgacattcgtctccggcctgacttcggaggacctccagttgacgtgggaatgaggatagacgtagcatccatcgacatggtttcagaagtgaatatggactatactctaaccatgtactttcagcagtcttggaaggacaagcgactcagttattctgggatccccttgaatcttaccctcgacaatcgggtggccgatcagctgtgggtgcccgatacctattttttaaacgataagaaaagctttgttcacggcgtgaccgtcaaaaatcgcatgataaggcttcatccagacgggactgtgttgtatggattgagaatcacaacaaccgcggcatgcatgatggatctaagacgatatccactggatgagcagaactgcaccctggagatcgaatcatatggctatactaccgacgatatcgagttctattggaacggcggggaaggagctgttacgggcgtcaacaagattgaacttcctcagttttccatcgtggactataaaatggtgtctaagaaagtggagttcaccacaggcgcatacccgaggctcagtctgagcttccgactgaagaggaatatcggctacttcatcctgcagacttatatgcccagcacccttataaccatactatcttgggtttctttttggatcaattatgacgcgtctgcggcgcgcgtagctctcggaattaccaccgtgctcaccatgacaactataagtacccacctgcgggagacgctgcctaagattccttatgtgaaagctatagacatctatttaatgggatgttttgtcttcgtattccttgcactcctggagtacgcattcgtgaattatatctttttcggcaaggggccacagaagaaaggagcatccaaacaggatcagtcagcaaacgaaaaaaataagttggagatgaacaaggtgcaggtggacgctcatggcaacatcctcctgagcacactcgagatccggaacgagacctcaggatctgaagtgctgactagcgtaagtgatcctaaggccacaatgtacagctatgattccgcctctatccagtacaggaagcctctgtctagccgggaggcatacgggcgggccctcgatcgccacggcgttccaagtaagggaagaatcaggcggagagcgagtcaattaaaggtgaaaatccctgaccttaccgacgttaactccatcgacaagtggtccagaatgttcttcccgatcacatttagtctgttcaacgtggtgtactggctgtactacgtgcactag

SEQ ID NO: 16231 - DNA, 1425 bp, Artificial Sequence
  derived and/or modified sequence
atgtggacagtgcagaacagggagagtcttgggctcctgagttttcccgtgatgatcacgatggtgtgctgcgcacacagtaccaacgagccgagcaacatgtcgtacgtgaaagaaacagtcgatcgcctgctcaagggctacgacattcgactgagacctgatttcggcggacccccagttgacgttggaatgcgaattgatgtggcatctatcgatatggtgtcagaggtgaacatggattataccctgacaatgtacttccagcagtcctggaaagacaagagactgtcatattctggcattcctctaaatctcaccctggataatagagtggccgatcagctgtgggtcccggatacctatttcctcaatgacaagaaaagctttgtgcatggtgtgaccgttaaaaacaggatgattaggctgcatcctgatgggacagtgctgtacggactccggattacaacgaccgccgcatgcatgatggatctgcgtcgataccctctcgacgaacagaactgtacgctggaaatcgagtcgtatggatacactaccgacgatatcgaattttactggaacggcggtgaaggggctgtgacaggcgtcaataagatcgaactgcctcagttctctatcgtggattacaagatggtgagcaaaaaggttgagttcaccactggcgcatatcccagactcagtctcagctttaggctcaagcgcaacatcggatacttcattttacagacttatatgccgtccacattgatcaccattctctcctgggtgtcattctggatcaactacgacgcctcggctgctagagtagcactgggcattactacagtgctgactatgacgacaatcagcacacacttgcgcgagactctgcccaaaatcccttatgtgaaagccatagacatttacttaatgggctgtttcgtgttcgttttcctggcgctcctggaatacgcgtttgtgaattacatctttttcggcaagggcccacagaaaaaaggtgccagcaagcaggaccagagtgccaatgagaagaataagttggagatgaacaaggtccaagtcgacgctcatggcaacatcctgttgtctacacttgagattcgaaatgagactagtggatccgaggtgctgacctccgtgagcgacccaaaagccacaatgtactcatacgacagtgctagcattcagtatcgcaaacccctaagcagcagagaagcttatggccgtgcccttgatcggcatggggtgcccagtaaaggcagaatcaggagacgggcttctcaactgaaagttaagatccccgatctaacggatgttaacagcatcgataagtggagcaggatgttttttcccatcacattttctctgttcaatgttgtgtactggctgtattacgtgcactag

SEQ ID NO: 16232 - DNA, 1425 bp, Artificial Sequence
  derived and/or modified sequence
atgtggaccgtgcagaacagagagagcctgggcctgctgagcttccccgtgatgatcaccatggtgtgctgcgcccacagcaccaacgagcccagcaacatgagctacgtgaaggagaccgtggacagactgctgaagggctacgacatcagactgagacccgacttcggcggcccccccgtggacgtgggcatgagaatcgacgtggccagcatcgacatggtgagcgaggtgaacatggactacaccctgaccatgtacttccagcagagctggaaggacaagagactgagctacagcggcatccccctgaacctgaccctggacaacagagtggccgaccagctgtgggtgcccgacacctacttcctgaacgacaagaagagcttcgtgcacggcgtgaccgtgaagaacagaatgatcagactgcaccccgacggcaccgtgctgtacggcctgagaatcaccaccaccgccgcctgcatgatggacctgagaagataccccctggacgagcagaactgcaccctggagatcgagagctacggctacaccaccgacgacatcgagttctactggaacggcggcgagggcgccgtgaccggcgtgaacaagatcgagctgccccagttcagcatcgtggactacaagatggtgagcaagaaggtggagttcaccaccggcgcctaccccagactgagcctgagcttcagactgaagagaaacatcggctacttcatcctgcagacctacatgcccagcaccctgatcaccatcctgagctgggtgagcttctggatcaactacgacgccagcgccgccagagtggccctgggcatcaccaccgtgctgaccatgaccaccatcagcacccacctgagagagaccctgcccaagatcccctacgtgaaggccatcgacatctacctgatgggctgcttcgtgttcgtgttcctggccctgctggagtacgccttcgtgaactacatcttcttcggcaagggcccccagaagaagggcgccagcaagcaggaccagagcgccaacgagaagaacaagctggagatgaacaaggtgcaggtggacgcccacggcaacatcctgctgagcaccctggagatcagaaacgagaccagcggcagcgaggtgctgaccagcgtgagcgaccccaaggccaccatgtacagctacgacagcgccagcatccagtacagaaagcccctgagcagcagagaggcctacggcagagccctggacagacacggcgtgcccagcaagggcagaatcagaagaagagccagccagctgaaggtgaagatccccgacctgaccgacgtgaacagcatcgacaagtggagcagaatgttcttccccatcaccttcagcctgttcaacgtggtgtactggctgtactacgtgcactag

SEQ ID NO: 16233 - protein, 474 aa, Artificial Sequence
  derived and/or modified sequence
MWRVRKRGYFGIWSFPLIIAAVCAQSVNDPSNMSLVKETVDRLLKGYDIRLRPDFGGPPVAVGMNIDIASIDMVSEVNMDYTLTMYFQQAWRDKRLSYNVIPLNLTLDNRVADQLWVPDTYFLNDKKSFVHGVTVKNRMIRLHPDGTVLYGLRITTTAACMMDLRRYPLDEQNCTLEIESYGYTTDDIEFYWRGDDNAVTGVTKIELPQFSIVDYKLITKKVVFSTGSYPRLSLSFKLKRNIGYFILQTYMPSILITILSWVSFWINYDASAARVALGITTVLTMTTINTHLRETLPKIPYVKAIDMYLMGCFVFVFMALLEYALVNYIFFGRGPQRQKKAAEKAASANNEKMRLDVNKMDPHENILLSTLEIKNEMATSEAVMGLGDPRSTMLAYDASSIQYRKAGLPRHSFGRNALERHVAQKKSRLRRRASQLKITIPDLTDVNAIDRWSRIFFPVVFSFFNIVYWLYYVN

SEQ ID NO: 16234 - protein, 314 aa, Artificial Sequence
  derived and/or modified sequence
MMDLRRYPLDEQNCTLEIESYGYTTDDIEFYWRGDDNAVTGVTKIELPQFSIVDYKLITKKVVFSTGSYPRLSLSFKLKRNIGYFILQTYMPSILITILSWVSFWINYDASAARVALGITTVLTMTTINTHLRETLPKIPYVKAIDMYLMGCFVFVFMALLEYALVNYIFFGRGPQRQKKAAEKAASANNEKMRLDVNKMDPHENILLSTLEIKNEMATSEAVMGLGDPRSTMLAYDASSIQYRKAGLPRHSFGRNALERHVAQKKSRLRRRASQLKITIPDLTDVNAIDRWSRIFFPVVFSFFNIVYWLYYVN

SEQ ID NO: 16235 - protein, 411 aa, Artificial Sequence
  derived and/or modified sequence
MNIDIASIDMVSEVNMDYTLTMYFQQAWRDKRLSYNVIPLNLTLDNRVADQLWVPDTYFLNDKKSFVHGVTVKNRMIRLHPDGTVLYGLRITTTAACMMDLRRYPLDEQNCTLEIESYGYTTDDIEFYWRGDDNAVTGVTKIELPQFSIVDYKLITKKVVFSTGSYPRLSLSFKLKRNIGYFILQTYMPSILITILSWVSFWINYDASAARVALGITTVLTMTTINTHLRETLPKIPYVKAIDMYLMGCFVFVFMALLEYALVNYIFFGRGPQRQKKAAEKAASANNEKMRLDVNKMDPHENILLSTLEIKNEMATSEAVMGLGDPRSTMLAYDASSIQYRKAGLPRHSFGRNALERHVAQKKSRLRRRASQLKITIPDLTDVNAIDRWSRIFFPVVFSFFNIVYWLYYVN

SEQ ID NO: 16236 - DNA, 1963 bp, Artificial Sequence
  derived and/or modified sequence
accccaagcttgctgcctcctccgggtcccggcggccacggcgaggcggcctgagcttcaggaggaagggaagaggcagcctctgggtgtgcgagtcccctgggcgcggggaagggaagaagaggacgaggtggcgcggagaccgcgggagaacacagtgcctccggaggaaatctgctcggtccccggcagccgccgcttcccctttgatgttttggtacgccgtgcgcatgcgcctcacattagaattactgcactgggcagactaagttggatctcctctcttcagtgaaaccctcaattccatcaaaaactaaagggatgtggagagtgcggaaaaggggctactttgggatttggtccttccccttaataatcgccgctgtctgtgcgcagagtgtcaatgaccctagtaatatgtcgctggttaaagagacggtggatagactcctgaaaggctatgacattcgtctgagaccagattttggaggtccccccgtggctgtggggatgaacattgacattgccagcatcgatatggtttctgaagtcaatatggattataccttgacaatgtactttcaacaagcctggagagataagaggctgtcctataatgtaatacctttaaacttgactctggacaacagagtggcagaccagctctgggtgcctgatacctatttcctgaacgataagaagtcatttgtgcacggagtgactgttaagaaccgcatgattcgcctgcatcctgatggcaccgtcctttatggactcagaatcacaaccacagctgcctgcatgatggacctaaggaggtacccactggatgaacaaaactgcaccttggaaattgagagctatggatacacaactgatgacattgagttttactggcgtggcgatgataatgcagtaacaggagtaacgaaaattgaacttccacagttctctattgtagattacaaacttatcaccaagaaggttgttttttccacaggttcctatcccaggttatccctcagctttaagcttaagagaaacattggctactttatcctgcaaacatacatgccttccatcctgattaccatcctctcctgggtctccttctggattaattacgatgcttcagctgcaagggtggcattaggaatcacaactgtcctcacaatgaccacaatcaacacccacctccgggaaactctccctaaaatcccctatgtgaaggccattgacatgtacctgatggggtgctttgtcttcgttttcatggcccttctggaatatgccctagtcaactacatcttctttgggagggggccccaacgccaaaagaaagcagctgagaaggctgccagtgccaacaatgagaagatgcgcctggatgtcaacaagatggacccccatgagaacatcttactgagcactctcgagataaaaaatgaaatggccacatctgaggctgtgatgggacttggagaccccagaagcacaatgctagcctatgatgcctccagcatccagtatcggaaagctgggttgcccaggcatagttttggccgaaatgctctggaacgacatgtggcgcaaaagaaaagtcgcctgaggagacgcgcctcccaactgaaaatcaccatccctgacttgactgatgtgaatgccatagatcggtggtcccgcatattcttcccagtggttttttccttcttcaacatcgtctattggctttattatgtgaactaaaacatggcctcccactggaagcaaggactagattcctcctcaaaccagttgtacagcctgatgtaggacttggaaaacacatcaatccaggacaaaagtgacgctaaaataccttagttgctggcctatcctgtggtccatttcataccatttgggttgcttctgctaagtaatgaatacactaaggtccttgtggttttccagttaaaacgcaagt

SEQ ID NO: 16237 - DNA, 1349 bp, Artificial Sequence
  derived and/or modified sequence
aagttggatctcctctcttcagtgaaaccctcaattccatcaaaaactaaagggatgtggagagtgcggaaaaggggctactttgggatttggtccttccccttaataatcgccgctgtctgtgcgcagaggtccccccgtggctgtggggatgaacattgacattgccagcatcgatatggtttctgaagtcaatatgaatcacaaccacagctgcctgcatgatggacctaaggaggtacccactggatgaacaaaactgcaccttggaaattgagagctatggatacacaactgatgacattgagttttactggcgtggcgatgataatgcagtaacaggagtaacgaaaattgaacttccacagttctctattgtagattacaaacttatcaccaagaaggttgttttttccacaggttcctatcccaggttatccctcagctttaagcttaagagaaacattggctactttatcctgcaaacatacatgccttccatcctgattaccatcctctcctgggtctccttctggattaattacgatgcttcagctgcaagggtggcattaggaatcacaactgtcctcacaatgaccacaatcaacacccacctccgggaaactctccctaaaatcccctatgtgaaggccattgacatgtacctgatggggtgctttgtcttcgttttcatggcccttctggaatatgccctagtcaactacatcttctttgggagggggccccaacgccaaaagaaagcagctgagaaggctgccagtgccaacaatgagaagatgcgcctggatgtcaacaagatggacccccatgagaacatcttactgagcactctcgagataaaaaatgaaatggccacatctgaggctgtgatgggacttggagaccccagaagcacaatgctagcctatgatgcctccagcatccagtatcggaaagctgggttgcccaggcatagttttggccgaaatgctctggaacgacatgtggcgcaaaagaaaagtcgcctgaggagacgcgcctcccaactgaaaatcaccatccctgacttgactgatgtgaatgccatagatcggtggtcccgcatattcttcccagtggttttttccttcttcaacatcgtctattggctttattatgtgaactaaaacatggcctcccactggaagcaaggactagattcctcctcaaaccagttgtacagcctgatgtaggacttggaaaacacatcaatccaggacaaaagtgacgctaaaataccttagttgctggcctatcctgtggtccatttcataccatttgggttgcttctgctaagtaatgaatacact

SEQ ID NO: 16238 - DNA, 1779 bp, Artificial Sequence
  derived and/or modified sequence
gagtcccctgggcgcggggaagggaagaagaggacgaggtggcgcggagaccgcgggagaacacagtgcctccggaggaaatctgctcggtccccggcagccgccgcttcccctttgatgttttggtacgccgtgcgcatgcgcctcacattagaattactgcactgggcagactaagttggatctcctctcttcagtgaaaccctcaattccatcaaaaactaaagggatgtggagagtgcggaaaaggggctactttgggatttggtccttccccttaataatcgccgctgtctgtgcgcagaggtccccccgtggctgtggggatgaacattgacattgccagcatcgatatggtttctgaagtcaatatggattataccttgacaatgtactttcaacaagcctggagagataagaggctgtcctataatgtaatacctttaaacttgactctggacaacagagtggcagaccagctctgggtgcctgatacctatttcctgaacgataagaagtcatttgtgcacggagtgactgttaagaaccgcatgattcgcctgcatcctgatggcaccgtcctttatggactcagaatcacaaccacagctgcctgcatgatggacctaaggaggtacccactggatgaacaaaactgcaccttggaaattgagagctatggatacacaactgatgacattgagttttactggcgtggcgatgataatgcagtaacaggagtaacgaaaattgaacttccacagttctctattgtagattacaaacttatcaccaagaaggttgttttttccacaggttcctatcccaggttatccctcagctttaagcttaagagaaacattggctactttatcctgcaaacatacatgccttccatcctgattaccatcctctcctgggtctccttctggattaattacgatgcttcagctgcaagggtggcattaggaatcacaactgtcctcacaatgaccacaatcaacacccacctccgggaaactctccctaaaatcccctatgtgaaggccattgacatgtacctgatggggtgctttgtcttcgttttcatggcccttctggaatatgccctagtcaactacatcttctttgggagggggccccaacgccaaaagaaagcagctgagaaggctgccagtgccaacaatgagaagatgcgcctggatgtcaacaagatggacccccatgagaacatcttactgagcactctcgagataaaaaatgaaatggccacatctgaggctgtgatgggacttggagaccccagaagcacaatgctagcctatgatgcctccagcatccagtatcggaaagctgggttgcccaggcatagttttggccgaaatgctctggaacgacatgtggcgcaaaagaaaagtcgcctgaggagacgcgcctcccaactgaaaatcaccatccctgacttgactgatgtgaatgccatagatcggtggtcccgcatattcttcccagtggttttttccttcttcaacatcgtctattggctttattatgtgaactaaaacatggcctcccactggaagcaaggactagattcctcctcaaaccagttgtacagcctgatgtaggacttggaaaacacatcaatccaggacaaaagtgacgctaaaataccttagttgctggcctatcctgtggtccatttcataccatttgggttgcttctgctaagtaatgaatacactaaggtccttgtggttttccagttaaaacgcaagt

SEQ ID NO: 16239 - DNA, 1425 bp, Artificial Sequence
  derived and/or modified sequence
atgtggcgagtgagaaagcgtggttacttcgggatttggtcttttccacttataatcgcggccgtgtgtgcccagagcgtcaatgatccaagtaacatgagcctcgtgaaagagacggtggatcgtcttttgaaaggctatgacatcagactgcggccagacttcggtggtccaccagtcgctgttggaatgaacatcgatatcgctagcattgacatggtttctgaggttaatatggattacaccttgacaatgtacttccaacaggcctggcgcgacaagcgcttgtcctacaatgttatcccactcaatctgacactggataacagagtggccgaccagttatgggttccagatacctattttctgaatgacaagaagagtttcgtgcacggtgtgacagtcaagaacaggatgatccgcctccaccccgacggcacagtcctgtatgggttacggattacaactacggcggcctgtatgatggatctgcggcggtacccccttgacgaacagaattgtaccctggagattgaatcttacggatatacgacggacgatatcgagttctactggaggggtgatgacaatgctgtgaccggcgtgacgaaaatagagctgccgcaattctctattgtcgattacaagttgatcacaaagaaggtggtgttctctacagggtcatacccaagactgtcactctccttcaagctgaagcgcaatataggatacttcatcctacaaacttacatgccatctattctaataacaatcctgagctgggtctccttctggattaattacgatgcctccgctgctcgcgtcgcactggggattactactgttttgacgatgactaccattaatactcacctgcgtgagactctgccaaagatcccatacgttaaggcaatagatatgtacctgatgggctgcttcgtctttgtttttatggccctgttagagtatgcattagtgaattatatctttttcggcaggggtcctcagcggcagaagaaggccgctgagaaggccgcctcagctaacaatgagaaaatgcgtctcgatgtgaacaaaatggatccccatgagaacattctgctctcgacgctcgagattaaaaatgaaatggccacaagtgaggccgtgatggggctgggggacccgaggtcaactatgttggcctatgatgcttcctctattcagtaccgaaaggcgggactcccccggcactcgttcggtagaaatgccctagaacgccacgttgcccagaaaaagtctcgactgagacgcagggcatcccagttaaagattaccatacctgacttaacggatgtaaacgccatcgatcgatggagtcgaatttttttccctgttgtattcagcttttttaacatagtatactggctgtattatgttaattag

SEQ ID NO: 16240 - DNA, 2030 bp, Artificial Sequence
  derived and/or modified sequence
gcgcggggaagggaagaagaggacgaggtggcgcggagaccgcgggagaacacagtgcctccggaggtgaggggctcttcctcattttgcctgccttctagggaccgctccggcttcttgtatccagaggtacagcccctgaacagccgggagtccccgtcccctgtcccggacgaggggccgggggcgccagctccgcacgccgcgggagtgggcggcgagcgcgggcctgcgaggaaatctgctcggtccccggcagccgccgcttcccctttgatgttttggtacgccgtgcgcatgcgcctcacattagaattactgcactgggcagactaagttggatctcctctcttcagtgaaaccctcaattccatcaaaaactaaagggatgtggagagtgcggaaaaggggctactttgggatttggtccttccccttaataatcgccgctgtctgtgcgcagagtgtcaatgaccctagtaatatgtcgctggttaaagagacggtggatagactcctgaaaggctatgacattcgtctgagaccagattttggaggtccccccgtggctgtggggatgaacattgacattgccagcatcgatatggtttctgaagtcaatatggattataccttgacaatgtactttcaacaagcctggagagataagaggctgtcctataatgtaatacctttaaacttgactctggacaacagagtggcagaccagctctgggtgcctgatacctatttcctgaacgataagaagtcatttgtgcacggagtgactgttaagaaccgcatgattcgcctgcatcctgatggcaccgtcctttatggactcagaatcacaaccacagctgcctgcatgatggacctaaggaggtacccactggatgaacaaaactgcaccttggaaattgagagctatggatacacaactgatgacattgagttttactggcgtggcgatgataatgcagtaacaggagtaacgaaaattgaacttccacagttctctattgtagattacaaacttatcaccaagaaggttgttttttccacaggttcctatcccaggttatccctcagctttaagcttaagagaaacattggctactttatcctgcaaacatacatgccttccatcctgattaccatcctctcctgggtctccttctggattaattacgatgcttcagctgcaagggtggcattaggaatcacaactgtcctcacaatgaccacaatcaacacccacctccgggaaactctccctaaaatcccctatgtgaaggccattgacatgtacctgatggggtgctttgtcttcgttttcatggcccttctggaatatgccctagtcaactacatcttctttgggagggggccccaacgccaaaagaaagcagctgagaaggctgccagtgccaacaatgagaagatgcgcctggatgtcaacaagatggacccccatgagaacatcttactgagcactctcgagataaaaaatgaaatggccacatctgaggctgtgatgggacttggagaccccagaagcacaatgctagcctatgatgcctccagcatccagtatcggaaagctgggttgcccaggcatagttttggccgaaatgctctggaacgacatgtggcgcaaaagaaaagtcgcctgaggagacgcgcctcccaactgaaaatcaccatccctgacttgactgatgtgaatgccatagatcggtggtcccgcatattcttcccagtggttttttccttcttcaacatcgtctattggctttattatgtgaactaaaacatggcctcccactggaagcaaggactagattcctcctcaaaccagttgtacagcctgatgtaggacttggaaaacacatcaatccaggacaaaagtgacgctaaaataccttagttgctggcctatcctgtggtccatttcataccatttgggttgcttctgctaagtaatgaatacactaaggtccttgtggttttccagttaaaacgcaagt

SEQ ID NO: 16241 - DNA, 945 bp, Artificial Sequence
  derived and/or modified sequence
atgatggacctgcggagataccctctggacgaacagaactgcacgcttgaaattgagagttacgggtataccaccgatgacattgagttttattggagaggtgacgataacgcagttactggcgtaactaaaattgagcttccccagtttagtatcgtggattataagctgatcactaaaaaggtagtcttttccaccggcagctacccaagactgtccctcagttttaagttaaagcggaatataggttacttcatcctacagacatatatgccctccatcttgattacaattcttagttgggttagcttctggataaactatgatgcatcagccgcaagagtcgctcttggcattaccaccgtattaaccatgaccaccattaatacccacctcagggagactctgcctaagatcccatacgtgaaagctattgacatgtacctcatgggttgttttgtttttgtattcatggcgctgctggagtacgctctagtcaattatattttctttgggcgtggcccacagcgacaaaaaaaggctgctgagaaggctgccagcgccaacaacgagaagatgagactcgacgtgaacaagatggacccacacgagaacatattgctgagcaccctggaaatcaaaaatgagatggctacctctgaggcagtgatgggtctgggggatccccgtagtactatgctggcttacgacgcaagcagtattcaataccggaaagccggactgcccaggcactcattcggcaggaacgctttggaacggcacgtcgcccagaaaaaaagtcgtttgcggaggagggcaagtcaattgaagatcaccataccggacttaacagacgtcaatgccatcgaccgatggagcagaatctttttcccggtcgtattttcattttttaatattgtgtactggttgtattatgtgaactag

SEQ ID NO: 16242 - DNA, 1236 bp, Artificial Sequence
  derived and/or modified sequence
atgaatatcgacatagctagcatcgacatggtgagcgaagttaatatggactacacgctgaccatgtactttcagcaagcttggagggacaagagacttagctacaatgtaatccctctgaacctgacgctggacaaccgagtagctgaccagctgtgggtgcccgatacatactttcttaatgataagaaatcgttcgtacatggtgtgacggtaaaaaatcgaatgatccggctccaccctgacggcacggtgctgtatgggctgaggataaccacaactgcagcttgcatgatggatttgaggaggtacccccttgacgagcagaactgtacactggagatcgaatcctatggatatactacagatgacatcgagttttactggagaggcgacgacaacgctgttacaggcgtgacaaaaatcgaactgccacagtttagcattgtcgactataagctgattaccaagaaggtggtttttagcacaggatcttatcctcgcttatctttgagctttaagttaaaaagaaacatcggatattttatcctccaaacctacatgccaagcatcctgataactattctgagctgggtttcattctggattaattacgatgccagcgcagcccgggtggccttgggcatcaccactgttctgactatgactactattaacacacatctcagggagacactgccaaagattccttatgtaaaagctatcgatatgtacctgatgggctgttttgtgtttgtatttatggctttgctcgaatacgccctcgtgaattacattttttttgggcgggggccccagagacagaagaaagcagcagaaaaggcagcgtcggccaacaacgagaaaatgaggctggatgtcaataaaatggacccgcatgaaaacattctgctctctacactggagattaagaatgagatggccacctctgaagcggtgatgggattgggagacccacggtccacaatgctggcctatgatgcatccagcatccagtacaggaaggctggtctcccacgacactcttttggaaggaacgcactcgagagacacgtggctcaaaaaaaaagtcgtctgcgacggagagcatcacagttgaagatcacaatccctgatcttaccgacgttaacgctattgaccggtggtcccggatcttttttccagtggtcttcagtttctttaatatcgtgtactggctttattacgtcaactag

SEQ ID NO: 16243 - DNA, 1425 bp, Artificial Sequence
  derived and/or modified sequence
atgtggcgggtacggaagcgaggatatttcggcatctggtccttccctttaattattgccgcagtatgcgctcagagcgtgaacgaccctagcaacatgagcttggtaaaggagacagtggaccgcctccttaaggggtatgatattcgcctgcgccctgatttcggtggaccaccggtcgccgtggggatgaatatagacatcgccagcatcgacatggtctctgaagtcaacatggattacacacttactatgtacttccagcaggcttggcgcgacaaacgcttaagttacaatgtgatcccgcttaacctgactttggacaaccgcgtcgcggatcagttgtgggtccccgacacatacttcctcaatgacaaaaaaagtttcgtccacggcgtaaccgtaaagaaccgcatgatccgtcttcacccagatggaaccgtcctttatgggttgaggattaccactacagcagcctgcatgatggatcttcggcgctacccactcgacgaacagaactgcacactagagattgaaagctacgggtacactacagacgatatcgagttctactggcggggggatgataatgcagtaacaggcgttaccaaaattgaacttccacaattctccatagtggattacaagctgatcactaagaaagtggtgttttccacaggcagttatcctcgactatccttgtcgtttaagcttaagagaaatatcggatacttcatcttacagacatacatgccttcaatcctcatcacgattctgagttgggtctctttttggattaactatgacgcctctgcagctagggtagctctgggtatcaccaccgtgctcactatgacgactattaacacgcatttacgcgagacacttcctaagatcccatacgttaaagcaatcgacatgtacctgatggggtgttttgtcttcgtttttatggccctgttagagtacgctcttgtgaattatatctttttcggacgggggcctcagcgccagaaaaaggcagccgaaaaggcagccagtgccaataatgagaaaatgcggttggatgtgaacaagatggatccccacgagaacatcctgctgagtacccttgaaattaaaaatgaaatggcaacttccgaagccgtcatgggcctcggagacccacggtcaacaatgctggcttatgatgcttcttccatccagtatagaaaggcggggctgccacgacactccttcggacggaatgcgctggaacgacatgttgcacaaaagaaatctcgactcaggcgcagggccagtcaattgaagatcaccattccagacctgaccgacgtcaacgctattgataggtggagtaggattttttttcctgtcgtgttctcatttttcaacatcgtgtattggctatattatgtcaactag

SEQ ID NO: 16244 - DNA, 1425 bp, Artificial Sequence
  derived and/or modified sequence
atgtggagggtgaggaagaggggctacttcggcatctggagcttccccctcatcatcgctgctgtgtgtgcccagagcgtgaatgaccccagcaacatgagcctggtgaaggagaccgtggaccggctgctgaagggctatgacatccggctgcggccagactttggaggcccccctgtggccgtgggcatgaacatcgacatcgccagcattgacatggtgtctgaggtgaacatggactacaccctgaccatgtacttccagcaggcctggagggacaagaggctgagctacaacgtcatccccctgaacctgaccctggacaacagagtggccgaccagctgtgggtgcctgacacctacttcctgaatgacaagaagagctttgtgcatggagtgacagtgaagaacaggatgatccggctgcacccagatggcaccgtgctgtatggcctgcgcatcaccaccacagctgcctgcatgatggacctgcggcgctaccccctggatgagcagaactgcaccctggagattgagagctatggctacaccacagatgacatcgagttctactggagaggagatgacaatgctgtgactggagtgaccaagattgagctgccccagttcagcatcgtggactacaagctgatcaccaagaaggtggtgttcagcacaggcagctacccccggctgagcctgtccttcaagctgaagaggaacatcggctacttcatcctgcagacctacatgcccagcatcctgatcaccatcctgtcctgggtgtccttctggatcaactatgatgccagcgctgcccgggtggccctgggcatcaccaccgtgctgaccatgaccaccatcaacacccacctgcgggagaccctgcccaagatcccctacgtgaaggccatcgacatgtacctgatgggctgctttgtgtttgtgttcatggccctgctggagtatgccctggtgaactacatcttcttcggccggggcccccagaggcagaagaaggctgctgagaaggccgccagcgccaacaatgagaagatgaggctggatgtgaacaagatggacccccatgagaacatcctgctgagcaccctggagatcaagaatgagatggccaccagcgaggccgtgatgggcctgggggaccccaggagcaccatgctggcctatgatgccagcagcatccagtacaggaaggccggcctgcccaggcacagctttggaagaaatgccctggagagacatgtggcccagaagaagagccggctgcggcggcgggccagccagctgaagatcaccatcccagacctgacagatgtgaatgccatcgaccgctggagccgcatcttcttccctgtggtgttctccttcttcaacatcgtgtactggctgtactacgtgaactag

SEQ ID NO: 16245 - DNA, 945 bp, Artificial Sequence
  derived and/or modified sequence
atgatggacctgcggcgctaccccctggatgagcagaactgcaccctggagattgagagctatggctacaccacagatgacatcgagttctactggagaggagatgacaatgctgtgactggagtgaccaagattgagctgccccagttcagcatcgtggactacaagctgatcaccaagaaggtggtgttcagcacaggcagctacccccggctgagcctgtccttcaagctgaagaggaacatcggctacttcatcctgcagacctacatgcccagcatcctgatcaccatcctgtcctgggtgtccttctggatcaactatgatgccagcgctgcccgggtggccctgggcatcaccaccgtgctgaccatgaccaccatcaacacccacctgcgggagaccctgcccaagatcccctacgtgaaggccatcgacatgtacctgatgggctgctttgtgtttgtgttcatggccctgctggagtatgccctggtgaactacatcttcttcggccggggcccccagaggcagaagaaggctgctgagaaggccgccagcgccaacaatgagaagatgaggctggatgtgaacaagatggacccccatgagaacatcctgctgagcaccctggagatcaagaatgagatggccaccagcgaggccgtgatgggcctgggggaccccaggagcaccatgctggcctatgatgccagcagcatccagtacaggaaggccggcctgcccaggcacagctttggaagaaatgccctggagagacatgtggcccagaagaagagccggctgcggcggcgggccagccagctgaagatcaccatcccagacctgacagatgtgaatgccatcgaccgctggagccgcatcttcttccctgtggtgttctccttcttcaacatcgtgtactggctgtactacgtgaactag

SEQ ID NO: 16246 - DNA, 1236 bp, Artificial Sequence
  derived and/or modified sequence
atgaacattgatattgccagcattgacatggtgtctgaggtgaacatggactacaccctgaccatgtacttccagcaggcctggagggacaagaggctgagctacaacgtcatccccctgaacctgaccctggacaacagagtggccgaccagctgtgggtgcctgacacctacttcctgaatgacaagaagagctttgtgcacggcgtgacagtgaagaacaggatgatccggctgcacccagatggcaccgtgctgtatggcctgcgcatcaccaccacagctgcctgcatgatggacctgcggcgctaccccctggatgagcagaactgcaccctggagattgagagctatggctacaccacagatgacatcgagttctactggagaggagatgacaatgctgtgactggagtgaccaagattgagctgccccagttcagcatcgtggactacaagctgatcaccaagaaggtggtgttcagcacaggcagctacccccggctgagcctgtccttcaagctgaagagaaatattggctacttcatcctgcagacctacatgcccagcatcctgatcaccatcctgtcctgggtgtccttctggatcaactatgatgccagcgctgcccgggtggccctgggcatcaccaccgtgctgaccatgaccaccatcaacacccacctgcgggagaccctgcccaagatcccctacgtgaaggccatcgacatgtacctgatgggctgctttgtgtttgtgttcatggccctgctggagtatgccctggtgaactacatcttcttcggccggggcccccagaggcagaagaaggctgctgagaaggccgccagcgccaacaatgagaagatgaggctggatgtgaacaagatggacccccatgagaacatcctgctgagcaccctggagatcaagaatgagatggccaccagcgaggccgtgatgggcctgggggaccccaggagcaccatgctggcctatgatgccagcagcatccagtacaggaaggccggcctgcccaggcacagctttggaagaaatgccctggagcggcacgtggcccagaagaagagccggctgcggcggcgggccagccagctgaagatcaccatcccagacctgacagatgtgaatgccatcgaccgctggagccgcatcttcttccctgtggtgttctccttcttcaacatcgtgtactggctgtactacgtgaactag

SEQ ID NO: 16247 - DNA, 1425 bp, Artificial Sequence
  derived and/or modified sequence
atgtggcgggtgcggaagcggggctacttcggcatctggagcttcccactgatcatcgcggcagtctgcgctcagagcgtcaacgacccgtcaaatatgagtctggtcaaggaaaccgtagatagacttctgaaaggctacgatatccgacttcgcccagatttcggcggcccaccagttgccgtggggatgaacattgatattgcttctattgacatggtaagcgaggtcaatatggattatacccttaccatgtattttcagcaggcatggcgcgacaagcggttgtcctacaacgtgataccactgaatttgacgctggacaacagagtggctgaccagttgtgggtcccagacacttacttcttgaacgataaaaaaagtttcgtccatggcgtaactgttaagaaccgcatgataagactccatccagacgggaccgtcctgtacgggcttcggattaccacaaccgctgcttgtatgatggatctccggcggtacccactcgacgagcaaaattgtaccctggagatcgaatcttatggatacaccacagacgatattgaattctattggaggggagatgacaatgccgttactggagttaccaaaatcgagctgccccagttcagcatcgtggactacaagcttatcaccaagaaggtcgtgttcagcaccggatcatacccccgtctgtcgctgagtttcaagctgaaaaggaatattggctattttatcctccagacatatatgccaagtattcttatcaccattttatcttgggtatctttttggatcaattacgacgccagcgccgctagagtggccctcgggataactacagttctgacaatgaccacaattaatacccatctccgggagactcttcctaagattccttatgtaaaggcgatagacatgtacctcatgggctgcttcgtattcgtcttcatggcgctcctggagtacgcacttgtgaattatatatttttcgggaggggtccacaacgacaaaaaaaagcggccgagaaggctgcctcagcaaacaatgaaaaaatgagactggatgtgaacaagatggacccccacgagaacatacttctgtccaccctcgagatcaagaatgagatggccacatcggaggcggtcatgggcctgggcgatcctcggtcaactatgctcgcctatgatgctagttccatccagtacaggaaggccggccttcctagacattctttcgggagaaacgcgttggaaaggcacgttgcccaaaagaaatcaaggctccggaggagagcttcccagctcaagatcaccattcctgacctgaccgacgtgaatgctattgatagatggagtcgaatcttctttcccgttgtgttctctttttttaatatcgtttattggctgtattacgtcaactag

SEQ ID NO: 16248 - DNA, 945 bp, Artificial Sequence
  derived and/or modified sequence
atgatggacctgcggcggtaccccctggacgagcagaactgcaccctagagatagaaagttacggatataccacagatgacattgagttttactggcgaggggacgacaatgcggtcaccggcgtgacaaaaatcgagctgcctcaattcagtattgtcgactacaaacttattacgaagaaagtggtattttctacaggttcttaccccagattgtctctcagttttaagctgaagagaaacattgggtattttattctccagacctacatgccctcaattctcatcacgatattaagttgggtttccttctggatcaattatgatgctagcgccgccagggtagccctcggcattacaacggtcctgacaatgacgactatcaatacacacctcagggagactctgcccaagattccttacgttaaggctatcgatatgtatctgatgggttgttttgtgttcgttttcatggccctgctcgagtacgctcttgtgaactatatattttttggccgcggccctcagaggcagaagaaggctgccgagaaagccgcatctgcaaacaatgagaagatgcgccttgatgttaacaagatggaccctcacgaaaatatcctcctgagcactcttgagatcaaaaacgagatggcaacgagtgaagcagtgatggggctgggggacccaaggtctacaatgctggcatatgacgcttcttccatccaatataggaaggccgggcttccccggcatagctttggccgcaatgcactcgagagacacgtggcccagaagaaatcaagactacgcagaagagcttctcaactgaaaatcaccattcccgatcttaccgacgtgaacgctatcgatcgctggtctagaatcttctttccagtggtgttcagtttctttaacatcgtatactggttgtattatgtgaactag

SEQ ID NO: 16249 - DNA, 1236 bp, Artificial Sequence
  derived and/or modified sequence
atgaacatcgacatcgccagcatcgacatggtgagcgaggtgaacatggactataccctgacaatgtactttcagcaggcatggcgcgacaaaagactgtcctacaatgtgattcctcttaatcttactctggacaatagagtagctgatcagctttgggtccctgatacgtacttcttgaatgacaagaaatcatttgttcacggcgttacagtgaagaacagaatgatcagactgcaccctgacgggacagtgctgtacggtcttagaattaccacgactgccgcctgtatgatggatttgaggcgctatcccctggatgagcagaattgtacgcttgagattgaatcatacggctacactacagatgacatcgaattctactggcggggagacgataatgcagtgacaggcgtcactaagattgaactgccacaattttctatagtcgactacaagttaattaccaagaaggtcgtgttctcaaccggttcttacccaaggttgtctctttccttcaaattgaaaagaaacataggctacttcattctccagacgtatatgccctccattttgatcaccattctcagctgggtatctttttggattaattatgatgccagtgcagcccgcgttgccctcggcatcaccacagtgttaacgatgaccactatcaacacacacttacgtgagactttgccaaagattccctatgttaaggccatagacatgtacctgatgggctgtttcgtgtttgtgtttatggccctgctggaatatgctctagttaattatattttcttcggccggggacctcagagacagaagaaagccgccgagaaagctgcctctgctaataacgagaaaatgcgcctggacgtgaataagatggaccctcacgagaacatcctgcttagcaccctggagattaaaaatgagatggccacaagcgaggcagttatgggtcttggcgaccctcggagcactatgctcgcatacgatgcgtcaagcattcaataccgcaaagccggcttgccacgacactcttttggtcggaatgctttagagcgccacgtagcacagaagaagtctaggctccgtcgaagagcgtcacaactgaaaatcactatcccagaccttaccgacgtgaacgccatcgatcggtggtcacgaatcttttttccggttgtgttcagtttttttaacatagtgtattggttgtattacgtaaattag

SEQ ID NO: 16250 - DNA, 1425 bp, Artificial Sequence
  derived and/or modified sequence
atgtggcgggtgcggaagcggggctacttcggcatctggagcttcccactaatcattgccgcggtttgtgctcagtccgtgaacgaccccagcaatatgagcctcgtgaaggaaacagttgacaggctcctgaaaggctatgatatccggctgcgaccagactttggggggccacctgtggcagtgggcatgaatatcgatatagccagcatcgatatggtttccgaagtgaacatggattacacactgactatgtatttccagcaggcctggcgggacaagaggctgtcatacaatgtcatacctctgaacttaacgctcgataacagggttgccgaccaactttgggtgcccgacacatactttctcaacgacaagaagagctttgtgcatggcgttactgtgaagaatcggatgattcggctgcaccctgacggaactgttctttacgggctgaggatcactaccactgctgcctgcatgatggatttgcgccgatatccactggacgagcagaactgcacactggagatagagtcatatgggtacactaccgacgatatcgaattttactggagaggtgatgataacgctgtaaccggggtcactaaaattgaacttccccagttttccatcgtcgattacaagctcattactaaaaaagtggtctttagcactgggtcttatccacgcctttcactcagcttcaaacttaaacgcaatatcggttacttcattctgcagacatacatgcctagcatcttaataaccattctgagttgggtgtccttttggataaactatgacgcgagcgctgcccgtgtggcactgggaatcaccacagttcttaccatgaccaccatcaatacgcacctgcgggaaacacttccaaaaatcccttatgtcaaagccatagacatgtatcttatgggttgtttcgtgtttgtgttcatggcactgctggaatacgccttggtcaattacattttctttggacggggtccgcagaggcaaaaaaaggcagccgagaaggcagccagcgcaaataacgagaaaatgagactcgacgtgaacaagatggatccccatgagaacatcctgctgagcaccctggagatcaagaatgagatggccacttccgaggcagtgatgggactcggagatcctcggtctactatgctcgcttatgacgctagctctatccagtacagaaaggccggcctaccccgccactctttcggaagaaacgctctagagcggcatgtggctcagaagaagtcacggctgcgtcgcagagcctcgcagctgaaaattacaatccctgatttgacagatgttaatgccattgacaggtggtcaaggatattctttcctgtcgtgttttcgttctttaacatagtgtattggctctattatgtgaactag

SEQ ID NO: 16251 - DNA, 1425 bp, Artificial Sequence
  derived and/or modified sequence
atgtggcgagtgaggaagaggggctacttcgggatctggagctttccgctcatcatcgcggcagtttgcgctcagtccgtcaacgacccttccaacatgagtctagtgaaggagactgtcgatcgattactgaaaggatacgatatcaggcttagacctgacttcggtggtccacccgtggctgttgggatgaacatcgacatcgcctccatcgatatggtatccgaggtcaacatggactacactttgaccatgtactttcagcaggcatggcgggacaagcgtctttcatataatgtgatccctttgaatctgaccttggataacagggtggctgaccagctgtgggtgccagatacctatttcctaaatgacaagaagtcatttgttcacggggtcaccgtgaaaaatcgcatgatacggctccatcctgacggcaccgtcctctatggactccggatcaccacaaccgcagcatgtatgatggacctgcgcagatatcccttagatgaacagaattgcacgttggagatcgaatcttatggctatacgacagacgacatagagttttactggaggggagatgataacgcagtaacaggggtgaccaaaattgaactcccccagtttagcatagtagactacaaactaatcaccaaaaaggtcgtgttttccacgggaagctaccctcgcctgagcctatcctttaaacttaagcgcaatatcggctactttatcttacagacgtacatgccctctatcttaatcactatcctgagctgggtatcattttggattaattacgacgccagcgccgctagggtggcccttggaatcacgactgttctgacgatgactacaatcaatacccatttaagggagacattgcctaagatcccgtatgtgaaggccatagatatgtatctcatgggctgttttgtgttcgtgtttatggctctgcttgagtacgccctcgtaaattatatcttttttggccgaggtccccagcgtcagaagaaggcggcagagaaagcagcaagtgccaacaatgagaaaatgcgcctggacgttaacaagatggaccctcacgaaaacatcctgctgtccacactcgagatcaagaatgagatggccactagcgaggccgttatgggcctaggcgacccacgttccaccatgttagcatatgatgccagttcaatacagtaccgcaaagcaggtttgccccgacacagtttcggcagaaatgccctggagcgacacgtagcacagaaaaaatccagactgcggaggcgcgcaagccagctaaagatcacaatcccagatctgacggacgtcaatgcaatcgaccggtggtctagaatattcttccctgtggtattttcctttttcaacattgtctactggctctactatgtcaattag

SEQ ID NO: 16252 - DNA, 945 bp, Artificial Sequence
  derived and/or modified sequence
atgatggaccttcgccgttatcctctggatgaacagaattgcaccctcgagatcgaatcgtatggttacacaactgacgacatcgaattttactggaggggagacgacaacgccgtaaccggcgtgacgaagatagaactgccccagttcagcatcgtcgattataaattaattaccaagaaggtggtgttcagtacagggtcctatcccaggctgtctttgagttttaaactgaaaagaaatatcggctacttcatcttgcagacgtacatgcccagcatcttgattacaattctgtcatgggtgagtttttggattaattatgatgccagtgccgcacgcgtggcactgggaattacgacggtcctaacaatgaccactattaatacccatcttagggagacccttccaaagattccctacgtcaaagccattgatatgtatctgatgggatgcttcgtgttcgtgttcatggccctcctcgagtacgctctggtcaactatatcttctttgggagaggaccacaaaggcagaagaaagcagccgagaaagcggcttcggcaaataatgagaaaatgcgtctggatgtaaataagatggacccacacgaaaatatattgctctccaccttagaaatcaaaaatgaaatggctacaagcgaggcagttatggggttgggggaccctcgcagcacaatgcttgcctacgacgctagttctattcaataccgcaaggcagggctgcccagacacagttttggcaggaatgcactggagcgacacgtcgcacagaagaaatcacggctgcgacgacgggcatcccagctcaaaattacaatacccgaccttactgacgtaaatgccatcgatcgctggtcccgaattttcttcccggtcgtgttttctttctttaacattgtgtactggctatattacgtaaactag

SEQ ID NO: 16253 - DNA, 1236 bp, Artificial Sequence
  derived and/or modified sequence
atgaatatagacatcgccagcatagacatggtatcggaggtaaatatggattacacactcactatgtattttcaacaggcatggcgagacaagcggctgtcctacaacgtgattccgttgaatctgaccctggacaatcgggtcgccgatcagctctgggtccctgatacctatttcctgaacgacaaaaagagcttcgtgcacggggttaccgtgaaaaatcgaatgatccggcttcatcctgacggaactgtactgtatggactgaggatcactacaacagccgcatgtatgatggacctccggagatatccattggatgagcagaactgcaccttggaaatcgagtcctatggctatacgactgatgatatcgaattctactggcggggtgatgataacgcggtgaccggggttaccaagatcgagttaccacagttttcgatcgtcgactataagctgatcaccaagaaggtagtgtttagcacagggagttacccacgcttgtccctatctttcaaactcaaaagaaacatcggctacttcattttgcagacatacatgccttcgatcctgatcacgatcctgagctgggtgagtttttggatcaactatgacgcatccgctgctcgtgtggcactaggaatcactaccgttctcacaatgaccaccataaacactcatttgcgcgagacgctgccaaagattccttacgtgaaagctatcgatatgtatctgatggggtgcttcgttttcgtctttatggcactgctggaatacgcactggttaattatatctttttcggcagagggccacaaagacaaaagaaagcagccgagaaagcagcaagcgcaaataacgagaagatgcgtctggacgtgaacaagatggatccccacgagaatatactgcttagcacccttgaaatcaaaaacgaaatggcgacctcggaggcagtgatgggactaggcgaccctcgcagcaccatgctggcctacgacgcctcaagcatacagtacaggaaggccggtctgcctcgacattctttcggacgcaatgcgttagagcgccatgtggcacagaagaaatcccggctgcggagacgggcttcgcaattgaagatcacaattcccgacttaacagacgttaatgcgattgatcgatggtcccgtatttttttccccgttgttttttcatttttcaatattgtctactggttatattacgtcaactag

SEQ ID NO: 16254 - DNA, 1425 bp, Artificial Sequence
  derived and/or modified sequence
atgtggcgggtccgcaaaaggggttacttcgggatttggagttttccattgattattgctgccgtctgtgcacagtcagtgaatgacccctctaatatgtcgttggtcaaggagactgtggaccgactgctcaaagggtacgacatacgcctgagacccgattttggcggtccccctgtcgcagtcgggatgaacatcgacatcgctagtatcgacatggtatccgaagtgaacatggattacaccctgacaatgtacttccagcaggcatggagagataagaggctctcctacaacgttatacccctgaacctcacactcgataatagggtggccgatcagctgtgggtacccgacacctatttcctgaacgacaagaagtcattcgttcacggcgtcactgtaaaaaacaggatgatccggttgcatccagatggaacagtgctgtatggcttaagaataacaaccactgctgcatgcatgatggacttaaggaggtacccgttggacgaacagaactgcaccctcgaaattgagtcgtatggatacacaacagacgatatcgaattttattggcggggtgatgacaacgcagtgacaggtgttaccaagattgagttaccccagttcagcattgtcgactataaattaatcactaagaaagtggttttctcaactgggtcctacccccgactaagtctgagcttcaagctgaaacggaacattggctactttattctgcaaacctatatgccttctatcctgataaccatcctaagctgggtatccttctggatcaattatgatgcatccgccgcaagagtggctctgggcataacgactgtgcttacgatgactaccattaatacgcacctgagagagacacttcctaaaatcccttacgtgaaggcgatcgatatgtacctgatgggctgcttcgtgttcgttttcatggccctgctggaatatgcactggtcaactatatattctttggccgtggacctcaacggcaaaagaaggccgctgaaaaagcagcgtccgcaaacaacgagaaaatgaggctcgatgttaataagatggacccacatgagaatatcctgttgtctacattggagattaaaaacgaaatggcaacctcagaggccgtcatggggctcggtgatccccgatccactatgctagcctatgatgcttcatccattcagtaccggaaggctggcctgccccgtcactcctttggcaggaacgcactggagaggcatgtcgcacagaagaagagcaggctgcgaaggcgagctagtcaactgaagattaccatccctgacctaaccgacgtgaacgcaattgaccgatggtctcggatttttttccccgtggttttcagctttttcaacattgtctactggctgtactatgtaaactag

SEQ ID NO: 16255 - DNA, 1425 bp, Artificial Sequence
  derived and/or modified sequence
atgtggagagtgagaaagagaggctacttcggcatctggagcttccccctgatcatcgccgccgtgtgcgcccagagcgtgaacgaccccagcaacatgagcctggtgaaggagaccgtggacagactgctgaagggctacgacatcagactgagacccgacttcggcggcccccccgtggccgtgggcatgaacatcgacatcgccagcatcgacatggtgagcgaggtgaacatggactacaccctgaccatgtacttccagcaggcctggagagacaagagactgagctacaacgtgatccccctgaacctgaccctggacaacagagtggccgaccagctgtgggtgcccgacacctacttcctgaacgacaagaagagcttcgtgcacggcgtgaccgtgaagaacagaatgatcagactgcaccccgacggcaccgtgctgtacggcctgagaatcaccaccaccgccgcctgcatgatggacctgagaagataccccctggacgagcagaactgcaccctggagatcgagagctacggctacaccaccgacgacatcgagttctactggagaggcgacgacaacgccgtgaccggcgtgaccaagatcgagctgccccagttcagcatcgtggactacaagctgatcaccaagaaggtggtgttcagcaccggcagctaccccagactgagcctgagcttcaagctgaagagaaacatcggctacttcatcctgcagacctacatgcccagcatcctgatcaccatcctgagctgggtgagcttctggatcaactacgacgccagcgccgccagagtggccctgggcatcaccaccgtgctgaccatgaccaccatcaacacccacctgagagagaccctgcccaagatcccctacgtgaaggccatcgacatgtacctgatgggctgcttcgtgttcgtgttcatggccctgctggagtacgccctggtgaactacatcttcttcggcagaggcccccagagacagaagaaggccgccgagaaggccgccagcgccaacaacgagaagatgagactggacgtgaacaagatggacccccacgagaacatcctgctgagcaccctggagatcaagaacgagatggccaccagcgaggccgtgatgggcctgggcgaccccagaagcaccatgctggcctacgacgccagcagcatccagtacagaaaggccggcctgcccagacacagcttcggcagaaacgccctggagagacacgtggcccagaagaagagcagactgagaagaagagccagccagctgaagatcaccatccccgacctgaccgacgtgaacgccatcgacagatggagcagaatcttcttccccgtggtgttcagcttcttcaacatcgtgtactggctgtactacgtgaactag

SEQ ID NO: 16256 - DNA, 945 bp, Artificial Sequence
  derived and/or modified sequence
atgatggacctgagaagataccccctggacgagcagaactgcaccctggagatcgagagctacggctacaccaccgacgacatcgagttctactggagaggcgacgacaacgccgtgaccggcgtgaccaagatcgagctgccccagttcagcatcgtggactacaagctgatcaccaagaaggtggtgttcagcaccggcagctaccccagactgagcctgagcttcaagctgaagagaaacatcggctacttcatcctgcagacctacatgcccagcatcctgatcaccatcctgagctgggtgagcttctggatcaactacgacgccagcgccgccagagtggccctgggcatcaccaccgtgctgaccatgaccaccatcaacacccacctgagagagaccctgcccaagatcccctacgtgaaggccatcgacatgtacctgatgggctgcttcgtgttcgtgttcatggccctgctggagtacgccctggtgaactacatcttcttcggcagaggcccccagagacagaagaaggccgccgagaaggccgccagcgccaacaacgagaagatgagactggacgtgaacaagatggacccccacgagaacatcctgctgagcaccctggagatcaagaacgagatggccaccagcgaggccgtgatgggcctgggcgaccccagaagcaccatgctggcctacgacgccagcagcatccagtacagaaaggccggcctgcccagacacagcttcggcagaaacgccctggagagacacgtggcccagaagaagagcagactgagaagaagagccagccagctgaagatcaccatccccgacctgaccgacgtgaacgccatcgacagatggagcagaatcttcttccccgtggtgttcagcttcttcaacatcgtgtactggctgtactacgtgaactag

SEQ ID NO: 16257 - DNA, 1236 bp, Artificial Sequence
  derived and/or modified sequence
atgaacatcgacatcgccagcatcgacatggtgagcgaggtgaacatggactacaccctgaccatgtacttccagcaggcctggagagacaagagactgagctacaacgtgatccccctgaacctgaccctggacaacagagtggccgaccagctgtgggtgcccgacacctacttcctgaacgacaagaagagcttcgtgcacggcgtgaccgtgaagaacagaatgatcagactgcaccccgacggcaccgtgctgtacggcctgagaatcaccaccaccgccgcctgcatgatggacctgagaagataccccctggacgagcagaactgcaccctggagatcgagagctacggctacaccaccgacgacatcgagttctactggagaggcgacgacaacgccgtgaccggcgtgaccaagatcgagctgccccagttcagcatcgtggactacaagctgatcaccaagaaggtggtgttcagcaccggcagctaccccagactgagcctgagcttcaagctgaagagaaacatcggctacttcatcctgcagacctacatgcccagcatcctgatcaccatcctgagctgggtgagcttctggatcaactacgacgccagcgccgccagagtggccctgggcatcaccaccgtgctgaccatgaccaccatcaacacccacctgagagagaccctgcccaagatcccctacgtgaaggccatcgacatgtacctgatgggctgcttcgtgttcgtgttcatggccctgctggagtacgccctggtgaactacatcttcttcggcagaggcccccagagacagaagaaggccgccgagaaggccgccagcgccaacaacgagaagatgagactggacgtgaacaagatggacccccacgagaacatcctgctgagcaccctggagatcaagaacgagatggccaccagcgaggccgtgatgggcctgggcgaccccagaagcaccatgctggcctacgacgccagcagcatccagtacagaaaggccggcctgcccagacacagcttcggcagaaacgccctggagagacacgtggcccagaagaagagcagactgagaagaagagccagccagctgaagatcaccatccccgacctgaccgacgtgaacgccatcgacagatggagcagaatcttcttccccgtggtgttcagcttcttcaacatcgtgtactggctgtactacgtgaactag

SEQ ID NO: 16258 - protein, 473 aa, Artificial Sequence [sequence omitted]

SEQ ID NO: 16259 - DNA, 1422 bp, Artificial Sequence
  derived and/or modified sequence
atgtgggggctggctggcgggagattgtttggcattttttccgctcccgtcttagtcgccgtggtatgctgtgcacagtctgttaatgatcctgggaatatgtccttcgtcaaggagacagttgacaagctcctcaaaggttatgatatcaggctgagacccgatttcggtggaccacccgtatgtgtcggcatgaacattgatattgcgagtatcgatatggtctcggaggtgaacatggactacaccctcacgatgtatttccagcagtactggcgcgataaaagattggcctactccggaatcccactcaacctgacactcgacaaccgcgtagccgatcagctatgggtgccggacacttatttcctaaacgacaaaaaatcctttgtccatggggtcacggtgaaaaaccggatgatcaggctgcatcccgacgggactgtgctgtacggccttcggataacaacaaccgcagcatgcatgatggacttacggcgctatcccctggatgaacagaactgcacgcttgaaatagagtcctatggctacacaactgatgacatcgagttctattggcgcgggggcgacaaggcagttactggagtagaacgcattgagctgccacagttttctattgtggaacaccggctcgtgtccaggaacgtcgtgtttgcgactggcgcttatccccgactgtcactgtctttccgactaaaaaggaacataggttactttattctgcaaacatacatgccttcgatactcatcacaattcttagctgggtgagcttctggattaattacgatgccagtgctgctagagtagccctggggatcacaaccgtcctgacgatgacaaccattaacacgcacttgcgcgagaccctacctaagattccctacgttaaagctatcgacatgtacctgatgggttgtttcgtcttcgtcttcctcgccctattagaatatgcgttcgttaattacatattcttcggacgggggccacaacgacagaagaaactcgcagaaaagacagcgaaggctaaaaatgatagaagcaaaagcgagtccaacagagttgatgcccacggcaatatcctgctgactagcctggaagtacacaacgagatgaacgaagtatctgggggcatcggagatacacggaattctgccatctcctttgacaacagtggcattcaataccggaaacagtcgatgccccgcgaaggacatggcaggttcctcggcgaccgttccctgcctcacaagaagacgcatctccggcgcaggtcctcacagctaaagattaagatccccgatctgacagacgtcaatgccatcgacagatggagccggatagtattcccctttaccttctctctgttcaacttagtctattggctgtattatgtgaattag

SEQ ID NO: 16260 - DNA, 5781 bp, Artificial Sequence
  derived and/or modified sequence
tccgggccagcgcggcggcggcggcggcggcggcagcagcaggagcagccccggctgcgggtcgcgacggcggcggggcgccccctcccccgtgccggggcgcggcggagggatgtggggccttgcgggaggaaggcttttcggcatcttctcggccccggtgctggtggctgtggtgtgctgcgcccagagtgtgaacgatcccgggaacatgtcctttgtgaaggagacggtggacaagctgttgaaaggctacgacattcgcctaagacccgacttcgggggtcccccggtctgcgtggggatgaacatcgacatcgccagcatcgacatggtttccgaagtcaacatggattataccttaaccatgtattttcaacaatattggagagataaaaggctcgcctattctgggatccctctcaacctcacgcttgacaatcgagtggctgaccagctatgggtgcccgacacatatttcttaaatgacaaaaagtcatttgtgcatggagtgacagtgaaaaaccgcatgatccgtcttcaccctgatgggacagtgctgtatgggctcagaatcaccacgacagcagcatgcatgatggacctcaggagataccccctggacgagcagaactgcactctggaaattgaaagctatggctacaccacggatgacattgagttttactggcgaggcggggacaaggctgttaccggagtggaaaggattgagctcccgcagttctccatcgtggagcaccgtctggtctcgaggaatgttgtcttcgccacaggtgcctatcctcgactgtcactgagctttcggttgaagaggaacattggatacttcattcttcagacttatatgccctctatactgataacgattctgtcgtgggtgtccttctggatcaattatgatgcatctgctgctagagttgccctcgggatcacaactgtgctgacaatgacaaccatcaacacccaccttcgggagaccttgcccaaaatcccctatgtcaaagccattgacatgtaccttatgggctgcttcgtctttgtgttcctggcccttctggagtatgcctttgtcaactacattttctttggaagaggccctcaaaggcagaagaagcttgcagaaaagacagccaaggcaaagaatgaccgttcaaagagcgaaagcaaccgggtggatgctcatggaaatattctgttgacatcgctggaagttcacaatgaaatgaatgaggtctcaggcggcattggcgataccaggaattcagcaatatcctttgacaactcaggaatccagtacaggaaacagagcatgcctcgagaagggcatgggcgattcctgggggacagaagcctcccgcacaagaagacccatctacggaggaggtcttcacagctcaaaattaaaatacctgatctaaccgatgtgaatgccatagacagatggtccaggatcgtgtttccattcactttttctcttttcaacttagtttactggctgtactatgttaactgagtgactgtacttgatttttcaaagacttcatttaacactgagtgaaatattactctgcctgtcaagtttttatacctgtacacacacagacacacaagcagacacacacatatatacatacgcaattgtatatatatgtgaactttctcagcatatatataaaatacacgtgtatatgaggatgtatgtgtatatgtttatacacacaggagtcagtgcccatgtgtatggaagacaaatacacatacatatatacattttgcagctatggacaatttaccacaggatgcatattaaagaaagtcatagtttttttcttttttaattgaaagggacaagtatcatctaaatattatgccttgagaatgagggcgtgaaacacaatatcatccccaaatgtgtcttgtattatcataagttagatgttttagtttaaaaatcagaaagacattcttagttaatctttgaaaactcatacagtggtattgctagtttaaaatgagtcacttacttcatatcctctcgttcagtttagtaagcaaaggcttcttggcttctctggtgatggggtttgttttcatcgggcatacgttttctgcaatggtttagtggctggggtgagccactggcagtgtgcttacctgttgtctgaaacatagatagatcccacgttgatgtctgaacgaccgtcttttgaaaactcatcgggagtgaatggcatctcgttgtaagtactctaatatacagtgtgtagtttgtttctgttgttcacttggagtggatccagcttcactgtcatgtgcgaacacagtgacacgtttggccagtgacatttcaatcactgaaaatgtgctctacatctcgtatggatttctaggcctgatatccaacagaaagcatagacgtctcaggttattcgttactctaaggtaaaaccatctaggatgattttcccccttgcagttatgttatcattcttataacattgtatgttaatagaaaatatatttgcataatatgcatatatatgtatatttaccaagattttgtttcttacgcttgctatcatggcagcatgcgatgtcatattttcctttatgtgatgtaactactttctgttatctagaaattaagattgaagctaaaacacttctactgttcaatttcagaaactaagaatcatcctcatgcctttatttctgtatctgacatatttcataagcacatccaactactcctagactgactaggattctgcaggaacatgacccgtacacaccacgcgtcacccaacgacccatgaccgttctctgaggcaaaggagggcaacctgacagcaaacacagtcactgttggttccttctgatccacagcctcatcagtatttggactttttaaagctcgtagaaacaagacaaggtgcaccggtttcatagacgcaaccttaacttactatttagatgagatctttctaaagaaaaaaaaaagagatgatatattttttgtaaacaatatttctatcacaggcatccataaactgaaatgactacagttgtgcaaacaggtgtcacagtgaagttgagcatttggagaaaaaaataaaaagcaaaatttgcaggaagaactgctaaattaatactttatcccaaaatgccacgtatgcctcaccctctctgttctatccaaaaccaaggaccagagtgctccaatggtaggccccagttgtctcgatgtaggtagaggcaccaccctccccgaggatgcgtgtggtgtggactatccccatgagctgaccactacttgatttttctttggtggccgtaacaacctttaatttgtgggcatctgcaacagttcaaaacccaccatcagataaaacataatccacaaaatctcacgctagaggcaattacctacttttagacccttttccctctttcattcctatctttttcctcctaatcgctgctctctggttttattttcatctggagactagccagggatttctttggctttggcttttctctgaccattttttccatgggtaacaatgggggatcctaaaagttaaacagattgggaaaaaccttgttaagtggccttatcattattatcatgttaaagaaaaaaaatacatttgcaaagaccttatccctttcaatacttcaggtatctttttctgtatccagtaattaaaggtgtgaggtccacatgcagaagagggaccccaaaatgtaaatggatgtggacaaaaacagtcaatggtctatttaagtgtataatttatactattcagaactgtgacattaattctttctgggagaaaagtgatttaaaacttttttgatgcatagttgaggtacccaaatatcaaaggcagagaccccatggggctccaaagagctgcagtctccttcccaaggttttctggatataaatttgcatggtatagtcataatagcttttgagctttttatatgcatttggcaccaagactgggatccacaactttgtagacactgcgatgaagttaacatattagctatactataaatagtgtttgtaactacacacacacacacacacacacacacaaatacatacatatattctgtaaaaacaaaaaaaaactttttaagatccttgggtatgtgtttgctttactccatttcagaagaaaattacttttcttctaacaaaattattttatagcttctccatttttaaaacttgtgagagcattgagaagagaactctgactgtgttaacagaagagagttgaattggagtctctgttgtgttaaaatgacctctcgttactccacagtagttatttgagccagtgactgagtcgcgttgaggaattctgaacccggacctctgacgttgttgggaggtggctgttacccacacccagacctcttgagtaaggacagaaacgttatcattggggatataatgagatttctttcttaacaattgaaagtaataaagagttaattttctcagtagtcctgtctttccaaaatgcgccacaggggctcaagatctacagaagaatcttgttatgacagtttgttattacccatattcagatatccttgagataatggaagagccctgctacataactccctacagagaaagactgatagacttgagtagtccttaaaacaagtgttattcctgttcaccaaccccgggactgtggaggggtttcactgtctataccatgcgacatccatttcccctgaatctcaaacgaactagaaagtatgtcatgataatatttccattagatttggaagctacctgtacatctgcaatattgtgtttttaacgccagcacccagaactttgacatgttcagtcactccctgaaaggcacttctctcttgtccaaacacagcgttgacatttttactgaggagatcatctcaaaggtgatgccaaacgagtctggggctggttttaaggggacaggcacattgcagttgtaggtgttcattttcagcatctagtagataatccattggtgtttgtcccaccattggtgtattctaacaagaatgtgtccaactttgaatctcctggcttgaaagtataaaccatcacttaattcttattttaactctccacctgaaaaccagttcatatttctggccattttatgtaagcaaaactgaacaattggtgaaacattttgttactcttggaattgactctggctgtcagtgtgagccattagagtaacatcgaatcttggggcaaagaactgcccaggtgaattaaatttttccaggacactagctagtgtgccttggattgattacctcttctactgcattgaaaggcgccatgttttcctgaaatactaaattcccaacacctgggtaaacaatgaccttccagagagtggctcccgtatgcctctccctaggaccaaccccatgaacatgttttgtcacgtttgtctcatgtttctacttcacaagtcagtgagtgtgtttaaggtaagtacaggattattctagtaggaataggcgattgctgtcataatcaattctcatgttgatttcattttattgtaaagataaatttaaacccagttttgcttaagcacattgatgtaattttttggtattatttgacatgaaaaaacagcaaaattgagtgatagatacaatatgaaacttgttgatgaatgaattcaaatttattaaaaaaggagtaactgacctaaa

SEQ ID NO: 16261 - DNA, 1422 bp, Artificial Sequence
  derived and/or modified sequence
atgtggggcctggccggcggccgcctgtttggcatcttcagcgcccctgtgctggtggccgtggtgtgctgtgcccagagcgtgaatgaccccggcaacatgagctttgtgaaggagaccgtggacaagctgctgaagggctatgacatccggctgcggccagactttggaggcccccctgtgtgtgtgggcatgaacattgatattgccagcattgacatggtgtctgaggtgaacatggactacaccctgaccatgtacttccagcagtactggagggacaagaggctggcctacagcggcatccccctgaacctgaccctggacaacagagtggccgaccagctgtgggtgcctgacacctacttcctgaatgacaagaagagctttgtgcacggcgtgacagtgaagaacaggatgatccggctgcacccagatggcaccgtgctgtatggcctgcgcatcaccaccacagctgcctgcatgatggacctgcggcgctaccccctggatgagcagaactgcaccctggagattgagagctatggctacaccacagatgacatcgagttctactggaggggcggggacaaggctgtgactggagtggagcgcatcgagctgccccagttcagcatcgtggagcaccggctggtgtccagaaatgtggtgtttgccactggagcctacccccggctgagcctgtccttccggctgaagagaaatattggctacttcatcctgcagacctacatgcccagcatcctgatcaccatcctgtcctgggtgtccttctggatcaactatgatgccagcgctgcccgggtggccctgggcatcaccaccgtgctgaccatgaccaccatcaacacccacctgcgggagaccctgcccaagatcccctacgtgaaggccatcgacatgtacctgatgggctgctttgtgtttgtgttcctggccctgctggagtatgcctttgtgaactacatcttcttcggccggggcccccagaggcagaagaagctggccgagaagacagccaaggccaagaatgacaggagcaagtctgagagcaacagagtggatgcccacggcaacatcctgctgaccagcctggaggtgcacaatgagatgaatgaggtgtctgggggcattggagacaccagaaattctgccatcagctttgacaacagcggcatccagtacaggaagcagagcatgccccgggagggccacggccgcttcctgggggacaggagcctgccccacaagaagacccacctgcggcggcgcagcagccagctgaagatcaagatcccagacctgacagatgtgaatgccatcgaccgctggagccgcatcgtgttccccttcaccttcagcctcttcaacctggtgtactggctgtactacgtgaactag

SEQ ID NO: 16262 - DNA, 1422 bp, Artificial Sequence
  derived and/or modified sequence
atgtggggcctggccggcggccggctgttcggcatcttcagcgcccccgtactggtcgcagtggtgtgctgcgcacagagtgtgaacgacccaggaaacatgagctttgttaaagagacagtagacaaactcctgaaaggctacgacattcggctcaggcccgactttggtggcccaccagtttgcgttgggatgaacatcgacatagccagcatcgacatggtcagtgaagttaatatggactacacattgacaatgtatttccagcagtactggagggataagagattagcctactccggaattccactgaacttgaccttggacaaccgtgtggctgaccagctgtgggtgccagacacctattttctcaacgacaaaaaatctttcgttcacggagtcaccgtaaaaaaccggatgattcggttgcatccagacggcactgtgctgtacgggttgagaatcaccacaacagccgcgtgtatgatggatcttcgtaggtacccactggatgaacagaattgtacgctcgaaattgaatcttacgggtatacaactgacgacatcgagttctattggcggggtggagataaggccgtgacgggcgttgaaagaattgagcttccccagttctccatcgtggaacaccgcctggtgtcccgaaacgttgttttcgcaactggagcgtatccaagactgagcctgagctttcgcttgaaaaggaacatagggtatttcatcctgcagacttacatgcctagcattttaatcacgatcctgtcttgggtttcattttggattaactacgatgcatctgccgctcgcgtcgctcttggaatcacaaccgtactgaccatgactactattaatacacatctgcgcgagaccctgcctaaaataccatatgtgaaggccattgacatgtacttgatgggctgtttcgtcttcgtgtttctagctttattggagtacgccttcgtcaactacatttttttcggccggggaccccagcgtcagaaaaagctggcagagaaaaccgctaaggctaagaatgatcggtccaaatcggagtctaaccgggtggacgctcatggcaatatcctcctgacctccctggaggttcacaacgaaatgaacgaggtctccgggggcatcggcgatactagaaactcagcgataagctttgacaactcagggatccaataccggaaacaatccatgccccgcgagggtcacgggcgattccttggtgacaggagcctgccccataagaaaactcacttgcggcgacggagctctcagttgaagatcaaaatcccagacctcactgacgtaaacgcgattgatcggtggtcacgtatagtattcccttttactttttcgctgtttaatttggtgtactggctgtactacgtgaactag

SEQ ID NO: 16263 - DNA, 1422 bp, Artificial Sequence
  derived and/or modified sequence
atgtggggcctcgccggaggcagactgtttggcatattcagcgctcccgttctagtcgctgtcgtatgctgtgcccagagcgtaaatgatccgggtaacatgtcctttgtgaaggaaacagtcgacaaactcctcaaaggatatgacattcgcctccgacccgacttcgggggtccccctgtttgtgtggggatgaatatcgacatagccagtatcgacatggtttctgaagtaaacatggactatacactgaccatgtacttccaacagtactggagggataaacggctggcctatagcggaatccccttaaacttaacccttgataaccgcgtcgcagatcagctgtgggtgcccgacacttacttcttgaacgataaaaaaagcttcgttcacggagttacagttaagaatcggatgattaggctccatccggacgggaccgtgctgtacggactacgaattacgactacggccgcttgcatgatggatctgcgcagatacccactggatgagcagaattgcaccctggaaatcgagtcatatggctacaccacggatgatatagaattctattggcggggaggcgataaagcagtgaccggggtggaaaggatcgagctccctcagttcagcattgtcgagcatagattagtgtcccgcaacgtagtgtttgccacgggagcctatcccagattaagtctctcttttagattaaagcgaaacattggctactttattttacagacctacatgccgtcaatccttattaccatactgtcatgggtaagtttctggatcaactatgacgcttccgctgccagggtcgccctcgggataacaaccgtgcttaccatgacaacaatcaacactcacctccgcgagaccctgccgaaaatcccgtatgtgaaggcaatcgatatgtacctgatgggatgcttcgtcttcgtgttccttgctttgcttgagtacgctttcgtcaactacatcttcttcggtagaggacctcagcgacaaaagaaattagcagaaaagacagcaaaggcgaaaaatgatcgctccaagtcagagtccaaccgtgtggacgcccatggaaatattttactgacatctttagaggtccacaacgagatgaacgaggtaagcggcggaattggtgatacacgtaattccgcaatcagcttcgataacagtggcatacagtaccgaaagcagagcatgcctcgggagggacatggccgtttccttggcgaccggtctctgccacacaagaagactcatctgcgacgcaggtcgtcacagttgaaaatcaagatccctgaccttaccgacgtgaacgccatcgatcgatggtcacggatcgtctttccctttacattttcactgttcaacctcgtgtactggttgtattatgtgaattag

SEQ ID NO: 16264 - DNA, 1422 bp, Artificial Sequence
  derived and/or modified sequence
atgtggggcctggccggcggcagactgttcggcatcttcagcgcccccgtgctggtggccgtggtgtgctgcgcccagagcgtgaacgaccccggcaacatgagcttcgtgaaggagaccgtggacaagctgctgaagggctacgacatcagactgagacccgacttcggcggcccccccgtgtgcgtgggcatgaacatcgacatcgccagcatcgacatggtgagcgaggtgaacatggactacaccctgaccatgtacttccagcagtactggagagacaagagactggcctacagcggcatccccctgaacctgaccctggacaacagagtggccgaccagctgtgggtgcccgacacctacttcctgaacgacaagaagagcttcgtgcacggcgtgaccgtgaagaacagaatgatcagactgcaccccgacggcaccgtgctgtacggcctgagaatcaccaccaccgccgcctgcatgatggacctgagaagataccccctggacgagcagaactgcaccctggagatcgagagctacggctacaccaccgacgacatcgagttctactggagaggcggcgacaaggccgtgaccggcgtggagagaatcgagctgccccagttcagcatcgtggagcacagactggtgagcagaaacgtggtgttcgccaccggcgcctaccccagactgagcctgagcttcagactgaagagaaacatcggctacttcatcctgcagacctacatgcccagcatcctgatcaccatcctgagctgggtgagcttctggatcaactacgacgccagcgccgccagagtggccctgggcatcaccaccgtgctgaccatgaccaccatcaacacccacctgagagagaccctgcccaagatcccctacgtgaaggccatcgacatgtacctgatgggctgcttcgtgttcgtgttcctggccctgctggagtacgccttcgtgaactacatcttcttcggcagaggcccccagagacagaagaagctggccgagaagaccgccaaggccaagaacgacagaagcaagagcgagagcaacagagtggacgcccacggcaacatcctgctgaccagcctggaggtgcacaacgagatgaacgaggtgagcggcggcatcggcgacaccagaaacagcgccatcagcttcgacaacagcggcatccagtacagaaagcagagcatgcccagagagggccacggcagattcctgggcgacagaagcctgccccacaagaagacccacctgagaagaagaagcagccagctgaagatcaagatccccgacctgaccgacgtgaacgccatcgacagatggagcagaatcgtgttccccttcaccttcagcctgttcaacctggtgtactggctgtactacgtgaactag

SEQ ID NO: 16265 - protein, 467 aa, Artificial Sequence
  derived and/or modified sequence
MSSPNIWSTGSSVYSTPVFSQKMTVWILLLLSLYPGFTSQKSDDDYEDYASNKTWVLTPKVPEGDVTVILNNLLEGYDNKLRPDIGVKPTLIHTDMYVNSIGPVNAINMEYTIDIFFAQTWYDRRLKFNSTIKVLRLNSNMVGKIWIPDTFFRNSKKADAHWITTPNRMLRIWNDGRVLYTLRLTIDAECQLQLHNFPMDEHSCPLEFSSYGYPREEIVYQWKRSSVEVGDTRSWRLYQFSFVGLRNTTEVVKTTSGDYVVMSVYFDLSRRMGYFTIQTYIPCTLIVVLSWVSFWINKDAVPARTSLGITTVLTMTTLSTIARKSLPKVSYVTAMDLFVSVCFIFVFSALVEYGTLHYFVSNRKPSKDKDKKKKNPAPTIDIRPRSATIQMNNATHLQERDEEYGYECLDGKDCASFFCCFEDCRTGAWRHGRIHIRIAKMDSYARIFFPTAFCLFNLVYWVSYLYL

SEQ ID NO: 16266 - protein, 372 aa, Artificial Sequence
  derived and/or modified sequence
MYVNSIGPVNAINMEYTIDIFFAQTWYDRRLKFNSTIKVLRLNSNMVGKIWIPDTFFRNSKKADAHWITTPNRMLRIWNDGRVLYTLRLTIDAECQLQLHNFPMDEHSCPLEFSSYGYPREEIVYQWKRSSVEVGDTRSWRLYQFSFVGLRNTTEVVKTTSGDYVVMSVYFDLSRRMGYFTIQTYIPCTLIVVLSWVSFWINKDAVPARTSLGITTVLTMTTLSTIARKSLPKVSYVTAMDLFVSVCFIFVFSALVEYGTLHYFVSNRKPSKDKDKKKKNPAPTIDIRPRSATIQMNNATHLQERDEEYGYECLDGKDCASFFCCFEDCRTGAWRHGRIHIRIAKMDSYARIFFPTAFCLFNLVYWVSYLYL

SEQ ID NO: 16267 - DNA, 1404 bp, Artificial Sequence
  derived and/or modified sequence
atgtccagtccaaatatttggagcactggtagcagtgtgtactctacccccgtattcagccagaagatgacagtgtggatcctcctgttactgtctttgtaccccggcttcaccagtcagaagtccgatgacgactatgaggattacgcctccaacaaaacatgggtactgacaccgaaagtgcccgagggcgatgtgacagtaattctgaataacttgctcgaaggttatgataacaagctgcgaccggacataggcgttaagcctaccctgatccacacagatatgtacgtcaatagtattggccccgtgaatgctattaacatggaatacaccatagacattttctttgcgcaaacctggtatgatcggaggctgaagtttaactcgacaattaaagtcttgcgtctgaacagtaacatggtggggaagatctggattcctgacaccttcttccgcaacagcaaaaaggctgatgctcattggatcacaaccccaaaccggatgttgcgaatctggaacgacgggcgagtcctctataccctcagactgacaattgatgccgaatgtcagttgcagctccataacttcccaatggacgaacatagctgtcctctcgaattcagcagctatggctacccgcgtgaggagatcgtgtaccagtggaaacgatccagcgtcgaggtcggcgacaccaggtcttggcggctgtatcaatttagcttcgtggggctcaggaacacaaccgaggtggtaaagacaaccagcggcgactatgtggtaatgagtgtctacttcgatctatcacggagaatggggtacttcacgatacagacctacataccttgcacgctgattgttgtgctcagctgggtcagcttttggattaacaaggacgccgtccctgcaaggaccagccttgggatcaccactgttctgaccatgactacactcagcacaatcgcgcgaaaatcccttccaaaagtctcctatgtgactgctatggacctgttcgtgtctgtttgttttatttttgtgtttagcgccctggtagagtacggcacactgcattacttcgtctcaaataggaaacccagcaaggacaaggacaagaaaaagaaaaacccagcccccaccatagacattagaccaaggtccgcgaccatccaaatgaataatgcgactcatctgcaagagcgtgatgaagagtacggatatgaatgtctcgacggcaaggattgtgcaagcttcttctgttgctttgaagattgtaggaccggtgcttggaggcatggcagaatacacatcagaatcgccaagatggattcgtatgcacgaatattctttcctactgccttctgtctgtttaatctcgtctattgggtgtcttatctttatctgtag

SEQ ID NO: 16268 - DNA, 1119 bp, Artificial Sequence
  derived and/or modified sequence
atgtatgtcaattctattggtcccgtcaacgcaataaatatggaatacaccatcgacattttcttcgctcaaacatggtacgaccgcagactgaagttcaatagcacaatcaaggtgttgcggcttaactctaacatggtgggcaagatttggatccccgacacattcttcagaaactcgaagaaggccgacgcccattggataacaacacctaatagaatgctgaggatatggaacgatgggcgcgtgctgtataccctgagactgactattgatgcagaatgccagttgcagcttcacaacttccctatggacgaacattcttgccccctcgagttctctagctacggatacccaagagaagagatcgtgtaccaatggaaaagaagttccgtggaggtcggcgacaccagatcctggagactgtatcagttcagttttgtgggcctgcgtaatactaccgaggttgtgaaaacgaccagcggagactacgtagtaatgagtgtctacttcgacctttccaggcgcatgggatacttcactatccaaacatacatcccttgcacgctgatcgtcgttctcagttgggttagcttctggataaataaggacgctgtgcccgccaggactagtttgggaatcactactgtactgacaatgaccacgctatccacaatcgccaggaagtctctgcctaaggtgtcgtatgtcacagctatggatctgttcgtgagcgtctgtttcatctttgtttttagtgcgctcgtcgaatacggcactttgcattacttcgtttccaataggaaaccctcaaaagataaggataagaagaaaaagaacccggcccccactatagatatcaggcctagatctgccaccattcagatgaataacgccacgcacttacaggaacgcgacgaggaatacggctacgagtgcctggatggcaaggactgcgcctccttcttttgctgttttgaagactgtcgcacgggggcatggcgacacgggcgtattcacattcgaattgctaaaatggacagctatgccagaatattcttcccaacagctttttgtctgtttaatctcgtttactgggtgtcgtatctctacctatag

SEQ ID NO: 16269 - DNA, 1739 bp, Artificial Sequence
  derived and/or modified sequence
tgacgctttgatggtatctgcaagcgtttttgctgatcttatctctgccccctgaatattaattccctaatctggtagcaatccatctccccagtgaaggacctactagaggcaggtggggggagccaccatcagatcataagcataagaataatacaaaggggagggattcttctgcaaccaagaggcaagaggcgagagaaggaaaaaaaaaaaagcgatgagttcgccaaatatatggagcacaggaagctcagtctactcgactcctgtattttcacagaaaatgacggtgtggattctgctcctgctgtcgctctaccctggcttcactagccagaaatctgatgatgactatgaagattatgcttctaacaaaacatgggtcttgactccaaaagttcctgagggtgatgtcactgtcatcttaaacaacctgctggaaggatatgacaataaacttcggcctgatataggagtgaagccaacgttaattcacacagacatgtatgtgaatagcattggtccagtgaacgctatcaatatggaatacactattgatatattttttgcgcaaacgtggtatgacagacgtttgaaatttaacagcaccattaaagtcctccgattgaacagcaacatggtggggaaaatctggattccagacactttcttcagaaattccaaaaaagctgatgcacactggatcaccacccccaacaggatgctgagaatttggaatgatggtcgagtgctctacaccctaaggttgacaattgatgctgagtgccaattacaattgcacaactttccaatggatgaacactcctgccccttggagttctccagttatggctatccacgtgaagaaattgtttatcaatggaagcgaagttctgttgaagtgggcgacacaagatcctggaggctttatcaattctcatttgttggtctaagaaataccaccgaagtagtgaagacaacttccggagattatgtggtcatgtctgtctactttgatctgagcagaagaatgggatactttaccatccagacctatatcccctgcacactcattgtcgtcctatcctgggtgtctttctggatcaataaggatgctgttccagccagaacatctttaggtatcaccactgtcctgacaatgaccaccctcagcaccattgcccggaaatcgctccccaaggtctcctatgtcacagcgatggatctctttgtatctgtttgtttcatctttgtcttctctgctctggtggagtatggcaccttgcattattttgtcagcaaccggaaaccaagcaaggacaaagataaaaagaagaaaaaccctgcccctaccattgatatccgcccaagatcagcaaccattcaaatgaataatgctacacaccttcaagagagagatgaagagtacggctatgagtgtctggacggcaaggactgtgccagttttttctgctgttttgaagattgtcgaacaggagcttggagacatgggaggatacatatccgcattgccaaaatggactcctatgctcggatcttcttccccactgccttctgcctgtttaatctggtctattgggtctcctacctctacctgtgaggaggtatgggttttactgatatggttcttattcactgagtctcatggagagatgtctgttctaagtccacttaaataatcctctatgtggttgataatgatctgaatctgtttc

SEQ ID NO: 16270 - DNA, 1923 bp, Artificial Sequence
  derived and/or modified sequence
ctactcgactcctgtattttcacagaaaatgacggtgtggattctgctcctgctgtcgctctaccctggaagaaaactttcttcttacccacataaattgagatttgaaaatgaatgaagaaaaacattgatagaaataacctcaatatcaagttggagatcctgacagagctaagtcatgttctacattcttcactagccagaaatctgatgatgactatgaagattatgcttctaacaaaacatgggtcttgactccaaaagttcctgagggtgatgtcactgtcatcttaaacaacctgctggaaggatatgacaataaacttcggcctgatataggagtgaagccaacgttaattcacacagacatgtatgtgaatagcattggtccagtgaacgctatcaatatggaatacactattgatatattttttgcgcaaacgtggtatgacagacgtttgaaatttaacagcaccattaaagtcctccgattgaacagcaacatggtggggaaaatctggattccagacactttcttcagaaattccaaaaaagctgatgcacactggatcaccacccccaacaggatgctgagaatttggaatgatggtcgagtgctctacaccctaaggttgacaattgatgctgagtgccaattacaattgcacaactttccaatggatgaacactcctgccccttggagttctccagttatggctatccacgtgaagaaattgtttatcaatggaagcgaagttctgttgaagtgggcgacacaagatcctggaggctttatcaattctcatttgttggtctaagaaataccaccgaagtagtgaagacaacttccggagattatgtggtcatgtctgtctactttgatctgagcagaagaatgggatactttaccatccagacctatatcccctgcacactcattgtcgtcctatcctgggtgtctttctggatcaataaggatgctgttccagccagaacatctttaggtatcaccactgtcctgacaatgaccaccctcagcaccattgcccggaaatcgctccccaaggtctcctatgtcacagcgatggatctctttgtatctgtttgtttcatctttgtcttctctgctctggtggagtatggcaccttgcattattttgtcagcaaccggaaaccaagcaaggacaaagataaaaagaagaaaaaccctgcccctaccattgatatccgcccaagatcagcaaccattcaaatgaataatgctacacaccttcaagagagagatgaagagtacggctatgagtgtctggacggcaaggactgtgccagttttttctgctgttttgaagattgtcgaacaggagcttggagacatgggaggatacatatccgcattgccaaaatggactcctatgctcggatcttcttccccactgccttctgcctgtttaatctggtctattgggtctcctacctctacctgtgaggaggtatgggttttactgatatggttcttattcactgagtctcatggagagatgtctgttctaagtccacttaaataatcctctatgtggttgataatgatctgaatctgtttctatgtccaaacctggtaaattttataatgtcatattgtttgtgcccagccctcctttggttagtgtactttgaacttcgatgtttgctgtgtttcaaacctgcaaggcaaagtaaaattagagcaagaacattcaaaccaaataagatatttttcagctacagcaaataaaacagtgaaagccctgactatttacagtagtggtatccttactagattcataatgcaattagatagaaaaggtccaaaactgtaccctatgttcactccgggtcaagttgtgataaatttgatcccaatagaatacctccctcatttaaga

SEQ ID NO: 16271 - DNA, 1404 bp, Artificial Sequence
  derived and/or modified sequence
atgagcagccccaacatctggagcacaggcagctctgtgtacagcacccctgtgttcagccagaagatgacagtgtggatcctgctgctgctgagcctgtacccaggcttcaccagccagaagagtgatgatgattatgaagattatgccagcaacaagacctgggtgctgacccccaaggtgcctgaaggagatgtgaccgtcatcctgaacaacctgctggagggctatgacaacaagctgcggccagacattggagtgaagcccaccctcatccacacagacatgtatgtgaacagcatcggccctgtgaatgccatcaacatggagtacaccatcgacatcttctttgcccagacctggtatgaccggcggctgaagttcaacagcaccatcaaggtgctgcggctgaacagcaacatggtgggcaagatctggatcccagacaccttcttcaggaacagcaagaaggcagatgcccactggatcaccacccccaacaggatgctgcgcatctggaatgatggccgggtgctgtacaccctgcggctgaccattgatgctgagtgccagctgcagctgcacaacttccccatggatgagcacagctgccccctggagttcagcagctatggctacccccgggaggagatcgtgtaccagtggaagaggagctctgtggaggtgggggacaccaggtcctggaggctgtaccagttctcctttgtgggcctgaggaacaccacagaggtggtgaagaccaccagcggggactatgtggtgatgtctgtgtactttgacctgagcaggaggatgggctacttcaccatccagacctacatcccctgcaccctcatcgtggtgctgtcctgggtgtccttctggatcaacaaggatgctgtgcctgcccggaccagcctgggcatcaccaccgtgctgaccatgaccaccctgagcaccatcgccaggaagagcctgcccaaggtgtcctatgtgacagccatggacctgtttgtgtctgtgtgcttcatctttgtgttcagcgccctggtggagtatggcaccctgcactactttgtgagcaacaggaagcccagcaaggacaaggacaagaagaagaagaacccagcccccaccatcgacatccggcccaggtctgccaccatccagatgaacaatgccacccacctgcaggagagagatgaggagtatggctatgaatgtctggatggcaaggactgtgccagcttcttctgctgctttgaggactgcaggactggagcctggaggcatggccgcatccacatccgcatcgccaagatggacagctatgcccgcatcttcttccccacagccttctgcctcttcaacctggtgtactgggtgtcctacctgtacctgtag

SEQ ID NO: 16272 - DNA, 1119 bp, Artificial Sequence
  derived and/or modified sequence
atgtatgtgaacagcatcggccctgtgaatgccatcaacatggagtacaccatcgacatcttctttgcccagacctggtatgaccggcggctgaagttcaacagcaccatcaaggtgctgcggctgaacagcaacatggtgggcaagatctggatcccagacaccttcttcaggaacagcaagaaggcagatgcccactggatcaccacccccaacaggatgctgcgcatctggaatgatggccgggtgctgtacaccctgcggctgaccattgatgctgagtgccagctgcagctgcacaacttccccatggatgagcacagctgccccctggagttcagcagctatggctacccccgggaggagatcgtgtaccagtggaagaggagctctgtggaggtgggggacaccaggtcctggaggctgtaccagttctcctttgtgggcctgaggaacaccacagaggtggtgaagaccaccagcggggactatgtggtgatgtctgtgtactttgacctgagcaggaggatgggctacttcaccatccagacctacatcccctgcaccctgattgtggtgctgtcctgggtgtccttctggatcaacaaggatgctgtgcctgcccggaccagcctgggcatcaccaccgtgctgaccatgaccaccctgagcaccatcgccaggaagagcctgcccaaggtgtcctatgtgacagccatggacctgtttgtgtctgtgtgcttcatctttgtgttttctgccctggtggagtatggcaccctgcactactttgtgagcaacaggaagcccagcaaggacaaggacaagaagaagaagaacccagcccccaccatcgacatccggcccaggtctgccaccatccagatgaacaatgccacccacctgcaggagagagatgaggagtatggctatgagtgcctggatggcaaggactgtgccagcttcttctgctgctttgaggactgcaggactggagcctggaggcatggccgcatccacatcagaattgccaagatggacagctatgcccgcatcttcttccccacagccttctgcctcttcaacctggtgtactgggtgtcctacctgtacctgtag

SEQ ID NO: 16273 - DNA, 1404 bp, Artificial Sequence
  derived and/or modified sequence
atgagcagccccaacatctggagcaccggcagcagcgtgtacagcacccccgtcttcagtcaaaaaatgacagtctggattttgttactcttatccttgtaccctggctttactagtcaaaagagcgatgatgactatgaggattatgcctctaataagacatgggtactcacccctaaagtcccggaaggagatgtgaccgttatactgaacaacttactggagggctacgacaataaattacgccctgatatcggagtgaagccaacactgatccatacagacatgtacgtgaatagtatcgggccagttaatgccatcaatatggaatacactatcgacatcttctttgcccaaacatggtacgatagaagactcaaattcaattcaacaatcaaagtactccgcctcaactctaacatggtgggaaaaatctggattccggacaccttttttcgcaactccaaaaaggccgatgcccattggataaccacacccaatagaatgctccgcatctggaacgatggccgggtactttacactctccggctgaccatcgacgccgagtgtcaattacaattacacaactttccaatggacgagcactcctgtccactcgagttctctagctacggataccctagagaagagattgtgtatcagtggaagcgttcctctgtggaggtgggggacacaagaagctggcgcttataccagttctcctttgtgggtctgagaaataccacggaggtcgtgaagaccactagtggagattatgtggtgatgagtgtctactttgacctgagccggagaatgggatactttactatccagacttacataccttgcactctgattgtagtcctgtcttgggtaagcttttggatcaataaggacgctgttcctgcccgcacctcactcggaatcactactgtgttaactatgaccactctctccacaatcgcccgaaagtcactgccaaaagtttcctacgtgacagccatggacctgtttgtttctgtttgctttatttttgttttttctgcattggtggagtatggtactctgcactattttgtatccaatcgcaagccgagcaaggacaaagataagaaaaagaaaaatccggcccctaccattgacatccgaccccgctctgcgactattcagatgaataatgccacacacctgcaggaaagagacgaagaatacggatacgaatgcctcgatggaaaagactgtgccagcttcttttgttgttttgaagattgcagaactggggcctggcgtcatggccggattcatatacggattgccaaaatggacagctatgccaggatatttttccccactgccttctgtctattcaatctggtgtactgggtttcctacctgtacttgtag

SEQ ID NO: 16274 - DNA, 1119 bp, Artificial Sequence
  derived and/or modified sequence
atgtacgtgaacagcatcggccccgtgaacgccatcaacatggagtacactatcgacattttttttgcacagacatggtatgaccgtaggctcaagtttaactctacaatcaaggtgctcagactaaactctaatatggtcgggaagatctggattcccgatacctttttccgaaattctaaaaaggcagatgcgcactggattacaactccaaacaggatgttgcgcatttggaatgatggacgtgtcttgtacaccctcaggcttactattgacgccgagtgccaattacaactccataacttccccatggacgaacacagttgccccctcgaatttagctcctacgggtatccccgcgaagagatagtgtatcagtggaagcggtcgagtgtggaagtgggcgacacccgctcttggaggctttatcagttcagcttcgttggtcttagaaacaccactgaagttgtgaagaccacctccggcgactacgtcgtgatgagcgtgtactttgacctgtccaggagaatgggttatttcaccatccagacctatattccttgcactcttattgtggtcctgtcatgggtgtcattctggattaacaaggatgccgtgcccgccagaacctccctcggaattaccacagtgttgactatgactacactgtccacgatcgctcgtaagagcctccctaaagtaagttacgtgaccgctatggacctgtttgtatccgtgtgttttatctttgtctttagtgccctagtggaatatggcacacttcactacttcgtctcgaaccgcaaaccatctaaagacaaagacaagaaaaaaaaaaatcctgcacctacaattgacatccgccctaggtctgctaccatccagatgaataacgcaacccacttgcaagagcgggatgaggagtacggctacgaatgccttgatggcaaggattgcgctagcttcttctgctgttttgaagattgcagaaccggggcctggcgccacggacggattcatattcgaatcgcaaaaatggattcttatgctagaatcttcttccctacggccttttgcctgttcaatttggtgtactgggtctcctatctctacctctag

SEQ ID NO: 16275 - DNA, 1404 bp, Artificial Sequence
  derived and/or modified sequence
atgtcctccccaaacatttggtccaccgggagtagtgtgtattcaacccctgttttcagtcagaagatgacggtgtggatcctcttgctgctatctctgtatcctggttttacatcacaaaaatcagacgatgattacgaagattatgcctctaataagacctgggtcttaaccccaaaagtgcctgaaggcgatgtcactgtgatcctcaacaacctgctcgaagggtatgacaacaaacttaggcctgacatcggggttaaacccacgttaatccacacagacatgtatgtcaatagcattgggcctgtcaatgctatcaatatggaatacactatcgatatttttttcgcccaaacctggtacgaccgcagactcaaatttaattctactataaaagtacttcgcttgaattccaacatggtaggtaaaatttggatccctgatacgttcttccgaaactcaaaaaaggcagatgctcattggatcaccacacccaaccgtatgttacggatctggaatgacggtcgtgtgctgtacaccctgcggctaaccatcgatgctgagtgtcagctgcaacttcacaattttcccatggacgagcacagctgcccactggagttttccagttatggttatccaagagaggagatagtctatcaatggaagagaagctccgtggaggtcggggacaccaggagctggcgactataccagtttagcttcgtcgggctcagaaacaccacagaggtcgtgaaaacaacttccggcgactatgttgtcatgtccgtgtatttcgatttatcacggagaatggggtactttactattcagacttacatcccatgcacactgatcgtggtgctcagctgggtttccttctggatcaataaagatgccgtcccagctaggactagcttaggtattacgaccgtgttgactatgactaccctgagcaccatcgcaaggaaaagcctgccgaaagtgtcctatgttaccgctatggacttgtttgtgtccgtctgtttcatctttgtgttcagcgcactggttgaatacggaacattacattacttcgttagcaaccggaagccttccaaggataaagataaaaagaagaaaaacccggctccaacaatcgacatacggcctcgctccgctacaatccagatgaataatgccacacatctacaggagagggacgaagagtatggatatgagtgcttggatgggaaggactgcgcaagcttcttctgctgcttcgaagattgccggacaggggcatggcgtcacggcagaattcacattaggatcgcgaaaatggacagctacgctcgcatcttctttccaacagccttttgtctgttcaatctcgtgtactgggtgagttacctctatttatag

SEQ ID NO: 16276 - DNA, 1119 bp, Artificial Sequence
  derived and/or modified sequence
atgtacgtaaacagcattgggcctgtaaacgcaatcaacatggaatacacaatcgatattttcttcgctcagacgtggtacgatcgccgactgaagttcaactcaaccattaaagtgctcaggttgaacagcaacatggtgggaaaaatctggattcctgacacattcttccggaattctaaaaaagccgatgcgcattggatcactactccaaataggatgttacgcatctggaacgacggaagggtgctgtatacactgagactgactatcgacgccgaatgtcaactgcagcttcacaatttcccgatggatgaacactcctgtcccctggaatttagcagctatggctacccaagggaagagattgtttaccagtggaagcggtctagcgtggaagtgggtgatacacgatcctggcgactgtaccaattctccttcgttggtcttcgaaatacaacggaagttgttaagacaacctcaggcgactatgttgttatgagcgtttattttgacttaagccgtcgcatggggtatttcacaattcagacatatatcccatgcacgctgattgtggttcttagctgggtatccttctggattaataaagatgctgtgccggctaggacgtctctcggaattacgaccgtgctgacaatgaccacgttaagcactattgcccgtaaaagtctgccaaaggtgtcttacgtgactgccatggacctttttgtgtcggtgtgttttattttcgtatttagcgccctggtcgaatatgggacactgcactactttgtttctaacaggaaaccaagtaaagataaggacaaaaaaaagaagaatcctgcaccaactattgacatcaggcccagatcagcaactattcagatgaacaacgctacccatcttcaggagcgggacgaggagtatggctacgaatgcctggatggtaaggactgtgcttcatttttttgctgttttgaagactgccgaacaggtgcatggcgccatggcagaatacacatccggattgcaaagatggacagttacgctcggattttctttcctaccgccttctgcctgtttaatctggtgtattgggtttcttacctatatctgtag

SEQ ID NO: 16277 - DNA, 1404 bp, Artificial Sequence
  derived and/or modified sequence
atgagcagccccaacatctggagcaccggcagcagcgtgtacagcacccccgtgttcagccagaagatgaccgtgtggatcctgctgctgctgagcctgtaccccggcttcaccagccagaagagcgacgacgactacgaggactacgccagcaacaagacctgggtgctgacccccaaggtgcccgagggcgacgtgaccgtgatcctgaacaacctgctggagggctacgacaacaagctgagacccgacatcggcgtgaagcccaccctgatccacaccgacatgtacgtgaacagcatcggccccgtgaacgccatcaacatggagtacaccatcgacatcttcttcgcccagacctggtacgacagaagactgaagttcaacagcaccatcaaggtgctgagactgaacagcaacatggtgggcaagatctggatccccgacaccttcttcagaaacagcaagaaggccgacgcccactggatcaccacccccaacagaatgctgagaatctggaacgacggcagagtgctgtacaccctgagactgaccatcgacgccgagtgccagctgcagctgcacaacttccccatggacgagcacagctgccccctggagttcagcagctacggctaccccagagaggagatcgtgtaccagtggaagagaagcagcgtggaggtgggcgacaccagaagctggagactgtaccagttcagcttcgtgggcctgagaaacaccaccgaggtggtgaagaccaccagcggcgactacgtggtgatgagcgtgtacttcgacctgagcagaagaatgggctacttcaccatccagacctacatcccctgcaccctgatcgtggtgctgagctgggtgagcttctggatcaacaaggacgccgtgcccgccagaaccagcctgggcatcaccaccgtgctgaccatgaccaccctgagcaccatcgccagaaagagcctgcccaaggtgagctacgtgaccgccatggacctgttcgtgagcgtgtgcttcatcttcgtgttcagcgccctggtggagtacggcaccctgcactacttcgtgagcaacagaaagcccagcaaggacaaggacaagaagaagaagaaccccgcccccaccatcgacatcagacccagaagcgccaccatccagatgaacaacgccacccacctgcaggagagagacgaggagtacggctacgagtgcctggacggcaaggactgcgccagcttcttctgctgcttcgaggactgcagaaccggcgcctggagacacggcagaatccacatcagaatcgccaagatggacagctacgccagaatcttcttccccaccgccttctgcctgttcaacctggtgtactgggtgagctacctgtacctgtag

SEQ ID NO: 16278 - DNA, 1119 bp, Artificial Sequence
  derived and/or modified sequence
atgtacgtgaacagcatcggccccgtgaacgccatcaacatggagtacaccatcgacatcttcttcgcccagacctggtacgacagaagactgaagttcaacagcaccatcaaggtgctgagactgaacagcaacatggtgggcaagatctggatccccgacaccttcttcagaaacagcaagaaggccgacgcccactggatcaccacccccaacagaatgctgagaatctggaacgacggcagagtgctgtacaccctgagactgaccatcgacgccgagtgccagctgcagctgcacaacttccccatggacgagcacagctgccccctggagttcagcagctacggctaccccagagaggagatcgtgtaccagtggaagagaagcagcgtggaggtgggcgacaccagaagctggagactgtaccagttcagcttcgtgggcctgagaaacaccaccgaggtggtgaagaccaccagcggcgactacgtggtgatgagcgtgtacttcgacctgagcagaagaatgggctacttcaccatccagacctacatcccctgcaccctgatcgtggtgctgagctgggtgagcttctggatcaacaaggacgccgtgcccgccagaaccagcctgggcatcaccaccgtgctgaccatgaccaccctgagcaccatcgccagaaagagcctgcccaaggtgagctacgtgaccgccatggacctgttcgtgagcgtgtgcttcatcttcgtgttcagcgccctggtggagtacggcaccctgcactacttcgtgagcaacagaaagcccagcaaggacaaggacaagaagaagaagaaccccgcccccaccatcgacatcagacccagaagcgccaccatccagatgaacaacgccacccacctgcaggagagagacgaggagtacggctacgagtgcctggacggcaaggactgcgccagcttcttctgctgcttcgaggactgcagaaccggcgcctggagacacggcagaatccacatcagaatcgccaagatggacagctacgccagaatcttcttccccaccgccttctgcctgttcaacctggtgtactgggtgagctacctgtacctgtag

SEQ ID NO: 16279 - protein, 594 aa, Artificial Sequence
  derived and/or modified sequence
MASSTPSSSATSSNAGADPNTTNLRPTTYDTWCGVAHGCTRKLGLKICGFLQRTNSLEEKSRLVSAFKERQSSKNLLSCENSDRDARFRRTETDFSNLFARDLLPAKNGEEQTVQFLLEVVDILLNYVRKTFDRSTKVLDFHHPHQLLEGMEGFNLELSDHPESLEQILVDCRDTLKYGVRTGHPRFFNQLSTGLDIIGLAGEWLTSTANTNMFTYEIAPVFVLMEQITLKKMREIVGWSSKDGDGIFSPGGAISNMYSIMAARYKYFPEVKTKGMAAVPKLVLFTSEQSHYSIKKAGAALGFGTDNVILIKCNERGKIIPADFEAKILEAKQKGYVPFYVNATAGTTVYGAFDPIQEIADICEKYNLWLHVDAAWGGGLLMSRKHRHKLNGIERANSVTWNPHKMMGVLLQCSAILVKEKGILQGCNQMCAGYLFQPDKQYDVSYDTGDKAIQCGRHVDIFKFWLMWKAKGTVGFENQINKCLELAEYLYAKIKNREEFEMVFNGEPEHTNVCFWYIPQSLRGVPDSPQRREKLHKVAPKIKALMMESGTTMVGYQPQGDKANFFRMVISNPAATQSDIDFLIEEIERLGQDL

SEQ ID NO: 16280 - protein, 37 aa, Artificial Sequence
  derived and/or modified sequence
MASSTPSSSATSSNAGADPNTTNLRPTTYDTWCGVAH

SEQ ID NO: 16281 - protein, 85 aa, Artificial Sequence
  derived and/or modified sequence
MASSTPSSSATSSNAGADPNTTNLRPTTYDTWCGVAHGCTRKLGLKICGFLQRTNSLEEKSRLVSAFKERQSSKNLLSCENSDRD

SEQ ID NO: 16282 - protein, 115 aa, Artificial Sequence
  derived and/or modified sequence
MASSTPSSSATSSNAGADPNTTNLRPTTYDTWCGVAHGCTRKLGLKICGFLQRTNSLEEKSRLVSAFKERQSSKNLLSCENSDRDARFRRTETDFSNLFARDLLPAKNGEEQTVQ

SEQ ID NO: 16283 - protein, 121 aa, Artificial Sequence
  derived and/or modified sequence
MASSTPSSSATSSNAGADPNTTNLRPTTYDTWCGVAHGCTRKLGLKICGFLQRTNSLEEKSRLVSAFKERQSSKNLLSCENSDRDARFRRTETDFSNLFARDLLPAKNGEEQTVQFLLEVV

SEQ ID NO: 16284 - DNA, 1785 bp, Artificial Sequence
  derived and/or modified sequence
atggcgtccagtacccccagtagctcagccacaagctcaaatgcaggtgccgatccaaacaccactaacctccggcctacgacctacgatacttggtgtggagtcgcccacggttgcacgcggaagctcggactcaagatttgcggcttcctgcaacgcactaactctctggaagagaaatcacgtctggtctctgctttcaaagagaggcaaagctctaaaaatctgctcagttgtgagaactctgatagggacgcgagattccgtcgcaccgagacagacttctctaatctgttcgccagagacttactccccgctaaaaacggggaggagcagactgtacagttcctccttgaagtggtggacattctgctgaactacgtgcgaaaaacgtttgaccgcagtaccaaagtgctcgactttcatcatccccatcagcttctggaaggcatggaaggcttcaatctggagctgagcgatcatccggagtcactcgagcagatactcgtcgattgccgggatactctgaagtatggcgtgcgcacagggcaccccaggttcttcaatcagctttcaacggggctggacatcatcgggctcgcaggagagtggctgacctcaaccgccaataccaatatgtttacatatgaaatcgctcccgtgttcgttttgatggaacagatcacattgaagaagatgagggaaatagtcggttggtccagcaaggacggcgatggtatcttttcacccgggggagccatatctaatatgtattccataatggctgcccggtataagtatttccccgaggtcaagactaaagggatggctgccgtgccaaaactggtgctgtttacctctgaacagagccactactccatcaagaaggcgggggctgcactgggattcgggacagacaatgtcatcctaattaagtgcaacgaaaggggaaaaattatcccagcagacttcgaggcaaaaattcttgaggccaagcagaagggatacgtgccgttctacgtgaacgccaccgctggcacaactgtttatggggcttttgaccccatccaggaaattgccgatatctgcgagaagtataatctgtggctccacgttgatgccgcctggggaggcgggctgttaatgagtcggaaacatcggcacaagctaaacggcatcgagcgggccaactcagtgacctggaacccccacaaaatgatgggcgttctgctgcaatgctccgccatcctggtcaaggagaaaggcattcttcaggggtgcaatcagatgtgtgctggctacctgttccagcctgataaacagtacgatgtatcatatgataccggagacaaggccattcagtgcggcagacacgtcgatatatttaagttctggctgatgtggaaagccaagggtacagtgggttttgaaaaccaaatcaacaagtgtctggagctcgccgagtacctgtacgccaagataaagaatagggaagaattcgaaatggtgttcaatggagaacccgaacacactaacgtatgtttttggtatatccctcagtcattaagaggtgtgccggactcacctcaacggagagagaagttacacaaggttgctcctaagatcaaagccctgatgatggaatccggaacaaccatggtcggatatcaacctcagggcgataaggcaaattttttcaggatggtcatctccaacccagctgcaacccagagcgacattgattttctgatcgaggaaattgagcgcctcggacaggacctgtag

SEQ ID NO: 16285 - DNA, 3604 bp, Artificial Sequence
  derived and/or modified sequence
gaattcttcgtaggaattatcttttccctcctctcacccgacagcctgcctatttccaaaggaaaaaaaaaaagcgtgttgagtacgttctggattactcataagaccttttttttttccttccgggcgcaaaaccgtgagctggatttataatcgccctataaagctccagaggcggtcaggcacctgcagaggagccccgccgctccgccgactagctgcccccgcgagcaacggcctcgtgatttccccgccgatccggtccccgcctccccactctgcccccgcctaccccggagccgtgcagccgcctctccgaatctctctcttctcctggcgctcgcgtgcgagagggaactagcgagaacgaggaagcagctggaggtgacgccgggcagattacgcctgtcagggccgagccgagcggatcgctgggcgctgtgcagaggaaaggcgggagtgcccggctcgctgtcgcagagccgagcctgtttctgcgccggaccagtcgaggactctggacagtagaggccccgggacgaccgagctgatggcgtcttcgaccccatcttcgtccgcaacctcctcgaacgcgggagcggaccccaataccactaacctgcgccccacaacgtacgatacctggtgcggcgtggcccatggatgcaccagaaaactggggctcaagatctgcggcttcttgcaaaggaccaacagcctggaagagaagagtcgccttgtgagtgccttcaaggagaggcaatcctccaagaacctgctttcctgtgaaaacagcgaccgggatgcccgcttccggcgcacagagactgacttctctaatctgtttgctagagatctgcttccggctaagaacggtgaggagcaaaccgtgcaattcctcctggaagtggtggacatactcctcaactatgtccgcaagacatttgatcgctccaccaaggtgctggactttcatcacccacaccagttgctggaaggcatggagggcttcaacttggagctctctgaccaccccgagtccctggagcagatcctggttgactgcagagacaccttgaagtatggggttcgcacaggtcatcctcgatttttcaaccagctctccactggattggatattattggcctagctggagaatggctgacatcaacggccaataccaacatgtttacatatgaaattgcaccagtgtttgtcctcatggaacaaataacacttaagaagatgagagagatagttggatggtcaagtaaagatggtgatgggatattttctcctgggggcgccatatccaacatgtacagcatcatggctgctcgctacaagtacttcccggaagttaagacaaagggcatggcggctgtgcctaaactggtcctcttcacctcagaacagagtcactattccataaagaaagctggggctgcacttggctttggaactgacaatgtgattttgataaagtgcaatgaaagggggaaaataattccagctgattttgaggcaaaaattcttgaagccaaacagaagggatatgttcccttttatgtcaatgcaactgctggcacgactgtttatggagcttttgatccgatacaagagattgcagatatatgtgagaaatataacctttggttgcatgtcgatgctgcctggggaggtgggctgctcatgtccaggaagcaccgccataaactcaacggcatagaaagggccaactcagtcacctggaaccctcacaagatgatgggcgtgctgttgcagtgctctgccattctcgtcaaggaaaagggtatactccaaggatgcaaccagatgtgtgcaggatacctcttccagccagacaagcagtatgatgtctcctacgacaccggggacaaggcaattcagtgtggccgccacgtggatatcttcaagttctggctgatgtggaaagcaaagggcacagtgggatttgaaaaccagatcaacaaatgcctggaactggctgaatacctctatgccaagattaaaaacagagaagaatttgagatggttttcaatggcgagcctgagcacacaaacgtctgtttttggtatattccacaaagcctcaggggtgtgccagacagccctcaacgacgggaaaagctacacaaggtggctccaaaaatcaaagccctgatgatggagtcaggtacgaccatggttggctaccagccccaaggggacaaggccaacttcttccggatggtcatctccaacccagccgctacccagtctgacattgacttcctcattgaggagatagaaagactgggccaggatctgtaatcatccttcgcagaacatgagtttatgggaatgccttttccctctggcactccagaacaaacctctatatgttgctgaaacacacaggccatttcattgagggaaaacataatatcttgaagaatattgttaaaaccttacttaaagcttgtttgttctagttagcaggaaatagtgttctttttaaaaagttgcacattaggaacagagtatatatgtacagttatacatacctctctctatatatacatgtatagtgagtgtggcttagtaatagatcacggcatgtttcccgctccaagagaattcactttaccttcagcagttaccgaggagctaaacatgctgccaaccagcttgtccaacaactccaggaaaactgtttttcaaaacgccatgtcctaggggccgagggaaatgctgttggtgagaatcgacctcactgtcagcgtttctccacctgaagtgatgatggatgagaaaaaacaccaccaaatgacaagtcacaccctccccattagtatcctgttaggggaaaatagtagcagagtcattgttacaggtgtactatggctgtatttttagagattaatttgtgtagattgtgtaaattcctgttgtctgaccttggtggtgggagggggagactatgtgtcatgatttcaatgattgtttaattgtaggtcaatgaaatatttgcttatttatattcagagatgtaccatgttaaagaggcgtcttgtattttcttcccatttgtaatgtatcttatttatatatgaagtaagttctgaaaactgtttatggtattttcgtgcatttgtgagccaaagagaaaagattaaaattagtgagatttgtatttatattagagtgcccttaaaataatgatttaagcattttactgtctgtaagagaattctaagattgtacataaagtcatatatatggaaatcctgttacttaaatagcatctgctcttctcttacgctctctgtctggctgtacgtctggtgttctcaatgcttttctagcaactgttggataataactagatctcctgtaattttgtagtagttgatgaccaatctctgtgactcgcttagctgaaacctaaggcaacatttccgaagaccttctgaagatctcagataaagtgaccaggctcacaactgtttttgaagaagggaaattcacactgtgcgttttagagtatgcaagaagaatataaataaataaaaatattctccatggagaatttgaacaaaa

SEQ ID NO: 16286 - DNA, 1785 bp, Artificial Sequence
  derived and/or modified sequence
atggccagcagcacccccagcagcagcgccaccagcagcaatgctggagctgaccccaacaccaccaacctgcggcccaccacctatgacacctggtgtggggtggcccacggctgcaccaggaagctgggcctgaagatctgtggcttcctgcagaggaccaacagcctggaggagaagagccggctggtgtctgccttcaaggagcggcagagcagcaagaacctgctgagctgtgagaacagcgacagagatgcccgcttcagaagaacagaaacagacttcagcaacctgtttgcccgggacctgctgcctgccaagaatggagaggagcagacagtgcagttcctgctggaggtggtggacatcctgctgaactacgtgaggaagacctttgacaggagcaccaaggtgctggacttccaccacccccaccagctgctggagggcatggagggcttcaacctggagctgagtgaccaccctgagagcctggagcagatcctggtggactgccgggacaccctgaagtatggagtgaggacaggccacccccgcttcttcaaccagctgagcacaggcctggacatcatcggcctggccggggagtggctgaccagcacagccaacaccaacatgttcacctatgagatcgcccctgtgtttgtgctgatggagcagatcaccctgaagaagatgagggagatcgtgggctggagcagcaaggatggagatggcatcttcagccctgggggcgccatcagcaacatgtacagcatcatggccgcccgctacaagtacttccctgaggtgaagaccaagggcatggctgctgtgcccaagctggtgctcttcaccagcgagcagagccactacagcatcaagaaggccggggccgccctgggctttggaacagacaacgtcatcctgatcaagtgcaatgaaagaggcaagatcatcccagctgactttgaggccaagatcctggaggccaagcagaagggctacgtgcccttctacgtgaatgccacagctggcaccaccgtgtatggagcctttgaccccatccaggagattgctgacatctgtgagaagtacaacctgtggctgcacgtggatgctgcctggggcggcggcctgctgatgagcaggaagcaccgccacaagctgaatggaattgagcgggccaacagcgtgacctggaacccccacaagatgatgggcgtgctgctgcagtgcagcgccatcctggtgaaggagaagggcatcctgcagggctgcaaccagatgtgtgccggctacctgttccagcctgacaagcagtatgatgtgtcctatgacaccggggacaaggccatccagtgtggccgccacgtggacatcttcaagttctggctgatgtggaaggccaagggcaccgtgggctttgagaaccagatcaacaagtgcctggagctggccgagtacctgtatgccaagatcaagaaccgggaggagtttgagatggtgttcaatggagagcctgagcacaccaacgtgtgcttctggtacatcccccagagcctgcggggcgtgcctgacagcccccagaggcgggagaagctgcacaaggtggcccccaagatcaaggccctgatgatggagagcggcaccaccatggtgggctaccagccccagggcgacaaggccaacttcttcaggatggtgatcagcaacccagctgccacccagagcgacatcgacttcctgattgaggagattgagcggctgggccaggacctgtag

SEQ ID NO: 16287 - DNA, 1785 bp, Artificial Sequence
  derived and/or modified sequence
atggccagcagcacccccagcagcagcgccaccagcagcaacgccggggccgaccccaataccacgaatctccggccaaccacctatgatacttggtgtggcgtggcccatggctgcactaggaaactgggattgaaaatctgtgggtttctgcagcgtacaaatagcctagaagaaaagagccgccttgttagtgcttttaaagagaggcagagctctaaaaacctgctcagctgcgagaatagtgacagagatgcccgtttcagacgaacagaaaccgacttctccaacctattcgcaagggatctcctgccggcaaaaaatggtgaggagcaaacagttcagtttctgctggaagtagtggacatactgctgaattacgtgcgtaaaacttttgataggtcgaccaaggtcttggactttcatcacccccaccagctgctcgagggcatggagggttttaatctggaactatcagaccaccctgagtcgctggagcagattttagtcgactgcagagatacattgaagtacggagtcaggacagggcaccctcgtttctttaaccagttgtctaccggcttggacattattggcttggctggagagtggctcacctctaccgctaacacaaacatgttcacttacgagattgcccctgtgtttgtgttaatggagcagataaccctgaaaaagatgagggaaatcgtagggtggtcttctaaagatggcgacgggattttctccccagggggtgcaatcagcaatatgtacagtattatggctgcacgctacaaatatttcccagaagtgaagactaaaggaatggcagccgttccaaaattagtcctgttcacctccgagcagagccattactccataaaaaaagcgggagctgcgctgggttttggtacagataacgtgatccttataaagtgtaatgaacgggggaaaattatccccgctgactttgaggcaaaaatcctagaggctaagcagaagggatatgtcccgttttatgtaaatgctacagccggcactaccgtctacggggctttcgatcctatccaggagatcgccgatatctgtgaaaaatacaacctatggctacacgtggacgctgcgtggggggggggcctgctcatgagtagaaagcaccgccataagctgaacggcattgagcgtgccaacagtgtgacatggaatccccataaaatgatgggcgtgctgttgcagtgctcagcaatactcgtgaaggaaaagggcattttgcagggttgcaatcaaatgtgtgccgggtatttgtttcagcccgataaacaatacgacgtaagctatgacacaggcgacaaggctatacagtgcggtagacatgtggatatatttaagttctggctgatgtggaaggcgaagggaactgtcggctttgagaatcagatcaacaaatgtttggaactggctgaatacctttatgcgaaaatcaaaaacagagaggagttcgaaatggtattcaatggtgaacccgagcacaccaatgtttgtttctggtatatcccccaatccttgcggggtgttccagactcaccccaaagacgagaaaagctgcataaagtggcaccaaagattaaagccctgatgatggaaagcggtaccacgatggtcgggtaccagccacagggcgacaaggcaaacttctttcgaatggtcatttcaaaccccgccgctactcagtccgacatcgattttctcatcgaggagattgaacgtcttgggcaggacctctag

SEQ ID NO: 16288 - DNA, 1785 bp, Artificial Sequence
  derived and/or modified sequence
atggcgagctccaccccttcatcaagtgccacctccagcaacgcaggcgctgatccgaataccacaaacctacggccaacaacgtacgacacctggtgtggggtcgcccacgggtgtacccgaaaacttggactgaaaatatgtggcttcctccagaggaccaattcactggaagaaaaaagccgcctagtttccgcctttaaggagagacagtctagcaagaacctcttgtcatgtgagaatagtgacagagatgccagatttcgaaggacagagactgatttctctaatctgttcgctagagatcttcttcccgctaagaacggagaagagcaaactgtgcagtttctgctggaagtagttgacattctactgaactatgtgcgtaaaaccttcgaccgctctactaaagtgctcgacttccatcacccacatcagctcctggagggaatggaggggttcaacctggagctgtccgaccacccagagagtctggaacagatcctcgtggactgtagagataccctaaagtatggcgtcagaaccggccaccccagattttttaaccaactgtcgaccggactcgatatcattggcctggctggcgagtggcttacatccaccgcaaataccaatatgtttacgtacgagatcgcacctgtctttgtcctcatggagcagattacactgaaaaagatgcgggagatcgtgggttggtcatcgaaggacggcgatgggatatttagccctggaggggcaatcagtaacatgtatagtatcatggcagctcgctacaaatatttcccagaggtgaagactaagggcatggcagccgttccgaagctagtgctgttcacctctgaacagagccattatagcatcaagaaggccggtgcagcactaggctttggcaccgataacgtcatcttgatcaagtgtaacgagagagggaagatcataccagctgactttgaagccaaaattctggaagctaagcaaaaaggatatgttcccttctatgttaatgcgactgccggaacgacagtgtacggcgctttcgaccccattcaggaaatcgcagacatctgcgaaaagtataacctgtggttacatgtggacgcggcttggggagggggattattgatgagcagaaagcatcggcacaaactgaatggaattgaacgggctaactctgtcacatggaatcctcataagatgatgggggtcttgctgcaatgctctgccatcctggtcaaagaaaaggggatacttcagggttgcaaccagatgtgtgctggctacctctttcagccagacaagcagtacgatgtctcatatgatacaggtgacaaggctattcagtgtggcaggcatgtcgacatcttcaagttttggcttatgtggaaagctaagggcactgtgggattcgagaaccagatcaataagtgtctggaattggccgagtacctatatgccaagattaaaaatcgtgaagagtttgagatggtgttcaatggcgaacctgaacacactaacgtgtgcttttggtacatccctcagagcctgagaggagtgcccgatagcccacagcgtagagaaaaactccacaaggttgccccaaaaatcaaagctctaatgatggagtccggcaccactatggttggctatcaaccccagggcgacaaggccaacttttttcgtatggtcattagcaacccagccgcaactcagtccgatatcgacttcctgatcgaggagatcgagcgtctaggtcaggatctgtag

SEQ ID NO: 16289 - DNA, 1785 bp, Artificial Sequence
  derived and/or modified sequence
atggccagcagcacccccagcagcagcgccaccagcagcaacgccggcgccgaccccaacaccaccaacctgagacccaccacctacgacacctggtgcggcgtggcccacggctgcaccagaaagctgggcctgaagatctgcggcttcctgcagagaaccaacagcctggaggagaagagcagactggtgagcgccttcaaggagagacagagcagcaagaacctgctgagctgcgagaacagcgacagagacgccagattcagaagaaccgagaccgacttcagcaacctgttcgccagagacctgctgcccgccaagaacggcgaggagcagaccgtgcagttcctgctggaggtggtggacatcctgctgaactacgtgagaaagaccttcgacagaagcaccaaggtgctggacttccaccacccccaccagctgctggagggcatggagggcttcaacctggagctgagcgaccaccccgagagcctggagcagatcctggtggactgcagagacaccctgaagtacggcgtgagaaccggccaccccagattcttcaaccagctgagcaccggcctggacatcatcggcctggccggcgagtggctgaccagcaccgccaacaccaacatgttcacctacgagatcgcccccgtgttcgtgctgatggagcagatcaccctgaagaagatgagagagatcgtgggctggagcagcaaggacggcgacggcatcttcagccccggcggcgccatcagcaacatgtacagcatcatggccgccagatacaagtacttccccgaggtgaagaccaagggcatggccgccgtgcccaagctggtgctgttcaccagcgagcagagccactacagcatcaagaaggccggcgccgccctgggcttcggcaccgacaacgtgatcctgatcaagtgcaacgagagaggcaagatcatccccgccgacttcgaggccaagatcctggaggccaagcagaagggctacgtgcccttctacgtgaacgccaccgccggcaccaccgtgtacggcgccttcgaccccatccaggagatcgccgacatctgcgagaagtacaacctgtggctgcacgtggacgccgcctggggcggcggcctgctgatgagcagaaagcacagacacaagctgaacggcatcgagagagccaacagcgtgacctggaacccccacaagatgatgggcgtgctgctgcagtgcagcgccatcctggtgaaggagaagggcatcctgcagggctgcaaccagatgtgcgccggctacctgttccagcccgacaagcagtacgacgtgagctacgacaccggcgacaaggccatccagtgcggcagacacgtggacatcttcaagttctggctgatgtggaaggccaagggcaccgtgggcttcgagaaccagatcaacaagtgcctggagctggccgagtacctgtacgccaagatcaagaacagagaggagttcgagatggtgttcaacggcgagcccgagcacaccaacgtgtgcttctggtacatcccccagagcctgagaggcgtgcccgacagcccccagagaagagagaagctgcacaaggtggcccccaagatcaaggccctgatgatggagagcggcaccaccatggtgggctaccagccccagggcgacaaggccaacttcttcagaatggtgatcagcaaccccgccgccacccagagcgacatcgacttcctgatcgaggagatcgagagactgggccaggacctgtag

SEQ ID NO: 16290 - protein, 678 aa, Artificial Sequence
  derived and/or modified sequence
MAPSLSPGPAALRRAPQLLLLLLAAECALAALLPAREATQFLRPRQRRAFQVFEEAKQGHLERECVEELCSREEAREVFENDPETDYFYPRYLDCINKYGSPYTKNSGFATCVQNLPDQCTPNPCDRKGTQACQDLMGNFFCLCKAGWGGRLCDKDVNECSQENGGCLQICHNKPGSFHCSCHSGFELSSDGRTCQDIDECADSEACGEARCKNLPGSYSCLCDEGFAYSSQEKACRDVDECLQGRCEQVCVNSPGSYTCHCDGRGGLKLSQDMDTCEDILPCVPFSVAKSVKSLYLGRMFSGTPVIRLRFKRLQPTRLVAEFDFRTFDPEGILLFAGGHQDSTWIVLALRAGRLELQLRYNGVGRVTSSGPVINHGMWQTISVEELARNLVIKVNRDAVMKIAVAGDLFQPERGLYHLNLTVGGIPFHEKDLVQPINPRLDGCMRSWNWLNGEDTTIQETVKVNTRMQCFSVTERGSFYPGSGFAFYSLDYMRTPLDVGTESTWEVEVVAHIRPAADTGVLFALWAPDLRAVPLSVALVDYHSTKKLKKQLVVLAVEHTALALMEIKVCDGQEHVVTVSLRDGEATLEVDGTRGQSEVSAAQLQERLAVLERHLRSPVLTFAGGLPDVPVTSAPVTAFYRGCMTLEVNRRLLDLDEAAYKHSDITAHSCPPVEPAAA

SEQ ID NO: 16291 - protein, 624 aa, Artificial Sequence
  derived and/or modified sequence
MCMCQASPPPAALAGCLLSSCVQPAREHGGAFSKAEWLSNCINKYGSPYTKNSGFATCVQNLPDQCTPNPCDRKGTQACQDLMGNFFCLCKAGWGGRLCDKDVNECSQENGGCLQICHNKPGSFHCSCHSGFELSSDGRTCQDIDECADSEACGEARCKNLPGSYSCLCDEGFAYSSQEKACRDVDECLQGRCEQVCVNSPGSYTCHCDGRGGLKLSQDMDTCEDILPCVPFSVAKSVKSLYLGRMFSGTPVIRLRFKRLQPTRLVAEFDFRTFDPEGILLFAGGHQDSTWIVLALRAGRLELQLRYNGVGRVTSSGPVINHGMWQTISVEELARNLVIKVNRDAVMKIAVAGDLFQPERGLYHLNLTVGGIPFHEKDLVQPINPRLDGCMRSWNWLNGEDTTIQETVKVNTRMQCFSVTERGSFYPGSGFAFYSLDYMRTPLDVGTESTWEVEVVAHIRPAADTGVLFALWAPDLRAVPLSVALVDYHSTKKLKKQLVVLAVEHTALALMEIKVCDGQEHVVTVSLRDGEATLEVDGTRGQSEVSAAQLQERLAVLERHLRSPVLTFAGGLPDVPVTSAPVTAFYRGCMTLEVNRRLLDLDEAAYKHSDITAHSCPPVEPAAA

SEQ ID NO: 16292 - protein, 721 aa, Artificial Sequence
  derived and/or modified sequence
MAPSLSPGPAALRRAPQLLLLLLAAECALAALLPAREATQFLRPRQRRAFQVFEEAKQGHLERECVEELCSREEAREVFENDPETDYFYPRYLDCINKYGSPYTKNSGFATCVQNLPDQCTPNPCDRKGTQACQDLMGNFFCLCKAGWGGRLCDKDVNECSQENGGCLQICHNKPGSFHCSCHSGFELSSDGRTCQDIDECADSEACGEARCKNLPGSYSCLCDEGFAYSSQEKACRDVDECLQGRCEQVCVNSPGSYTCHCDGRGGLKLSQDMDTCELEAGWPLPRHRRDSGPAARPGRGAQGSRSEGHIPDRRGPRPWQDILPCVPFSVAKSVKSLYLGRMFSGTPVIRLRFKRLQPTRLVAEFDFRTFDPEGILLFAGGHQDSTWIVLALRAGRLELQLRYNGVGRVTSSGPVINHGMWQTISVEELARNLVIKVNRDAVMKIAVAGDLFQPERGLYHLNLTVGGIPFHEKDLVQPINPRLDGCMRSWNWLNGEDTTIQETVKVNTRMQCFSVTERGSFYPGSGFAFYSLDYMRTPLDVGTESTWEVEVVAHIRPAADTGVLFALWAPDLRAVPLSVALVDYHSTKKLKKQLVVLAVEHTALALMEIKVCDGQEHVVTVSLRDGEATLEVDGTRGQSEVSAAQLQERLAVLERHLRSPVLTFAGGLPDVPVTSAPVTAFYRGCMTLEVNRRLLDLDEAAYKHSDITAHSCPPVEPAAA

SEQ ID NO: 16293 - protein, 379 aa, Artificial Sequence
  derived and/or modified sequence
MFSGTPVIRLRFKRLQPTRLVAEFDFRTFDPEGILLFAGGHQDSTWIVLALRAGRLELQLRYNGVGRVTSSGPVINHGMWQTISVEELARNLVIKVNRDAVMKIAVAGDLFQPERGLYHLNLTVGGIPFHEKDLVQPINPRLDGCMRSWNWLNGEDTTIQETVKVNTRMQCFSVTERGSFYPGSGFAFYSLDYMRTPLDVGTESTWEVEVVAHIRPAADTGVLFALWAPDLRAVPLSVALVDYHSTKKLKKQLVVLAVEHTALALMEIKVCDGQEHVVTVSLRDGEATLEVDGTRGQSEVSAAQLQERLAVLERHLRSPVLTFAGGLPDVPVTSAPVTAFYRGCMTLEVNRRLLDLDEAAYKHSDITAHSCPPVEPAAA

SEQ ID NO: 16294 - protein, 405 aa, Artificial Sequence
  derived and/or modified sequence
MDTCEDILPCVPFSVAKSVKSLYLGRMFSGTPVIRLRFKRLQPTRLVAEFDFRTFDPEGILLFAGGHQDSTWIVLALRAGRLELQLRYNGVGRVTSSGPVINHGMWQTISVEELARNLVIKVNRDAVMKIAVAGDLFQPERGLYHLNLTVGGIPFHEKDLVQPINPRLDGCMRSWNWLNGEDTTIQETVKVNTRMQCFSVTERGSFYPGSGFAFYSLDYMRTPLDVGTESTWEVEVVAHIRPAADTGVLFALWAPDLRAVPLSVALVDYHSTKKLKKQLVVLAVEHTALALMEIKVCDGQEHVVTVSLRDGEATLEVDGTRGQSEVSAAQLQERLAVLERHLRSPVLTFAGGLPDVPVTSAPVTAFYRGCMTLEVNRRLLDLDEAAYKHSDITAHSCPPVEPAAA

SEQ ID NO: 16295 - DNA, 2037 bp, Artificial Sequence
  derived and/or modified sequence
atggccccaagtctgagtccgggaccagctgcgctgagaagggccccccagctcttgcttcttctgttggcagcagaatgcgcgctcgccgcactgctgcctgctagagaggccacacaattcctgaggccgaggcagcggagggccttccaggtgttcgaagaagctaagcaagggcacttggaacgagagtgtgtcgaggaactttgcagcagggaggaggctcgagaggtgtttgaaaacgaccccgagaccgattatttctaccctaggtatctcgattgcattaataagtacgggtccccttatacaaaaaacagtggttttgccacttgtgtgcaaaacctgcctgaccagtgtacacccaatccatgtgaccgcaaggggactcaggcgtgccaggatttgatggggaactttttctgtttatgcaaggctggttggggaggacggttatgtgacaaggatgtgaacgagtgctctcaggagaatggggggtgcctgcaaatttgccataacaagcccgggtcatttcattgttcttgtcactccggcttcgagctgagtagcgatggacggacatgccaggatattgacgaatgtgctgactcagaggcctgtggtgaagctcgctgtaagaatttgccgggatcctactcttgtctgtgtgatgaaggcttcgcctactcaagccaggaaaaagcatgcagggatgtcgatgagtgcctgcagggtcgctgtgaacaggtgtgtgtgaatagtcccggatcttacacctgtcattgcgacggacgagggggtcttaagctgtcccaggacatggacacttgtgaagatatacttccatgcgtgcctttctccgtcgccaaaagcgtgaaaagcttgtatttgggccggatgttctccggaacccccgttattaggctgcggttcaaacggctgcagccaacccggttggtggcagagtttgacttcaggacatttgacccagagggcattctgctttttgcagggggccaccaggactccacatggattgttctcgccttgagagccggtaggttagaactgcagttgcggtataatggagtggggcgcgtgacatcgtctgggcctgtgatcaatcacggaatgtggcagaccatctctgtagaggagctcgctagaaacttagtgataaaagtaaaccgggatgcggtgatgaaaatcgcagttgcaggtgacctgtttcagcctgaaaggggcctgtatcatctcaacctgaccgtgggagggatccccttccacgaaaaagacttggtacagcccatcaacccacggctcgatggctgtatgcgttcctggaattggctgaacggagaagatactactatacaggaaactgttaaggtgaacacgcggatgcagtgttttagtgtgactgagaggggatctttctatcctgggtctggcttcgcgttttatagtctcgactatatgcgcacgccactggacgttggaaccgaatcaacgtgggaagtggaagttgtagcgcatatacggccagcggccgatacaggtgtcttattcgcgttatgggccccggacttgagagccgttcctctgagcgtggcgctggtggattaccattccactaaaaagctcaaaaagcaattagtagtcctggcagtggaacatacggctctagcactgatggagattaaagtctgcgacggacaggagcacgttgttactgtctccctgagagacggtgaagcaactttggaagtggacgggacgcgtggccagtccgaagtgtcagccgcccagctgcaggagagactggccgtactggagcgccacctgcgttcgccagtacttaccttcgccgggggactcccggatgtgcctgtgacaagtgctcctgtgacagccttctatagagggtgcatgacactggaagtaaaccgtcgtctgctggatctcgacgaagctgcctataagcactcagatattactgcccattcatgccctcccgtggaaccagccgcagcctag

SEQ ID NO: 16296 - DNA, 1875 bp, Artificial Sequence
  derived and/or modified sequence
atgtgcatgtgccaagcctctccccccccagccgccttggctggatgtctcctgtctagctgcgtgcaacccgctagggagcatgggggcgccttctcaaaggcggagtggttaagtaattgtattaacaagtacggctcgccttacacgaagaattccgggtttgccacatgcgtgcagaatttgccagatcagtgcaccccgaacccgtgtgataggaagggaacccaggcatgccaggatttaatgggaaactttttctgtctctgtaaggcgggctgggggggacggctttgcgataaggatgtgaatgaatgcagccaagagaacggaggctgccttcagatttgccacaataagccgggtagcttccactgttcctgtcattcgggtttcgaactcagttccgatgggcgcacttgccaagacatcgatgaatgtgcagacagtgaggcctgcggagaggcacgttgcaagaatttgcctggctcttacagctgcctgtgcgatgaaggctttgcctactcctcccaggagaaggcatgcagggacgtggatgagtgcctgcagggacgctgtgaacaggtctgtgtgaactcccccggcagctatacatgccactgcgatgggaggggtggcctgaaattgtcccaggacatggacacgtgtgaagacatcctcccatgcgtgccatttagtgtggccaaaagtgtaaaaagcctatacttgggcaggatgttctccgggacacccgtgattcgactaagatttaaacggttgcaaccaacccgattggtggccgaattcgattttaggaccttcgatccagagggaatattgctcttcgcagggggccatcaggacagtacatggatagtgctcgctctgagggctggacgattagagctacagttgagatacaacggtgtgggtagggtgaccagctccggccctgtgattaatcatggcatgtggcagaccatttcagtggaagagctcgctcgaaatctggtgatcaaagttaaccgtgatgccgtcatgaagattgctgtggccggggatctgttccagcccgaaagaggactgtaccatctgaacctcacagtggggggaatcccctttcacgaaaaagacctggtgcagcctattaaccctcgcctggatggctgcatgcggagttggaattggcttaacggggaggataccacgatccaggaaaccgtcaaagtcaacaccaggatgcagtgcttttccgtgacagaacgtggttcgttctatccgggttcgggctttgccttttatagcctagactatatgaggaccccactggatgtgggcacggagtcaacctgggaagtggaagtagtggctcatattcgcccagcagccgatactggcgtactttttgctctatgggctcccgatctgcgagctgttccactgagcgtggccctggtcgattatcactcgacaaaaaaactgaaaaaacagctggttgtcctcgctgttgagcacactgcccttgccctcatggagataaaggtctgtgacggccaggagcacgtggtgacagtgtctctgagagatggcgaagccactctggaggtcgacggaactagaggacagagcgaggtatcagctgcccagttacaggaacggctagctgtcctggagcgacacttacgttcgccggtcttaaccttcgctgggggccttcccgatgtacccgttacctctgcgccagtcactgcattttatagaggttgtatgacccttgaagtcaatcggcgacttttggatctcgatgaggccgcatataagcactccgacataaccgctcactcatgcccacctgttgaacctgccgctgcctag

SEQ ID NO: 16297 - DNA, 2166 bp, Artificial Sequence
  derived and/or modified sequence
atggccccttcgctgagccccggcccagccgccttaaggcgcgccccacagttactgctgctgcttctcgcagcagagtgcgccttggccgcactgttgcctgcaagggaggcaacccaattccttagacctagacagcgaagagctttccaagttttcgaagaagccaaacagggccatttagaaagggagtgtgtggaggaactttgtagtagggaggaagcacgggaagtgtttgaaaatgaccccgaaactgattatttttaccctaggtatcttgattgtatcaacaagtatggatctccctatactaagaatagcggttttgctacttgcgtgcagaacctgccagaccagtgcacgcctaacccttgtgacagaaaaggtactcaggcatgccaggatttaatgggcaattttttctgtctctgcaaggcaggctggggcgggagactctgcgataaagacgtgaacgagtgcagtcaggagaacggtggctgcttgcagatatgtcacaacaagccagggtccttccattgttcctgccatagtgggttcgagctatctagcgacggcagaacatgccaggatattgatgagtgtgccgattctgaggcctgtggggaggcccgttgcaagaacctgcccggaagctacagctgcctgtgcgacgaagggtttgcctatagctcccaagagaaggcatgcagggatgtggatgagtgcttacagggtcgctgcgaacaagtgtgcgtcaatagccccggatcatacacctgtcactgtgacgggcgcggggggctaaagttgagtcaggacatggatacttgcgagctggaggcggggtggccacttccgcggcaccgacgtgacagtgggcctgccgccaggcctggccgcggggcacagggttcacggtcagaaggtcacatccccgataggagaggccccagaccatggcaggacatcctcccatgtgtcccctttagcgtggccaaaagtgtgaagtccctgtatttgggccgaatgttctcaggcacccctgtgatacggctgagattcaaaagacttcaaccaactagactggtggccgaatttgacttcaggacttttgatccagaggggattctgctgttcgccggcggtcaccaagacagtacttggatcgtgttggccttgcgggctgggcgtctcgagctccagcttcgatataatggtgtcggccgcgttaccagctcaggccctgtcatcaatcacggcatgtggcagaccatcagtgtggaggagctggctcgtaatctggtcatcaaggtgaatcgagacgctgtaatgaagatagcggttgctggcgacctgtttcagccagaaaggggcctctaccacctgaatcttacggtcggcggcatcccctttcatgagaaagacctagttcagcctattaaccctcgactggacggatgcatgaggagttggaattggctgaacggcgaggataccactatccaggaaacagtgaaggtaaatacacggatgcagtgcttttcggtcacagagagaggatcattctatccaggctcagggtttgccttctattcattagactatatgagaactccactggatgtgggaaccgaaagtacgtgggaggtggaagtcgtggcgcacattaggcccgccgcagacactggagtgcttttcgcgttgtgggctcctgatcttagagctgtgcccctctccgtggctctggttgattaccattcgaccaaaaagctgaaaaaacaactggtcgttctggccgttgaacacactgccctcgccctgatggagataaaggtgtgtgacgggcaagagcatgtggtgacggtgtccctgagagatggtgaggcaaccttagaggtggatgggacccgcggccagtccgaggtgagtgctgctcaactgcaagaacgtctggccgtccttgagcgccaccttaggtcccctgtactgactttcgctgggggtcttcctgatgtgccagtcacttcagcacccgtaaccgccttctatagagggtgcatgacgcttgaagttaacagacggttacttgatctggatgaagccgcctataagcacagcgatattactgcgcacagttgcccacccgttgaacctgccgctgcttag

SEQ ID NO: 16298 - DNA, 1140 bp, Artificial Sequence
  derived and/or modified sequence
atgttctccggtacccctgtcatccggcttagattcaagcggttacagcccactcgactagtggcagagtttgattttagaaccttcgaccccgaggggatactgcttttcgccgggggtcatcaggactcaacttggattgtacttgctctgcgggccggacgactggaactacagttgcggtacaatggagtcgggagggttactagctcgggcccagttattaatcacggaatgtggcaaactatcagcgtcgaggagcttgccaggaacttggtcattaaagtgaatagggacgccgtgatgaagattgccgtggcgggtgacctttttcagcctgaaaggggcctctaccacctgaacttaacagttggaggtatacctttccatgagaaagatctcgtccaacccataaacccccggctggatgggtgtatgagatcctggaattggctaaatggagaagatacgacaatccaggaaacagttaaggtgaataccaggatgcagtgctttagcgtcactgagagagggagtttctatcccggaagtggcttcgctttttattccctagactatatgagaacccccttagatgtgggaaccgagagtacctgggaggttgaggtggtagcacacatccggccggccgctgacacaggcgtgttattcgcgttgtgggcccctgacctgagggcggttccactgagtgttgcactggtcgactatcactccactaagaaattaaaaaaacaacttgtcgttttagctgttgaacacacagcacttgcactcatggagattaaggtctgcgacgggcaggaacacgtggtaaccgtatccctgagagacggggaggccactttagaagtggacgggacaagaggccaatctgaagtctccgcagctcagttgcaggagcgcctggcagtgctcgaacgtcacctgcgaagccccgtgctgaccttcgcaggcggccttcctgatgtacctgttacctctgcccccgtcacggctttttatagaggatgcatgactctcgaggtgaatagacgcctcctggatctagacgaagcagcttacaaacatagcgatattacagcacacagttgccccccagtggagccagccgctgcctag

SEQ ID NO: 16299 - DNA, 1218 bp, Artificial Sequence
  derived and/or modified sequence
atggacacttgcgaggacatccttccttgtgtgccatttagtgtggccaagagtgtgaagagcctgtacctggggcgtatgttcagcgggactcctgtaatccgcctgagattcaagaggcttcaacctactcgactggtggctgagttcgattttagaacgttcgatcctgaaggcatcctacttttcgccggcgggcatcaggattctacatggatcgtcctagctctccgggcaggccgccttgagcttcaacttcgatacaacggagttggtcgggtgacgagtagtggacctgtaatcaatcatggcatgtggcagacgatttccgttgaagagctggcacgtaatctggtcatcaaggtcaatagggacgccgtcatgaaaatcgccgtcgccggagatctatttcagcccgaacggggactttaccatttgaacttaacagtaggtgggattccatttcatgagaaagatctggttcagccaattaaccctaggctggatggctgcatgcggtcttggaactggcttaatggggaggatacaaccattcaagagactgttaaggtaaacacgcgaatgcagtgtttttccgtgactgagcggggttccttttatccagggtccggatttgccttctactctcttgactacatgaggacccccttagacgtggggacggaaagcacgtgggaagtggaagtagtcgcccatattcggccagccgcggacactggagtcttatttgcactctgggcaccggaccttcgcgccgtccctctcagtgtagctctggtggattaccattctacaaaaaagcttaagaagcagctcgtggtccttgcagtcgagcacactgccctagctcttatggaaataaaggtctgcgatgggcaggagcacgtcgttaccgtgagccttagggacggcgaggcaactctagaagtagacggcactagagggcagtctgaggtatctgccgcacagcttcaggagcgccttgcagtgttggagcggcatctccgcagccctgtgctcacttttgctggtggcctccccgacgttccagtaacctctgccccagtcacggcattttacagggggtgcatgacacttgaggtgaaccgccgcttactcgacctggatgaggccgcgtataaacactccgatatcaccgctcattcatgtcccccggtggaacctgccgcagcttag

SEQ ID NO: 16300 - DNA, 2490 bp, Artificial Sequence
  derived and/or modified sequence
gcttgaggtgccgcagccgccgccgccgccgccgccgcgatgtgaccttcagggccgccaggacgggatgaccggagcctccgccccgcggcgcccgcggctcgcctcggcctcccgggcgctctgaccgcgcgtccccggcccgccatggccccttcgctctcgcccgggcccgccgccctgcgccgcgcgccgcagctgctgctgctgctgctggccgcggagtgcgcgcttgccgcgctgttgccggcgcgcgaggccacgcagttcctgcggcccaggcagcgccgcgcctttcaggtcttcgaggaggccaagcagggccacctggagagggagtgcgtggaggagctgtgcagccgcgaggaggcgcgggaggtgttcgagaacgaccccgagacggattatttttacccaagatacttagactgcatcaacaagtatgggtctccgtacaccaaaaactcaggcttcgccacctgcgtgcaaaacctgcctgaccagtgcacgcccaacccctgcgataggaaggggacccaagcctgccaggacctcatgggcaacttcttctgcctgtgtaaagctggctgggggggccggctctgcgacaaagatgtcaacgaatgcagccaggagaacgggggctgcctccagatctgccacaacaagccgggtagcttccactgttcctgccacagcggcttcgagctctcctctgatggcaggacctgccaagacatagacgagtgcgcagactcggaggcctgcggggaggcgcgctgcaagaacctgcccggctcctactcctgcctctgtgacgagggctttgcgtacagctcccaggagaaggcttgccgagatgtggacgagtgtctgcagggccgctgtgagcaggtctgcgtgaactccccagggagctacacctgccactgtgacgggcgtgggggcctcaagctgtcccaggacatggacacctgtgaggacatcttgccgtgcgtgcccttcagcgtggccaagagtgtgaagtccttgtacctgggccggatgttcagtgggacccccgtgatccgactgcgcttcaagaggctgcagcccaccaggctggtagctgagtttgacttccggacctttgaccccgagggcatcctcctctttgccggaggccaccaggacagcacctggatcgtgctggccctgagagccggccggctggagctgcagctgcgctacaacggtgtcggccgtgtcaccagcagcggcccggtcatcaaccatggcatgtggcagacaatctctgttgaggagctggcgcggaatctggtcatcaaggtcaacagggatgctgtcatgaaaatcgcggtggccggggacttgttccaaccggagcgaggactgtatcatctgaacctgaccgtgggaggtattcccttccatgagaaggacctcgtgcagcctataaaccctcgtctggatggctgcatgaggagctggaactggctgaacggagaagacaccaccatccaggaaacggtgaaagtgaacacgaggatgcagtgcttctcggtgacggagagaggctctttctaccccgggagcggcttcgccttctacagcctggactacatgcggacccctctggacgtcgggactgaatcaacctgggaagtagaagtcgtggctcacatccgcccagccgcagacacaggcgtgctgtttgcgctctgggcccccgacctccgtgccgtgcctctctctgtggcactggtagactatcactccacgaagaaactcaagaagcagctggtggtcctggccgtggagcatacggccttggccctaatggagatcaaggtctgcgacggccaagagcacgtggtcaccgtctcgctgagggacggtgaggccaccctggaggtggacggcaccaggggccagagcgaggtgagcgccgcgcagctgcaggagaggctggccgtgctcgagaggcacctgcggagccccgtgctcacctttgctggcggcctgccagatgtgccggtgacttcagcgccagtcaccgcgttctaccgcggctgcatgacactggaggtcaaccggaggctgctggacctggacgaggcggcgtacaagcacagcgacatcacggcccactcctgcccccccgtggagcccgccgcagcctaggcccccacgggacgcggcaggcttctcagtctctgtccgagacagccgggaggagcctgggggctcctcaccacgtggggccatgctgagagctgggctttcctctgtgaccatcccggcctgtaacatatctgtaaatagtgagatggacttggggcctctgacgccgcgcactcagccgtgggcccgggcgcggggaggccggcgcagcgcagagcgggctcgaagaaaataattctctattatttttattaccaagcgcttctttctgactctaaaatatggaaaataaaatatttacagaaa

SEQ ID NO: 16301 - DNA, 2188 bp, Artificial Sequence
  derived and/or modified sequence
atgtgcatgtgccaggcctcgcctccccccgccgccctagcgggatgtctgctgtcaagctgtgttcagccagccagagagcatggaggggctttctccaaagcagagtggctttccaactgcatcaacaagtatgggtctccgtacaccaaaaactcaggcttcgccacctgcgtgcaaaacctgcctgaccagtgcacgcccaacccctgcgataggaaggggacccaagcctgccaggacctcatgggcaacttcttctgcctgtgtaaagctggctgggggggccggctctgcgacaaagatgtcaacgaatgcagccaggagaacgggggctgcctccagatctgccacaacaagccgggtagcttccactgttcctgccacagcggcttcgagctctcctctgatggcaggacctgccaagacatagacgagtgcgcagactcggaggcctgcggggaggcgcgctgcaagaacctgcccggctcctactcctgcctctgtgacgagggctttgcgtacagctcccaggagaaggcttgccgagatgtggacgagtgtctgcagggccgctgtgagcaggtctgcgtgaactccccagggagctacacctgccactgtgacgggcgtgggggcctcaagctgtcccaggacatggacacctgtgaggacatcttgccgtgcgtgcccttcagcgtggccaagagtgtgaagtccttgtacctgggccggatgttcagtgggacccccgtgatccgactgcgcttcaagaggctgcagcccaccaggctggtagctgagtttgacttccggacctttgaccccgagggcatcctcctctttgccggaggccaccaggacagcacctggatcgtgctggccctgagagccggccggctggagctgcagctgcgctacaacggtgtcggccgtgtcaccagcagcggcccggtcatcaaccatggcatgtggcagacaatctctgttgaggagctggcgcggaatctggtcatcaaggtcaacagggatgctgtcatgaaaatcgcggtggccggggacttgttccaaccggagcgaggactgtatcatctgaacctgaccgtgggaggtattcccttccatgagaaggacctcgtgcagcctataaaccctcgtctggatggctgcatgaggagctggaactggctgaacggagaagacaccaccatccaggaaacggtgaaagtgaacacgaggatgcagtgcttctcggtgacggagagaggctctttctaccccgggagcggcttcgccttctacagcctggactacatgcggacccctctggacgtcgggactgaatcaacctgggaagtagaagtcgtggctcacatccgcccagccgcagacacaggcgtgctgtttgcgctctgggcccccgacctccgtgccgtgcctctctctgtggcactggtagactatcactccacgaagaaactcaagaagcagctggtggtcctggccgtggagcatacggccttggccctaatggagatcaaggtctgcgacggccaagagcacgtggtcaccgtctcgctgagggacggtgaggccaccctggaggtggacggcaccaggggccagagcgaggtgagcgccgcgcagctgcaggagaggctggccgtgctcgagaggcacctgcggagccccgtgctcacctttgctggcggcctgccagatgtgccggtgacttcagcgccagtcaccgcgttctaccgcggctgcatgacactggaggtcaaccggaggctgctggacctggacgaggcggcgtacaagcacagcgacatcacggcccactcctgcccccccgtggagcccgccgcagcctaggcccccacgggacgcggcaggcttctcagtctctgtccgagacagccgggaggagcctgggggctcctcaccacgtggggccatgctgagagctgggctttcctctgtgaccatcccggcctgtaacatatctgtaaatagtgagatggacttggggcctctgacgccgcgcactcagccgtgggcccgggcgcggggaggccggcgcagcgcagagcgggctcgaagaaaataattctctattatttttattaccaagcgcttctttctgactctaaaatatggaaaataaaatatttacagaaagctttgt

SEQ ID NO: 16302 - DNA, 2632 bp, Artificial Sequence
  derived and/or modified sequence
ccgagcgcttgaggtgccgcagccgccgccgccgccgccgccgcgatgtgaccttcagggccgccaggacgggatgaccggagcctccgccccgcggcgcccgcggctcgcctcggcctcccgggcgctctgaccgcgcgtccccggcccgccatggccccttcgctctcgcccgggcccgccgccctgcgccgcgcgccgcagctgctgctgctgctgctggccgcggagtgcgcgcttgccgcgctgttgccggcgcgcgaggccacgcagttcctgcggcccaggcagcgccgcgcctttcaggtcttcgaggaggccaagcagggccacctggagagggagtgcgtggaggagctgtgcagccgcgaggaggcgcgggaggtgttcgagaacgaccccgagacggattatttttacccaagatacttagactgcatcaacaagtatgggtctccgtacaccaaaaactcaggcttcgccacctgcgtgcaaaacctgcctgaccagtgcacgcccaacccctgcgataggaaggggacccaagcctgccaggacctcatgggcaacttcttctgcctgtgtaaagctggctgggggggccggctctgcgacaaagatgtcaacgaatgcagccaggagaacgggggctgcctccagatctgccacaacaagccgggtagcttccactgttcctgccacagcggcttcgagctctcctctgatggcaggacctgccaagacatagacgagtgcgcagactcggaggcctgcggggaggcgcgctgcaagaacctgcccggctcctactcctgcctctgtgacgagggctttgcgtacagctcccaggagaaggcttgccgagatgtggacgagtgtctgcagggccgctgtgagcaggtctgcgtgaactccccagggagctacacctgccactgtgacgggcgtgggggcctcaagctgtcccaggacatggacacctgtgagctagaggcggggtggccactcccgaggcacaggagggacagtggacccgctgcgcggccggggcgtggggctcaggggagcaggagtgaaggccacatccccgaccggcgtggcccccgtccgtggcaggacatcttgccgtgcgtgcccttcagcgtggccaagagtgtgaagtccttgtacctgggccggatgttcagtgggacccccgtgatccgactgcgcttcaagaggctgcagcccaccaggctggtagctgagtttgacttccggacctttgaccccgagggcatcctcctctttgccggaggccaccaggacagcacctggatcgtgctggccctgagagccggccggctggagctgcagctgcgctacaacggtgtcggccgtgtcaccagcagcggcccggtcatcaaccatggcatgtggcagacaatctctgttgaggagctggcgcggaatctggtcatcaaggtcaacagggatgctgtcatgaaaatcgcggtggccggggacttgttccaaccggagcgaggactgtatcatctgaacctgaccgtgggaggtattcccttccatgagaaggacctcgtgcagcctataaaccctcgtctggatggctgcatgaggagctggaactggctgaacggagaagacaccaccatccaggaaacggtgaaagtgaacacgaggatgcagtgcttctcggtgacggagagaggctctttctaccccgggagcggcttcgccttctacagcctggactacatgcggacccctctggacgtcgggactgaatcaacctgggaagtagaagtcgtggctcacatccgcccagccgcagacacaggcgtgctgtttgcgctctgggcccccgacctccgtgccgtgcctctctctgtggcactggtagactatcactccacgaagaaactcaagaagcagctggtggtcctggccgtggagcatacggccttggccctaatggagatcaaggtctgcgacggccaagagcacgtggtcaccgtctcgctgagggacggtgaggccaccctggaggtggacggcaccaggggccagagcgaggtgagcgccgcgcagctgcaggagaggctggccgtgctcgagaggcacctgcggagccccgtgctcacctttgctggcggcctgccagatgtgccggtgacttcagcgccagtcaccgcgttctaccgcggctgcatgacactggaggtcaaccggaggctgctggacctggacgaggcggcgtacaagcacagcgacatcacggcccactcctgcccccccgtggagcccgccgcagcctaggcccccacgggacgcggcaggcttctcagtctctgtccgagacagccgggaggagcctgggggctcctcaccacgtggggccatgctgagagctgggctttcctctgtgaccatcccggcctgtaacatatctgtaaatagtgagatggacttggggcctctgacgccgcgcactcagccgtgggcccgggcgcggggaggccggcgcagcgcagagcgggctcgaagaaaataattctctattatttttattaccaagcgcttctttctgactctaaaatatggaaaataaaatatttacagaaagctttgt

SEQ ID NO: 16303 - DNA, 2505 bp, Artificial Sequence
  derived and/or modified sequence
cacaccgacctgtcacaccggtgcctgtcacaccactgcctgtcacactgacttgtcaccggtgtctgtcacaccgacctgtcacactggtgcctgtcacactggtgcctgtcacaccgacctgtcacaccggtgcctgtcacaccgacctgtcacactgacctgtcacaccggtaggaatgcagtacccacatgtggacgtttctgggcagggcggctcttgtctttcctcttcagcctgggcctgtgcctgggggttgatgagagtgagcatttatttaaaaagcaaaaccacaggtggaaagagtcaccaggacagcttctcggagtcgcagacctgggatgcagccgtggggctcttgggtctgggctgcgacgttcagggcttccagccagccctcgccttgaggttctttgcctcgctgcctcatgtactcatgcagagggtgtcggacccctgcgagatgtccagctcaccctggctgcccacggtgggcagggcaggcctggctcagccccagcccctccatcttccaggggtgtcagctcacaccggctttggttctgtcccccttcgggcagcgtggagaaaccacagcccagaacagggaactttccaggacagccatcttcaaggcatccatatctatttcataatagtgtatactttttaatgattctctgtaatttttgtatgcttgaaatatttcataatttaaaaataaagggtcaagggaaatgagcagggaaggagatgacggggacccccgagaagccctgtgggaagcggctgctgcaagcccgcccttcacctgggagtcccagtggggcaggtgtgacagcctctggggtctcagcagctagaggcggggtggccactcccgaggcacaggagggacagtggacccgctgcgcggccggggcgtggggctcaggggagcaggagtgaaggccacatccccgaccggcgtggcccccgtccgtggcaggacatcttgccgtgcgtgcccttcagcgtggccaagagtgtgaagtccttgtacctgggccggatgttcagtgggacccccgtgatccgactgcgcttcaagaggctgcagcccaccaggctggtagctgagtttgacttccggacctttgaccccgagggcatcctcctctttgccggaggccaccaggacagcacctggatcgtgctggccctgagagccggccggctggagctgcagctgcgctacaacggtgtcggccgtgtcaccagcagcggcccggtcatcaaccatggcatgtggcagacaatctctgttgaggagctggcgcggaatctggtcatcaaggtcaacagggatgctgtcatgaaaatcgcggtggccggggacttgttccaaccggagcgaggactgtatcatctgaacctgaccgtgggaggtattcccttccatgagaaggacctcgtgcagcctataaaccctcgtctggatggctgcatgaggagctggaactggctgaacggagaagacaccaccatccaggaaacggtgaaagtgaacacgaggatgcagtgcttctcggtgacggagagaggctctttctaccccgggagcggcttcgccttctacagcctggactacatgcggacccctctggacgtcgggactgaatcaacctgggaagtagaagtcgtggctcacatccgcccagccgcagacacaggcgtgctgtttgcgctctgggcccccgacctccgtgccgtgcctctctctgtggcactggtagactatcactccacgaagaaactcaagaagcagctggtggtcctggccgtggagcatacggccttggccctaatggagatcaaggtctgcgacggccaagagcacgtggtcaccgtctcgctgagggacggtgaggccaccctggaggtggacggcaccaggggccagagcgaggtgagcgccgcgcagctgcaggagaggctggccgtgctcgagaggcacctgcggagccccgtgctcacctttgctggcggcctgccagatgtgccggtgacttcagcgccagtcaccgcgttctaccgcggctgcatgacactggaggtcaaccggaggctgctggacctggacgaggcggcgtacaagcacagcgacatcacggcccactcctgcccccccgtggagcccgccgcagcctaggcccccacgggacgcggcaggcttctcagtctctgtccgagacagccgggaggagcctgggggctcctcaccacgtggggccatgctgagagctgggctttcctctgtgaccatcccggcctgtaacatatctgtaaatagtgagatggacttggggcctctgacgccgcgcactcagccgtgggcccgggcgcggggaggccggcgcagcgcagagcgggctcgaagaaaataattctctattatttttattaccaagcgcttctttctgactctaaaatatggaaaataaaatatttacagaaagctttgt

SEQ ID NO: 16304 - DNA, 2170 bp, Artificial Sequence
  derived and/or modified sequence
ttgattgaaaccagtaaatgcttctctttggggttggggttttagtttcaaatgcccccggggggttactttttacggccccgtgtcctgtagcaccgtcatttaaatggaacagcacagcgtgcaccgccgccccccacccctccaccaagcagggcccttcccagctctccacctgctgggctgaagtcagccttcccagccgggccttgatcagaagcgtgcaccaacaccccgggagctgcccggtcaggggaggagggcagggaaatggggccagggcgcgctggccccacagagtctggatgcgacctctgggtggtgccctggccagtccctgcagccgcctgccccagccccgtctgagatgccgctgtgctgcggttggccggtttttttttgcttgcagacatagacgagtgcgcagactcggaggcctgcggggaggcgcgctgcaagaacctgcccggctcctactcctgcctctgtgacgagggctttgcgtacagctcccaggagaaggcttgccgagatgtggacgagtgtctgcagggccgctgtgagcaggtctgcgtgaactccccagggagctacacctgccactgtgacgggcgtgggggcctcaagctgtcccaggacatggacacctgtgaggacatcttgccgtgcgtgcccttcagcgtggccaagagtgtgaagtccttgtacctgggccggatgttcagtgggacccccgtgatccgactgcgcttcaagaggctgcagcccaccaggctggtagctgagtttgacttccggacctttgaccccgagggcatcctcctctttgccggaggccaccaggacagcacctggatcgtgctggccctgagagccggccggctggagctgcagctgcgctacaacggtgtcggccgtgtcaccagcagcggcccggtcatcaaccatggcatgtggcagacaatctctgttgaggagctggcgcggaatctggtcatcaaggtcaacagggatgctgtcatgaaaatcgcggtggccggggacttgttccaaccggagcgaggactgtatcatctgaacctgaccgtgggaggtattcccttccatgagaaggacctcgtgcagcctataaaccctcgtctggatggctgcatgaggagctggaactggctgaacggagaagacaccaccatccaggaaacggtgaaagtgaacacgaggatgcagtgcttctcggtgacggagagaggctctttctaccccgggagcggcttcgccttctacagcctggactacatgcggacccctctggacgtcgggactgaatcaacctgggaagtagaagtcgtggctcacatccgcccagccgcagacacaggcgtgctgtttgcgctctgggcccccgacctccgtgccgtgcctctctctgtggcactggtagactatcactccacgaagaaactcaagaagcagctggtggtcctggccgtggagcatacggccttggccctaatggagatcaaggtctgcgacggccaagagcacgtggtcaccgtctcgctgagggacggtgaggccaccctggaggtggacggcaccaggggccagagcgaggtgagcgccgcgcagctgcaggagaggctggccgtgctcgagaggcacctgcggagccccgtgctcacctttgctggcggcctgccagatgtgccggtgacttcagcgccagtcaccgcgttctaccgcggctgcatgacactggaggtcaaccggaggctgctggacctggacgaggcggcgtacaagcacagcgacatcacggcccactcctgcccccccgtggagcccgccgcagcctaggcccccacgggacgcggcaggcttctcagtctctgtccgagacagccgggaggagcctgggggctcctcaccacgtggggccatgctgagagctgggctttcctctgtgaccatcccggcctgtaacatatctgtaaatagtgagatggacttggggcctctgacgccgcgcactcagccgtgggcccgggcgcggggaggccggcgcagcgcagagcgggctcgaagaaaataattctctattatttttattaccaagcgcttctttctgactctaaaatatggaaaataaaatatttacagaaagctttgt

SEQ ID NO: 16305 - DNA, 2037 bp, Artificial Sequence
  derived and/or modified sequence
atggcccccagcctgagccctggccctgctgccctgcggcgggccccccagctgctgctgctgctgctggccgcagaatgtgccctggccgccctgctgcctgcccgggaggccacccagttcctgcggccccggcagaggcgggccttccaggtgtttgaggaggccaagcagggccacctggagcgggagtgtgtggaggagctgtgcagccgggaggaggcccgggaggtgtttgaaaatgaccctgagacagactacttctacccccgctacctggactgcatcaacaagtatggcagcccctacaccaagaacagcggctttgccacctgtgtgcagaacctgcctgaccagtgcacccccaacccctgtgacaggaagggcacccaggcctgccaggacctgatgggcaacttcttctgcctgtgcaaggccggctggggcggccgcctgtgtgacaaggatgtgaatgaatgttcccaggagaatggaggctgcctgcagatctgccacaacaagccaggcagcttccactgcagctgccacagcggctttgagctgagcagtgatggccgcacctgccaggacattgatgaatgtgccgacagcgaggcctgtggggaggcccgctgcaagaacctgcccggcagctacagctgcctgtgtgatgagggctttgcctacagcagccaggagaaggcctgcagagatgtggatgaatgtctgcagggccgctgtgagcaggtgtgtgtgaacagccctggcagctacacctgccactgtgatggccggggcggcctgaagctgagccaggacatggacacctgtgaggacatcctgccctgtgtgcccttctctgtggccaagtctgtgaagagcctgtacctgggccgcatgttcagcggcacccctgtgatccggctgcgcttcaagaggctgcagcccacccggctggtggccgagtttgacttccgcacctttgatcctgagggcatcctgctgtttgctgggggccaccaggacagcacctggatcgtgctggccctgcgggccggccgcctggagctgcagctgcgctacaacggggtgggccgggtgaccagcagcggccctgtgatcaaccacggcatgtggcagaccatctctgtggaggagctggccaggaacctggtgatcaaggtgaacagagatgctgtgatgaagattgctgtggccggggacctcttccagcctgagcggggcctgtaccacctgaacctgactgtgggcggcatccccttccacgagaaggacctggtgcagcccatcaacccccggctggatggctgcatgaggtcctggaactggctgaatggagaggacaccaccatccaggagaccgtgaaggtgaacaccaggatgcagtgcttctctgtgacagagcggggcagcttctacccaggcagcggctttgccttctacagcctggactacatgaggacccccctggatgtgggcacagagagcacctgggaggtggaggtggtggcccacatccggcctgctgctgacacaggagtgctgtttgccctgtgggccccagacctgcgggctgtgcccctgtctgtggccctggtggactaccacagcaccaagaagctgaagaagcagctggtggtgctggccgtggagcacacagccctggccctgatggagatcaaggtgtgtgatggccaggagcacgtggtgacagtgtccctgagagatggagaggccaccctggaggtggatggcacccggggccagagcgaggtgtctgctgcccagctgcaggagcggctggccgtgctggagcggcacctgcggagccctgtgctgacctttgctgggggcctgcctgatgtgcctgtgaccagcgcccctgtgacagccttctaccggggctgcatgaccctggaggtgaacagaaggctgctggacctggatgaggccgcctacaagcacagcgacatcacagcccacagctgcccccctgtggagcctgctgctgcctag

SEQ ID NO: 16306 - DNA, 1875 bp, Artificial Sequence
  derived and/or modified sequence
atgtgcatgtgccaggccagccccccacctgctgccctggccggctgcctgctgagcagctgtgtgcagcctgcccgggagcacggcggggccttcagcaaggccgagtggctgagcaactgcatcaacaagtatggcagcccctacaccaagaacagcggctttgccacctgtgtgcagaacctgcctgaccagtgcacccccaacccctgtgacaggaagggcacccaggcctgccaggacctgatgggcaacttcttctgcctgtgcaaggccggctggggcggccgcctgtgtgacaaggatgtgaatgaatgttcccaggagaatggaggctgcctgcagatctgccacaacaagccaggcagcttccactgcagctgccacagcggctttgagctgagcagtgatggccgcacctgccaggacattgatgaatgtgccgacagcgaggcctgtggggaggcccgctgcaagaacctgcccggcagctacagctgcctgtgtgatgagggctttgcctacagcagccaggagaaggcctgcagagatgtggatgaatgtctgcagggccgctgtgagcaggtgtgtgtgaacagccctggcagctacacctgccactgtgatggccggggcggcctgaagctgagccaggacatggacacctgtgaggacatcctgccctgtgtgcccttctctgtggccaagtctgtgaagagcctgtacctgggccgcatgttcagcggcacccctgtgatccggctgcgcttcaagaggctgcagcccacccggctggtggccgagtttgacttccgcacctttgatcctgagggcatcctgctgtttgctgggggccaccaggacagcacctggatcgtgctggccctgcgggccggccgcctggagctgcagctgcgctacaacggggtgggccgggtgaccagcagcggccctgtgatcaaccacggcatgtggcagaccatctctgtggaggagctggccaggaacctggtgatcaaggtgaacagagatgctgtgatgaagattgctgtggccggggacctcttccagcctgagcggggcctgtaccacctgaacctgactgtgggcggcatccccttccacgagaaggacctggtgcagcccatcaacccccggctggatggctgcatgaggtcctggaactggctgaatggagaggacaccaccatccaggagaccgtgaaggtgaacaccaggatgcagtgcttctctgtgacagagcggggcagcttctacccaggcagcggctttgccttctacagcctggactacatgaggacccccctggatgtgggcacagagagcacctgggaggtggaggtggtggcccacatccggcctgctgctgacacaggagtgctgtttgccctgtgggccccagacctgcgggctgtgcccctgtctgtggccctggtggactaccacagcaccaagaagctgaagaagcagctggtggtgctggccgtggagcacacagccctggccctgatggagatcaaggtgtgtgatggccaggagcacgtggtgacagtgtccctgagagatggagaggccaccctggaggtggatggcacccggggccagagcgaggtgtctgctgcccagctgcaggagcggctggccgtgctggagcggcacctgcggagccctgtgctgacctttgctgggggcctgcctgatgtgcctgtgaccagcgcccctgtgacagccttctaccggggctgcatgaccctggaggtgaacagaaggctgctggacctggatgaggccgcctacaagcacagcgacatcacagcccacagctgcccccctgtggagcctgctgctgcctag

SEQ ID NO: 16307 - DNA, 2166 bp, Artificial Sequence
  derived and/or modified sequence
atggcccccagcctgagccctggccctgctgccctgcggcgggccccccagctgctgctgctgctgctggccgcagaatgtgccctggccgccctgctgcctgcccgggaggccacccagttcctgcggccccggcagaggcgggccttccaggtgtttgaggaggccaagcagggccacctggagcgggagtgtgtggaggagctgtgcagccgggaggaggcccgggaggtgtttgaaaatgaccctgagacagactacttctacccccgctacctggactgcatcaacaagtatggcagcccctacaccaagaacagcggctttgccacctgtgtgcagaacctgcctgaccagtgcacccccaacccctgtgacaggaagggcacccaggcctgccaggacctgatgggcaacttcttctgcctgtgcaaggccggctggggcggccgcctgtgtgacaaggatgtgaatgaatgttcccaggagaatggaggctgcctgcagatctgccacaacaagccaggcagcttccactgcagctgccacagcggctttgagctgagcagtgatggccgcacctgccaggacattgatgaatgtgccgacagcgaggcctgtggggaggcccgctgcaagaacctgcccggcagctacagctgcctgtgtgatgagggctttgcctacagcagccaggagaaggcctgcagagatgtggatgaatgtctgcagggccgctgtgagcaggtgtgtgtgaacagccctggcagctacacctgccactgtgatggccggggcggcctgaagctgagccaggacatggacacctgtgagctggaggccggctggcccctgcccaggcacagaagagacagcggccctgctgcccggcccggccgcggggcccagggcagccgctctgagggccacatcccagaccggcggggcccccggccctggcaggacatcctgccctgtgtgcccttctctgtggccaagtctgtgaagagcctgtacctgggccgcatgttttctggcacccctgtgatccggctgcgcttcaagaggctgcagcccacccggctggtggccgagtttgacttccgcacctttgatcctgagggcatcctgctgtttgctgggggccaccaggacagcacctggatcgtgctggccctgcgggccggccgcctggagctgcagctgcgctacaatggagtgggccgggtgaccagcagcggccctgtgatcaaccacggcatgtggcagaccatctctgtggaggagctggccaggaacctggtgatcaaggtgaacagagatgctgtgatgaagattgctgtggccggggacctcttccagcctgagcggggcctgtaccacctgaacctgactgtgggcggcatccccttccacgagaaggacctggtgcagcccatcaacccccggctggatggctgcatgaggtcctggaactggctgaatggagaggacaccaccatccaggagaccgtgaaggtgaacaccaggatgcagtgcttctctgtgacagagcggggcagcttctacccaggcagcggctttgccttctacagcctggactacatgaggacccccctggatgtgggcacagagagcacctgggaggtggaggtggtggcccacatccggcctgctgctgacaccggggtgctgtttgccctgtgggccccagacctgcgggctgtgcccctgtctgtggccctggtggactaccacagcaccaagaagctgaagaagcagctggtggtgctggccgtggagcacacagccctggccctgatggagatcaaggtgtgtgatggccaggagcacgtggtgacagtgtccctgagagatggagaggccaccctggaggtggatggcacccggggccagagcgaggtgtctgctgcccagctgcaggagcggctggccgtgctggagcggcacctgcggagccctgtgctgacctttgctgggggcctgcctgatgtgcctgtgaccagcgcccctgtgacagccttctaccggggctgcatgaccctggaggtgaacagaaggctgctggacctggatgaagctgcctacaagcacagcgacatcacagcccacagctgcccccctgtggagcctgctgctgcctag

SEQ ID NO: 16308 - DNA, 1140 bp, Artificial Sequence
  derived and/or modified sequence
atgttttctggcacccctgtgatccggctgcgcttcaagaggctgcagcccacccggctggtggccgagtttgacttccgcacctttgatcctgagggcatcctgctgtttgctgggggccaccaggacagcacctggatcgtgctggccctgcgggccggccgcctggagctgcagctgcgctacaatggagtgggccgggtgaccagcagcggccctgtgatcaaccacggcatgtggcagaccatctctgtggaggagctggccaggaacctggtgatcaaggtgaacagagatgctgtgatgaagattgctgtggccggggacctcttccagcctgagcggggcctgtaccacctgaacctgactgtgggcggcatccccttccacgagaaggacctggtgcagcccatcaacccccggctggatggctgcatgaggtcctggaactggctgaatggagaggacaccaccatccaggagaccgtgaaggtgaacaccaggatgcagtgcttctctgtgacagagcggggcagcttctacccaggcagcggctttgccttctacagcctggactacatgaggacccccctggatgtgggcacagagagcacctgggaggtggaggtggtggcccacatccggcctgctgctgacaccggggtgctgtttgccctgtgggccccagacctgcgggctgtgcccctgtctgtggccctggtggactaccacagcaccaagaagctgaagaagcagctggtggtgctggccgtggagcacacagccctggccctgatggagatcaaggtgtgtgatggccaggagcacgtggtgacagtgtccctgagagatggagaggccaccctggaggtggatggcacccggggccagagcgaggtgtctgctgcccagctgcaggagcggctggccgtgctggagcggcacctgcggagccctgtgctgacctttgctgggggcctgcctgatgtgcctgtgaccagcgcccctgtgacagccttctaccggggctgcatgaccctggaggtgaacagaaggctgctggacctggatgaagctgcctacaagcacagcgacatcacagcccacagctgcccccctgtggagcctgctgctgcctag

SEQ ID NO: 16309 - DNA, 1218 bp, Artificial Sequence
  derived and/or modified sequence
atggacacctgtgaggacatcctgccctgtgtgcccttctctgtggccaagtctgtgaagagcctgtacctgggccgcatgttttctggcacccctgtgatccggctgcgcttcaagaggctgcagcccacccggctggtggccgagtttgacttccgcacctttgatcctgagggcatcctgctgtttgctgggggccaccaggacagcacctggatcgtgctggccctgcgggccggccgcctggagctgcagctgcgctacaatggagtgggccgggtgaccagcagcggccctgtgatcaaccacggcatgtggcagaccatctctgtggaggagctggccaggaacctggtgatcaaggtgaacagagatgctgtgatgaagattgctgtggccggggacctcttccagcctgagcggggcctgtaccacctgaacctgactgtgggcggcatccccttccacgagaaggacctggtgcagcccatcaacccccggctggatggctgcatgaggtcctggaactggctgaatggagaggacaccaccatccaggagaccgtgaaggtgaacaccaggatgcagtgcttctctgtgacagagcggggcagcttctacccaggcagcggctttgccttctacagcctggactacatgaggacccccctggatgtgggcacagagagcacctgggaggtggaggtggtggcccacatccggcctgctgctgacaccggggtgctgtttgccctgtgggccccagacctgcgggctgtgcccctgtctgtggccctggtggactaccacagcaccaagaagctgaagaagcagctggtggtgctggccgtggagcacacagccctggccctgatggagatcaaggtgtgtgatggccaggagcacgtggtgacagtgtccctgagagatggagaggccaccctggaggtggatggcacccggggccagagcgaggtgtctgctgcccagctgcaggagcggctggccgtgctggagcggcacctgcggagccctgtgctgacctttgctgggggcctgcctgatgtgcctgtgaccagcgcccctgtgacagccttctaccggggctgcatgaccctggaggtgaacagaaggctgctggacctggatgaagctgcctacaagcacagcgacatcacagcccacagctgcccccctgtggagcctgctgctgcctag

SEQ ID NO: 16310 - DNA, 2037 bp, Artificial Sequence
  derived and/or modified sequence
atggcccccagcctgagccccggccccgccgccctgcggcgggccccacaactcttgctgctgctgctcgccgctgaatgtgctctggcagcgttactgccagcacgcgaggctacccagtttctacggccccggcagagacgagcctttcaggtgttcgaagaggcaaaacagggtcatctggagcgggagtgtgtggaggagctttgttccagagaggaggcacgcgaagtgttcgaaaacgaccctgagactgactacttctaccctcggtatctggattgcattaataagtatgggagcccctatacaaaaaatagcggattcgctacatgtgtgcagaacctccctgatcaatgtacaccaaatccctgtgataggaaaggcacacaagcatgccaggacctcatggggaattttttttgcctgtgtaaggctgggtggggaggacgcctgtgtgacaaggacgtaaacgagtgtagtcaagagaatggtggatgtctccagatttgtcataataagccaggttctttccactgctcttgtcacagcgggttcgaactgtcaagtgacggtagaacatgccaggacatcgacgagtgtgccgattccgaggcctgtggcgaagctaggtgtaaaaatctgcccggctcgtatagttgtctatgcgatgaaggctttgcctactccagtcaggagaaagcatgccgggacgttgatgaatgcttgcagggcaggtgcgagcaagtttgtgtcaatagtcccggcagttatacttgtcactgcgacggccgtgggggacttaagctgtctcaggatatggacacctgcgaagatatccttccatgcgtaccgttttctgttgcaaagtcagttaagtccctgtacctcggcagaatgttcagcggcaccccggtaatacgcctgcggttcaagcgactacaacctactagactcgtggcggaattcgacttccggacatttgaccccgaagggattcttctgtttgcaggaggacaccaggattccacctggattgtcctggcactgcgggcaggccggctggaacttcaattgcggtataatggagtgggtagggtcacatcatcgggtccagtgatcaaccatggcatgtggcagaccatttctgtggaggaactggcacggaacctggtgatcaaggtaaacagggatgccgttatgaagatcgctgtggctggggaccttttccagcctgaaagggggctctatcatctgaatctaaccgttggagggattcctttccacgagaaggacttggtgcaacctattaaccccagactggacggctgtatgagaagctggaattggcttaatggagaggataccactatccaggagaccgtgaaagtgaacacaagaatgcagtgttttagcgtgacagagcgcggctctttctatccaggatccgggttcgcattttacagtctggattatatgagaaccccactggacgtcgggaccgagagcacttgggaagtcgaagtcgttgcccacatcaggccggccgctgatactggagtgctgttcgcactgtgggccccagatctgcgcgcggtccctctgtccgtcgctttggtggactaccatagtaccaagaaattgaaaaaacaactcgtggtgttggctgtggagcataccgccctggcgttgatggagatcaaggtgtgcgatgggcaggagcatgtggttaccgtgtcactgcgcgatggagaggcaactctcgaagtcgacggcaccaggggtcagtctgaggtttctgctgcccagctccaggagcgcctggctgtgctagaaaggcatctgcggtctcccgtgctgacctttgcggggggtctgccagatgtcccagtgaccagcgcaccagtaacagccttctataggggctgtatgacactggaagtgaatcggaggctgctggacctggatgaagctgcttacaaacactccgacatcactgcacactcttgtccacctgttgagcctgccgcagcttag

SEQ ID NO: 16311 - DNA, 1875 bp, Artificial Sequence
  derived and/or modified sequence
atgtgcatgtgccaggccagccccccccccgccgccctggccggctgtctcctgtcctcctgcgtccagcctgcacgcgaacatggcggcgcgttcagcaaggctgaatggctctccaactgcataaacaagtacggtagcccctatactaaaaacagcgggttcgcaacctgtgtgcaaaacctgcctgaccagtgtacaccaaacccgtgtgaccggaaaggcacacaggcctgccaagacctcatgggaaacttcttctgtttatgtaaggcgggctggggaggccggctgtgcgacaaggacgtcaatgagtgtagtcaagaaaacggcggatgtctgcaaatctgtcataacaagccaggctctttccattgtagctgtcacagtgggtttgaactttcctccgatggcaggacatgccaggatattgacgagtgtgctgactccgaggcctgcggagaggcccgttgcaaaaacttacctggttcttactcctgcctctgcgatgagggttttgcatactcatcgcaggaaaaggcttgccgagacgttgacgagtgcttacaggggcggtgtgagcaggtatgcgtcaactctcccgggagctacacgtgccactgtgacggcaggggaggcctgaaactgtctcaggatatggacacatgtgaagacattctgccttgtgtacccttcagcgtggctaagtcggtcaaatccctttatcttgggagaatgttcagcggtacaccagtaatacgcctccggtttaagcggttacagcccacgcggctggttgcagagttcgattttcgaacattcgacccggaaggaattctgctgtttgctggaggtcaccaggactccacatggatcgtgctcgcgctccgcgcgggccgactagagctacagcttcgatataacggggtcggacgggtgaccagctccggcccggtcataaaccacggaatgtggcagactatcagtgtggaagaactagcccgaaaccttgttattaaggtgaacagagacgccgttatgaagatagcggttgctggagacctgtttcaacctgaaagaggcttgtaccatttgaacttgactgtggggggcataccgttccacgagaaagacctggtacagcccattaatccccgcctggatggctgtatgaggagctggaactggctgaacggcgaagacactacaatccaggaaaccgtcaaagtgaacacacgcatgcagtgcttcagcgtaacggaacgaggatcgttctatcctggatctggattcgccttttactcccttgattacatgcggacacctctggacgtgggtactgagtccacatgggaagtggaggtggtggcccatattcggccagctgccgacactggcgtgctgttcgcactgtgggcacccgacttgagagccgtccccctgtctgtcgccctggtggactatcatagcaccaagaagttgaagaagcagctagtggtgttggctgtggaacacaccgcactggccttgatggaaattaaagtctgcgacggccaagagcacgtcgtcacagtgtccttgcgagatggcgaagccaccttggaagttgacgggacccgtggccagtccgaggtgtctgccgcacagctgcaagaacggctcgctgtgcttgagcgacatctgcgtagtcccgtcctaacatttgccgggggacttccggatgttcctgtaacatcagcacccgttactgctttctacaggggatgtatgactctggaagtgaaccgacgtcttcttgacctggacgaggcagcatacaaacactccgacatcacagcgcactcttgcccgcctgtagaaccggccgcggcctag

SEQ ID NO: 16312 - DNA, 2166 bp, Artificial Sequence
  derived and/or modified sequence
atggcccccagcctgagccccggccccgccgccctgcggcgggcccctcagctgcttctactgctactggctgcagagtgcgcactcgccgctttgctacccgcacgggaagccacccaattcctaagaccgcggcagcggcgtgcttttcaggttttcgaggaggctaaacagggacacctggagagagaatgtgtggaggagttgtgttctcgtgaggaggctcgcgaagtattcgaaaacgatccggagacagactacttttacccccgctacctggactgcatcaataaatatgggtcaccttacactaagaacagcggcttcgcgacctgtgtgcagaacctcccagatcagtgtacaccaaatccatgtgacagaaaaggcacgcaggcgtgtcaagatctcatgggtaactttttttgtctgtgtaaggctggttggggcggacgtttatgcgataaggatgtgaatgagtgttcccaggaaaatggtggatgcctccagatctgtcacaataaacccggctctttccattgttcttgtcactcaggtttcgagttatcctccgacggaaggacttgccaggatatcgatgaatgtgccgacagcgaggcgtgcggggaggctagatgtaaaaatctccccggctcgtactcttgtctgtgcgatgagggcttcgcatattcctcccaagaaaaggcatgcagagacgtggacgagtgtttgcaaggcagatgtgaacaggtatgcgtgaactcacctggctcttatacatgccattgtgacggacgcggcggtctcaagctgagccaggatatggatacatgcgagttggaagctggctggccactgcctaggcacaggagggatagcggcccggccgcgcgcccaggacgcggagcccagggctcacgaagcgaaggccatattccagacagacgagggccccggccctggcaggatattctgccctgcgtgccattcagcgtggctaaatctgtgaagagtctatacctgggccggatgttttccggtacccccgtgattaggttgagatttaaacgcttacagcccaccaggcttgtggctgagtttgactttaggactttcgatcctgagggtatcctcctcttcgcaggggggcatcaggactccacgtggatagtacttgcactgcgcgccggtcgcctagaattgcaactcaggtacaatggtgtcggacgcgtgacatcctcaggtcccgtcatcaatcacgggatgtggcagaccattagcgtggaagaattggcccggaacctagttatcaaagtgaatagggatgcagtgatgaagatagcagtggctggagacctgttccagcctgaacgcggactttaccacctgaatctgaccgtgggagggatccctttccacgaaaaggatttggtccagccgatcaacccacgactggatggctgcatgaggagttggaattggctcaacggggaagacaccaccattcaggaaaccgtcaaagtgaacacacgtatgcagtgtttttccgtcaccgagagagggtcgttctatcccggtagtggattcgcattctatagcctggactacatgcgcacccccctcgatgtgggaaccgagagcacatgggaggtggaggtggtggcccacatccggccagcagccgacactggtgtgctgtttgccctctgggccccagatctgcgcgctgtacctctttccgtggcgctcgtagattaccactccacaaagaagctgaagaaacagctcgttgttctggccgtagagcataccgctctggcgttaatggaaattaaggtttgtgatggccaggagcatgtggtaacagtgagccttcgtgatggagaggcaacactggaagtagatggcactagaggccagtccgaggtgagtgcggcacagttgcaagagaggctcgcggttcttgagcggcacttgcgatcccctgtgctgacgttcgctggaggcttgcccgacgtacccgtcacatcggcacccgttacagccttctacaggggctgcatgaccctggaagtgaaccgcaggcttctcgatctggatgaagccgcgtataagcatagcgacatcaccgctcactcttgcccccctgtggaaccggcagctgcctag

SEQ ID NO: 16313 - DNA, 1140 bp, Artificial Sequence
  derived and/or modified sequence
atgttcagcggcacccccgtgatccggctgcggttcaagcggctgcagcccacaagactggtggccgagtttgattttaggacatttgatccggaagggatcctgctgtttgccgggggccatcaggactctacatggatcgtgctggccctgcgcgccggccgattagaactccagttgagatacaacggcgtgggacgggtcacctccagtgggccagtgattaatcatggcatgtggcagactatatctgtcgaggagctggctcggaatctggtgatcaaggttaacagagatgcagtgatgaagatcgccgttgccggcgaccttttccagccggagagagggctgtaccatctgaacctcacagttggtggaattccatttcacgaaaaggacctggtacagcccatcaatcctcgactcgacgggtgcatgagatcttggaactggttgaacggggaggatactacgattcaggaaaccgtcaaggtaaatacaaggatgcagtgtttcagcgttacagagcgcggtagtttctaccctggatctggatttgctttttattccctagattacatgcgcacaccccttgatgtgggaacggaaagtacctgggaggttgaagtggtcgcacacatcaggcccgcagccgataccggtgtcttgtttgccctgtgggcacccgacttacgcgcagtgcccctgtccgtcgcactggtagactatcactccacaaagaaattgaagaaacagctcgtggtgctggcagtggaacacacagctcttgcactgatggaaataaaagtttgtgacggtcaagaacacgtggtcactgtctcactccgcgatggggaggcaaccctggaggtggatgggacgagaggccagagcgaggtctctgcggcccagctccaggagaggctagcagttttggaacggcaccttcgctcacccgtgttaacatttgccggtggactccctgacgtccctgtgacgagtgctcctgtaacagccttttaccgcggatgtatgaccctggaagtcaacaggagactgctggacttggatgaagctgcttataaacactcagacattacagcacacagctgccctccggtcgaacccgctgcagcatag

SEQ ID NO: 16314 - DNA, 1218 bp, Artificial Sequence
  derived and/or modified sequence
atggacacctgcgaggacatcctgccctgcgtgcccttcagcgtggcaaagtcagtgaagagtctctatctgggacggatgttttctgggactcccgttatcaggctgcggtttaaaagactgcaaccgactaggctggtagcagaatttgacttcagaacattcgatcccgaaggaattctgttgtttgctggaggccaccaggacagcacttggatcgtactcgccctgagagccgggaggctagagctccagcttagatataacggggtagggagggtgacctcctcaggacccgtgatcaatcacggaatgtggcagacaatcagcgtggaggagcttgctagaaacctcgtgatcaaagtcaacagggacgctgtgatgaagatcgccgtagccggcgaccttttccagcctgaacgaggtctatatcacctgaatctgaccgtcggtggtattcccttccatgaaaaagatctggtccagccaatcaatccccgcctggatggctgtatgagatcctggaactggctaaatggcgaggacaccaccattcaggaaaccgtcaaggtgaatactaggatgcaatgttttagcgtcactgaacgcgggtccttttacccaggctctggattcgctttctattcactcgactacatgagaacccctctggatgtggggaccgagagtacatgggaagtcgaggttgtcgcacacattcgtcctgccgccgatacaggtgttctgttcgctctatgggcacccgacttgcgggctgtcccactgagcgtggctctggttgattaccactcaaccaagaaactcaagaagcagttagtggtgctggctgtggaacacaccgcattagcactgatggagatcaaagtctgcgacggtcaggagcacgtggtaaccgtgtccctgagagatggggaggctactctggaggtggacgggacacgagggcagtctgaggtgtctgccgcccagttacaagaaagactggccgtcctggaacggcatctgaggtcccccgtgctcactttcgccggggggctgccagacgtgcctgtgacctctgcccccgtgaccgcattttatcgaggatgtatgactcttgaggtgaatagacgcttgctggacttggacgaggcagcctataagcacagcgacataacagcccatagctgcccacccgtggagcctgctgccgcatag

SEQ ID NO: 16315 - DNA, 2037 bp, Artificial Sequence
  derived and/or modified sequence
atggctcccagcctcagtccagggcctgcagctctgcgaagagcaccccagctgctgctgctgttactggcagccgaatgcgcgctggcagctctcctgccagctcgtgaagcaacccagttccttaggccccgacagcggcgagctttccaggttttcgaggaggctaaacagggacacctggagagagaatgtgttgaggaactatgtagcagagaggaggccagagaggtttttgaaaatgatcccgagacggattacttttatccacggtatttagattgcatcaataaatacggaagcccatataccaagaatagtggatttgctacatgcgtgcagaacctgccggaccagtgcacgcccaatccctgcgatcggaaggggacgcaggcgtgtcaggatctaatgggtaattttttctgcctttgcaaagctggctgggggggaagactctgtgacaaggatgttaatgaatgtagtcaggaaaacggaggttgtctgcagatctgtcacaataagcccggaagcttccattgttcatgccacagtggttttgagctctcctccgacggtcgcacatgtcaggatatcgacgaatgtgcggacagtgaggcctgcggcgaagcccgttgtaaaaatttgccgggatcttactcttgtctttgtgacgagggctttgcgtatagctcacaggagaaggcctgccgagatgtagacgaatgtttgcaggggaggtgcgaacaggtatgtgttaattctcccggttcatatacatgtcactgcgacggcagagggggactcaagctgagtcaggatatggatacctgcgaggacatacttccgtgcgtgcccttctcagtggcaaaatccgtgaagtccctgtatctaggtcgcatgttctctggcacaccggtgattcgtctgcgatttaaacggctacagccgaccaggttggtcgcagagttcgatttccggaccttcgatccagaaggtattctgctcttcgcgggtggacaccaagacagcacatggatcgtgttagctttacgcgcagggaggctggagctgcagctccgatacaatggggtcggtcgggtcacctcaagtggtcctgtgattaatcacggcatgtggcaaacaatttcggtggaggagttagccagaaacctggtcatcaaggtcaacagagatgccgtcatgaagatcgccgttgcgggagacctctttcagccagaaagggggctataccacctgaacctgaccgtaggcggaatccctttccatgagaaagacttggtgcagccaatcaatccgaggttggatggttgtatgagatcttggaattggttgaacggtgaagataccaccattcaggagacagtgaaggtgaatactagaatgcagtgtttttctgtgaccgagcgtggctctttctaccctgggtccggcttcgcattctactctctcgactatatgcggacccccctggacgtcgggactgagtcaacttgggaagtggaggtagtcgcgcacattcgaccagctgctgacacaggagttttgtttgccctgtgggcacccgacctgagggccgtcccactctccgtggccctcgtcgattatcactccacaaagaaactcaagaagcagctggtagtactggcagtagagcacactgctctggcccttatggaaattaaagtctgcgatggacaggagcacgtggtcactgtatctctgagagacggagaggctacgctcgaagtcgacggcacaagaggtcagtccgaggtgtccgccgctcagctccaggagcggctcgccgtcctggagcgtcaccttagatcacccgttctgaccttcgcaggtggactgcctgatgtgcctgtgacttcggcccctgtgactgcattttatcgcggttgtatgaccctcgaagtcaatcggcgactgctggaccttgacgaagcagcatacaagcattccgacatcaccgctcacagttgtcctcccgtggagcccgctgcggcatag

SEQ ID NO: 16316 - DNA, 1875 bp, Artificial Sequence
  derived and/or modified sequence
atgtgtatgtgccaggctagccccccacccgcagcgctggccggttgtcttcttagctcctgtgtgcaaccagcgcgagagcacggcggagcctttagtaaggccgaatggctgtccaattgcattaataagtacgggtccccttatacaaagaatagtggctttgccacatgtgtccaaaacttgccggatcagtgtacccctaatccatgcgacaggaaagggacacaggcctgccaagacttgatgggcaatttcttctgtctgtgcaaggccggttggggaggcaggctgtgcgataaggatgtgaatgaatgttcacaagagaacggcggatgtctccagatctgccataataaacctggctcttttcactgcagttgtcactccggcttcgaactcagctccgacggacggacttgccaagacattgatgaatgtgcggatagcgaggcatgcggcgaagctcggtgtaagaatttacccggatcctattcttgcctatgtgatgagggttttgcctacagctctcaggagaaagcatgtcgagacgtggatgaatgcctccaaggtagatgtgagcaggtgtgtgtgaacagcccgggatcttacacttgccattgtgacggcagaggaggcctaaaactttcccaggatatggatacatgtgaggacatactgccatgcgttccatttagtgtagccaaatctgtgaaatcactttatctcggcaggatgttttctggaactccagtgatcaggctgagatttaaacgtctacagcccacgagacttgtggccgaatttgatttccgaacctttgaccccgaaggaattctgctattcgccggagggcaccaagacagtacttggattgtgcttgcgttacgggctggtaggttggagctgcagctccggtataacggagtcggacgagtaacctcttccgggcctgtcatcaatcatggcatgtggcaaactatttctgtggaggagcttgctagaaacctggtgattaaggtgaatcgggacgctgtaatgaagattgctgtcgccggtgatttattccagcccgagcggggattatatcacttaaacttaaccgttggcggaattcctttccacgaaaaagaccttgttcagcctataaatcccaggcttgacggctgtatgagaagctggaattggttgaatggggaggatacaaccattcaggagactgtcaaggtaaatacccggatgcagtgcttcagtgtcacagagcgagggtctttttatccgggaagcggattcgccttctattcccttgactatatgaggaccccgctagacgttggaactgagagcacgtgggaggtcgaggtggtggcacacatacggccagctgctgatacaggtgtgctctttgccttgtgggctcctgaccttcgggctgtgcctctaagtgtcgcactcgtagactaccatagcacaaaaaaattgaagaagcagctggtggttttagctgttgagcacactgcactggcattgatggaaatcaaagtttgtgacggtcaggaacacgttgtgactgtgagtctgcgggacggagaggctactctggaagtcgatggtactcgtgggcaaagcgaggtgtccgcagcgcagctacaggagagacttgcagtgttggaaaggcatctccgttcaccagtcctcacctttgctggcggactgccggatgtcccagtgacatccgcccctgttaccgctttctatcggggatgcatgactttggaagtaaatcggcgtttgctggatctggacgaagccgcatataaacacagtgacatcaccgcccatagctgcccaccggtggagcccgcagcagcctag

SEQ ID NO: 16317 - DNA, 2166 bp, Artificial Sequence
  derived and/or modified sequence
atggccccaagtctctcacctggcccagccgctttgaggagggcaccgcagctcctcttgctactcctcgcagccgagtgtgcgctggcagcattgttgccagctagagaagccacgcaattcctgagaccccgacagaggcgtgcatttcaggtctttgaagaagccaagcaaggccatttggagagagagtgtgtggaggagctgtgtagccgtgaggaggccagagaggtgtttgaaaacgacccggaaacagattacttctaccccagatatcttgactgcatcaataagtacggttccccttacacaaagaactccggatttgcgacttgcgtccagaacctgcccgaccagtgtacaccaaacccatgcgaccggaaggggacacaagcctgccaggaccttatggggaattttttctgtctctgcaaagcaggatggggcggtcgactgtgtgacaaagatgtcaatgaatgttcacaggaaaatgggggatgcctgcagatttgtcacaataagcctggcagctttcattgttcgtgccacagcggattcgagctttcgagtgacggtcggacctgccaggatatagatgagtgtgctgactcagaagcttgtggcgaggcacgctgcaaaaatctgcccggttcctattcctgtctttgcgatgaaggttttgcttactcatcccaagaaaaggcctgccgagacgttgacgagtgcctccagggcagatgcgagcaagtgtgcgtgaacagccctgggtcctacacctgtcactgtgatggcagagggggtttaaagttgagccaggatatggacacttgtgagctggaggcagggtggccactacctcggcacagacgcgactctggcccagccgctcgaccgggacgcggagcacaggggtcgcggtctgagggtcatatcccagaccgacgcggaccaaggccttggcaggatattctcccctgcgtgccgttctccgtcgcgaagtcggtgaaatccctttacttaggacgcatgttcagtgggacgcccgtcattcggctgcggtttaaacgactccaacctactaggctggtcgccgagttcgattttagaacttttgatccagagggtattctgctctttgccggaggccaccaggattccacttggatcgtcctggcgctccgagctggcagacttgagctgcaattgaggtataacggggtggggagagtgaccagcagcggaccagtcatcaaccatggaatgtggcagactatatcagtagaagagctagcacgtaacctggtgattaaagtgaacagagacgctgtgatgaagattgcagtagcaggcgatcttttccagccagagcggggactataccacctgaacctcaccgtgggcggtataccttttcacgaaaaagacctggtgcagcctattaatccccgactggatgggtgtatgcggtcctggaattggctgaacggtgaggacacgacaatccaagagaccgtcaaagtcaatacacggatgcagtgctttagcgtgacagaaagaggctccttttaccccggtagcggttttgcattttattccctcgattatatgagaacgcccctcgatgttggtaccgagtccacatgggaagtggaggtagtggcccacattcgaccagcagctgataccggggtgctttttgctctgtgggcccctgatcttcgagcagtaccattgtcggtggctctggtggactaccattctactaaaaaactaaaaaagcagctggttgtcctggcggtggagcacaccgccttggctctgatggagattaaggtatgtgacgggcaggagcacgtggtgaccgtatctttaagagacggtgaggccactttggaagtcgacggaacgcgcggacagtccgaagtcagcgctgctcagctgcaggagagactggccgtgttggaacgccacctgagatctcccgtgttgaccttcgctgggggattaccggatgtgccagtcaccagcgcaccggttaccgcgttctaccggggttgtatgaccctagaggtaaataggcggctactggatctggacgaggcggcatataagcacagcgatattaccgcccattcatgtcctcctgttgaacccgcagctgcatag

SEQ ID NO: 16318 - DNA, 1140 bp, Artificial Sequence
  derived and/or modified sequence
atgttttccggtactcctgtcatccgcctgcgatttaagcgcttgcagcccacccggttggtggcagaatttgattttcgaacttttgaccccgaggggatcctgctcttcgcgggagggcatcaggactcaacttggatagttttagccctgcgggctgggagacttgagctgcagctgaggtataacggcgtcggcagggtgacctccagtggacctgtgattaatcatggcatgtggcaaacgatctctgtagaggagttagcacggaatctggtgataaaggttaaccgtgatgctgttatgaagattgccgtagcgggagacctgtttcagccagagcgagggctgtaccatctgaatctcacagtaggcggaatccccttccatgaaaaagacttagtgcagcccattaacccccgacttgatggttgtatgcgatcttggaattggctgaatggagaggatactacgatccaggagactgttaaggttaacacaagaatgcagtgcttctcagtgaccgaaagaggctcgttctatccagggagcggattcgcattttactccctcgactacatgcggactcctctggacgtggggacagagagcacctgggaagtcgaagttgttgcgcacatccggccagccgcagataccggggtcctattcgctctgtgggcgcctgaccttcgcgcagtacccctctctgtggccctagtggactatcatagcacaaagaagcttaagaagcagctcgttgtgctggctgttgaacacacagccctcgcattgatggagattaaggtctgcgatggacaggagcacgtggtgacagtgagcctcagggacggcgaagctacactcgaggtggacggcactcgcggacagtcagaggtgagcgctgcccagctgcaggagcgcctggccgtgctagagcggcacctgcggtcgcctgtgctcacttttgccggtggcctacctgatgtgcctgtcacatcggcacccgtcaccgcattttaccggggttgtatgactcttgaagtaaaccgccgtctgctggacctggatgaggcggcttacaagcactccgacataactgcccactcctgtccccctgtagagcctgctgccgcttag

SEQ ID NO: 16319 - DNA, 1218 bp, Artificial Sequence
  derived and/or modified sequence
atggatacctgcgaggatattctcccatgcgtcccattttcagtagcaaaaagtgtcaagtctctctacctggggcgtatgttttccggtactccggtcattagactgagatttaagcgcctgcagcctactaggttagtcgccgagtttgatttccgcacatttgatccggagggaattctactcttcgccggaggccaccaagactctacttggatcgttctggctctgagagctggacgtctggaactgcagctgagatataacggtgttggacgggtgacttcttcaggacccgtgataaaccacggaatgtggcagacaatcagtgtggaagagctggccagaaacctggtgatcaaagttaatagagatgctgtcatgaaaatcgctgtagccggagacctattccagcctgaaagaggcctgtatcatctgaacctgactgtcggcggaattcccttccacgagaaagatctggtgcagcccatcaacccacgattggatggctgtatgagaagctggaattggctgaatggcgaggacaccacaatacaagagacagtgaaagtgaacaccagaatgcagtgtttcagtgtcaccgagaggggaagtttctatcctgggagcggcttcgccttctattccctggactacatgcgcactcccttagacgtgggcacagaaagcacgtgggaagtggaagtggtggcccacattaggcctgcggctgatacaggggtgctctttgcactctgggcgcctgacctgcgggcagtaccattaagtgttgctctcgttgattaccattcaacaaaaaaactgaagaagcagctagtggtgttggctgtcgagcacacagccctggccctcatggagataaaggtgtgcgacggtcaggaacacgtggtgacagtctctctgagggacggcgaggcaacactggaggttgacggaacgagagggcagagcgaggttagcgccgctcagctccaggaacgtctcgcagtgctcgagcgacacctgcgaagcccagtacttactttcgctggagggttgcctgacgttcctgtaacatccgcccctgttaccgccttctatagaggctgtatgactttagaggtaaatcgaagactactggacctcgacgaggccgcatacaagcactccgacatcacagctcactcttgtcctcctgtggagcccgcagccgcttag

SEQ ID NO: 16320 - DNA, 2037 bp, Artificial Sequence
  derived and/or modified sequence
atggcccccagcctgagccccggccccgccgccctgagaagagccccccagctgctgctgctgctgctggccgccgagtgcgccctggccgccctgctgcccgccagagaggccacccagttcctgagacccagacagagaagagccttccaggtgttcgaggaggccaagcagggccacctggagagagagtgcgtggaggagctgtgcagcagagaggaggccagagaggtgttcgagaacgaccccgagaccgactacttctaccccagatacctggactgcatcaacaagtacggcagcccctacaccaagaacagcggcttcgccacctgcgtgcagaacctgcccgaccagtgcacccccaacccctgcgacagaaagggcacccaggcctgccaggacctgatgggcaacttcttctgcctgtgcaaggccggctggggcggcagactgtgcgacaaggacgtgaacgagtgcagccaggagaacggcggctgcctgcagatctgccacaacaagcccggcagcttccactgcagctgccacagcggcttcgagctgagcagcgacggcagaacctgccaggacatcgacgagtgcgccgacagcgaggcctgcggcgaggccagatgcaagaacctgcccggcagctacagctgcctgtgcgacgagggcttcgcctacagcagccaggagaaggcctgcagagacgtggacgagtgcctgcagggcagatgcgagcaggtgtgcgtgaacagccccggcagctacacctgccactgcgacggcagaggcggcctgaagctgagccaggacatggacacctgcgaggacatcctgccctgcgtgcccttcagcgtggccaagagcgtgaagagcctgtacctgggcagaatgttcagcggcacccccgtgatcagactgagattcaagagactgcagcccaccagactggtggccgagttcgacttcagaaccttcgaccccgagggcatcctgctgttcgccggcggccaccaggacagcacctggatcgtgctggccctgagagccggcagactggagctgcagctgagatacaacggcgtgggcagagtgaccagcagcggccccgtgatcaaccacggcatgtggcagaccatcagcgtggaggagctggccagaaacctggtgatcaaggtgaacagagacgccgtgatgaagatcgccgtggccggcgacctgttccagcccgagagaggcctgtaccacctgaacctgaccgtgggcggcatccccttccacgagaaggacctggtgcagcccatcaaccccagactggacggctgcatgagaagctggaactggctgaacggcgaggacaccaccatccaggagaccgtgaaggtgaacaccagaatgcagtgcttcagcgtgaccgagagaggcagcttctaccccggcagcggcttcgccttctacagcctggactacatgagaacccccctggacgtgggcaccgagagcacctgggaggtggaggtggtggcccacatcagacccgccgccgacaccggcgtgctgttcgccctgtgggcccccgacctgagagccgtgcccctgagcgtggccctggtggactaccacagcaccaagaagctgaagaagcagctggtggtgctggccgtggagcacaccgccctggccctgatggagatcaaggtgtgcgacggccaggagcacgtggtgaccgtgagcctgagagacggcgaggccaccctggaggtggacggcaccagaggccagagcgaggtgagcgccgcccagctgcaggagagactggccgtgctggagagacacctgagaagccccgtgctgaccttcgccggcggcctgcccgacgtgcccgtgaccagcgcccccgtgaccgccttctacagaggctgcatgaccctggaggtgaacagaagactgctggacctggacgaggccgcctacaagcacagcgacatcaccgcccacagctgcccccccgtggagcccgccgccgcctag

SEQ ID NO: 16321 - DNA, 1875 bp, Artificial Sequence
  derived and/or modified sequence
atgtgcatgtgccaggccagccccccccccgccgccctggccggctgcctgctgagcagctgcgtgcagcccgccagagagcacggcggcgccttcagcaaggccgagtggctgagcaactgcatcaacaagtacggcagcccctacaccaagaacagcggcttcgccacctgcgtgcagaacctgcccgaccagtgcacccccaacccctgcgacagaaagggcacccaggcctgccaggacctgatgggcaacttcttctgcctgtgcaaggccggctggggcggcagactgtgcgacaaggacgtgaacgagtgcagccaggagaacggcggctgcctgcagatctgccacaacaagcccggcagcttccactgcagctgccacagcggcttcgagctgagcagcgacggcagaacctgccaggacatcgacgagtgcgccgacagcgaggcctgcggcgaggccagatgcaagaacctgcccggcagctacagctgcctgtgcgacgagggcttcgcctacagcagccaggagaaggcctgcagagacgtggacgagtgcctgcagggcagatgcgagcaggtgtgcgtgaacagccccggcagctacacctgccactgcgacggcagaggcggcctgaagctgagccaggacatggacacctgcgaggacatcctgccctgcgtgcccttcagcgtggccaagagcgtgaagagcctgtacctgggcagaatgttcagcggcacccccgtgatcagactgagattcaagagactgcagcccaccagactggtggccgagttcgacttcagaaccttcgaccccgagggcatcctgctgttcgccggcggccaccaggacagcacctggatcgtgctggccctgagagccggcagactggagctgcagctgagatacaacggcgtgggcagagtgaccagcagcggccccgtgatcaaccacggcatgtggcagaccatcagcgtggaggagctggccagaaacctggtgatcaaggtgaacagagacgccgtgatgaagatcgccgtggccggcgacctgttccagcccgagagaggcctgtaccacctgaacctgaccgtgggcggcatccccttccacgagaaggacctggtgcagcccatcaaccccagactggacggctgcatgagaagctggaactggctgaacggcgaggacaccaccatccaggagaccgtgaaggtgaacaccagaatgcagtgcttcagcgtgaccgagagaggcagcttctaccccggcagcggcttcgccttctacagcctggactacatgagaacccccctggacgtgggcaccgagagcacctgggaggtggaggtggtggcccacatcagacccgccgccgacaccggcgtgctgttcgccctgtgggcccccgacctgagagccgtgcccctgagcgtggccctggtggactaccacagcaccaagaagctgaagaagcagctggtggtgctggccgtggagcacaccgccctggccctgatggagatcaaggtgtgcgacggccaggagcacgtggtgaccgtgagcctgagagacggcgaggccaccctggaggtggacggcaccagaggccagagcgaggtgagcgccgcccagctgcaggagagactggccgtgctggagagacacctgagaagccccgtgctgaccttcgccggcggcctgcccgacgtgcccgtgaccagcgcccccgtgaccgccttctacagaggctgcatgaccctggaggtgaacagaagactgctggacctggacgaggccgcctacaagcacagcgacatcaccgcccacagctgcccccccgtggagcccgccgccgcctag

SEQ ID NO: 16322 - DNA, 2166 bp, Artificial Sequence
  derived and/or modified sequence
atggcccccagcctgagccccggccccgccgccctgagaagagccccccagctgctgctgctgctgctggccgccgagtgcgccctggccgccctgctgcccgccagagaggccacccagttcctgagacccagacagagaagagccttccaggtgttcgaggaggccaagcagggccacctggagagagagtgcgtggaggagctgtgcagcagagaggaggccagagaggtgttcgagaacgaccccgagaccgactacttctaccccagatacctggactgcatcaacaagtacggcagcccctacaccaagaacagcggcttcgccacctgcgtgcagaacctgcccgaccagtgcacccccaacccctgcgacagaaagggcacccaggcctgccaggacctgatgggcaacttcttctgcctgtgcaaggccggctggggcggcagactgtgcgacaaggacgtgaacgagtgcagccaggagaacggcggctgcctgcagatctgccacaacaagcccggcagcttccactgcagctgccacagcggcttcgagctgagcagcgacggcagaacctgccaggacatcgacgagtgcgccgacagcgaggcctgcggcgaggccagatgcaagaacctgcccggcagctacagctgcctgtgcgacgagggcttcgcctacagcagccaggagaaggcctgcagagacgtggacgagtgcctgcagggcagatgcgagcaggtgtgcgtgaacagccccggcagctacacctgccactgcgacggcagaggcggcctgaagctgagccaggacatggacacctgcgagctggaggccggctggcccctgcccagacacagaagagacagcggccccgccgccagacccggcagaggcgcccagggcagcagaagcgagggccacatccccgacagaagaggccccagaccctggcaggacatcctgccctgcgtgcccttcagcgtggccaagagcgtgaagagcctgtacctgggcagaatgttcagcggcacccccgtgatcagactgagattcaagagactgcagcccaccagactggtggccgagttcgacttcagaaccttcgaccccgagggcatcctgctgttcgccggcggccaccaggacagcacctggatcgtgctggccctgagagccggcagactggagctgcagctgagatacaacggcgtgggcagagtgaccagcagcggccccgtgatcaaccacggcatgtggcagaccatcagcgtggaggagctggccagaaacctggtgatcaaggtgaacagagacgccgtgatgaagatcgccgtggccggcgacctgttccagcccgagagaggcctgtaccacctgaacctgaccgtgggcggcatccccttccacgagaaggacctggtgcagcccatcaaccccagactggacggctgcatgagaagctggaactggctgaacggcgaggacaccaccatccaggagaccgtgaaggtgaacaccagaatgcagtgcttcagcgtgaccgagagaggcagcttctaccccggcagcggcttcgccttctacagcctggactacatgagaacccccctggacgtgggcaccgagagcacctgggaggtggaggtggtggcccacatcagacccgccgccgacaccggcgtgctgttcgccctgtgggcccccgacctgagagccgtgcccctgagcgtggccctggtggactaccacagcaccaagaagctgaagaagcagctggtggtgctggccgtggagcacaccgccctggccctgatggagatcaaggtgtgcgacggccaggagcacgtggtgaccgtgagcctgagagacggcgaggccaccctggaggtggacggcaccagaggccagagcgaggtgagcgccgcccagctgcaggagagactggccgtgctggagagacacctgagaagccccgtgctgaccttcgccggcggcctgcccgacgtgcccgtgaccagcgcccccgtgaccgccttctacagaggctgcatgaccctggaggtgaacagaagactgctggacctggacgaggccgcctacaagcacagcgacatcaccgcccacagctgcccccccgtggagcccgccgccgcctag

SEQ ID NO: 16323 - DNA, 1140 bp, Artificial Sequence
  derived and/or modified sequence
atgttcagcggcacccccgtgatcagactgagattcaagagactgcagcccaccagactggtggccgagttcgacttcagaaccttcgaccccgagggcatcctgctgttcgccggcggccaccaggacagcacctggatcgtgctggccctgagagccggcagactggagctgcagctgagatacaacggcgtgggcagagtgaccagcagcggccccgtgatcaaccacggcatgtggcagaccatcagcgtggaggagctggccagaaacctggtgatcaaggtgaacagagacgccgtgatgaagatcgccgtggccggcgacctgttccagcccgagagaggcctgtaccacctgaacctgaccgtgggcggcatccccttccacgagaaggacctggtgcagcccatcaaccccagactggacggctgcatgagaagctggaactggctgaacggcgaggacaccaccatccaggagaccgtgaaggtgaacaccagaatgcagtgcttcagcgtgaccgagagaggcagcttctaccccggcagcggcttcgccttctacagcctggactacatgagaacccccctggacgtgggcaccgagagcacctgggaggtggaggtggtggcccacatcagacccgccgccgacaccggcgtgctgttcgccctgtgggcccccgacctgagagccgtgcccctgagcgtggccctggtggactaccacagcaccaagaagctgaagaagcagctggtggtgctggccgtggagcacaccgccctggccctgatggagatcaaggtgtgcgacggccaggagcacgtggtgaccgtgagcctgagagacggcgaggccaccctggaggtggacggcaccagaggccagagcgaggtgagcgccgcccagctgcaggagagactggccgtgctggagagacacctgagaagccccgtgctgaccttcgccggcggcctgcccgacgtgcccgtgaccagcgcccccgtgaccgccttctacagaggctgcatgaccctggaggtgaacagaagactgctggacctggacgaggccgcctacaagcacagcgacatcaccgcccacagctgcccccccgtggagcccgccgccgcctag

SEQ ID NO: 16324 - DNA, 1218 bp, Artificial Sequence
  derived and/or modified sequence
atggacacctgcgaggacatcctgccctgcgtgcccttcagcgtggccaagagcgtgaagagcctgtacctgggcagaatgttcagcggcacccccgtgatcagactgagattcaagagactgcagcccaccagactggtggccgagttcgacttcagaaccttcgaccccgagggcatcctgctgttcgccggcggccaccaggacagcacctggatcgtgctggccctgagagccggcagactggagctgcagctgagatacaacggcgtgggcagagtgaccagcagcggccccgtgatcaaccacggcatgtggcagaccatcagcgtggaggagctggccagaaacctggtgatcaaggtgaacagagacgccgtgatgaagatcgccgtggccggcgacctgttccagcccgagagaggcctgtaccacctgaacctgaccgtgggcggcatccccttccacgagaaggacctggtgcagcccatcaaccccagactggacggctgcatgagaagctggaactggctgaacggcgaggacaccaccatccaggagaccgtgaaggtgaacaccagaatgcagtgcttcagcgtgaccgagagaggcagcttctaccccggcagcggcttcgccttctacagcctggactacatgagaacccccctggacgtgggcaccgagagcacctgggaggtggaggtggtggcccacatcagacccgccgccgacaccggcgtgctgttcgccctgtgggcccccgacctgagagccgtgcccctgagcgtggccctggtggactaccacagcaccaagaagctgaagaagcagctggtggtgctggccgtggagcacaccgccctggccctgatggagatcaaggtgtgcgacggccaggagcacgtggtgaccgtgagcctgagagacggcgaggccaccctggaggtggacggcaccagaggccagagcgaggtgagcgccgcccagctgcaggagagactggccgtgctggagagacacctgagaagccccgtgctgaccttcgccggcggcctgcccgacgtgcccgtgaccagcgcccccgtgaccgccttctacagaggctgcatgaccctggaggtgaacagaagactgctggacctggacgaggccgcctacaagcacagcgacatcaccgcccacagctgcccccccgtggagcccgccgccgcctag

SEQ ID NO: 16325 - protein, 758 aa, Artificial Sequence
  derived and/or modified sequence
MAVSAGSARTSPSSDKVQKDKAELISGPRQDSRIGKLLGFEWTDLSSWRRLVTLLNRPTDPASLAVFRFLFGFLMVLDIPQERGLSSLDRKYLDGLDVCRFPLLDALRPLPLDWMYLVYTIMFLGALGMMLGLCYRISCVLFLLPYWYVFLLDKTSWNNHSYLYGLLAFQLTFMDANHYWSVDGLLNAHRRNAHVPLWNYAVLRGQIFIVYFIAGVKKLDADWVEGYSMEYLSRHWLFSPFKLLLSEELTSLLVVHWGGLLLDLSAGFLLFFDVSRSIGLFFVSYFHCMNSQLFSIGMFSYVMLASSPLFCSPEWPRKLVSYCPRRLQQLLPLKAAPQPSVSCVYKRSRGKSGQKPGLRHQLGAAFTLLYLLEQLFLPYSHFLTQGYNNWTNGLYGYSWDMMVHSRSHQHVKITYRDGRTGELGYLNPGVFTQSRRWKDHADMLKQYATCLSRLLPKYNVTEPQIYFDIWVSINDRFQQRIFDPRVDIVQAAWSPFQRTSWVQPLLMDLSPWRAKLQEIKSSLDNHTEVVFIADFPGLHLENFVSEDLGNTSIQLLQGEVTVELVAEQKNQTLREGEKMQLPAGEYHKVYTTSPSPSCYMYVYVNTTELALEQDLAYLQELKEKVENGSETGPLPPELQPLLEGEVKGGPEPTPLVQTFLRRQQRLQEIERRRNTPFHERFFRFLLRKLYVFRRSFLMTCISLRNLILGRPSLEQLAQEVTYANLRPFEAVGELNPSNTDSSHSNPPESNPDPVHSEF

SEQ ID NO: 16326 - DNA, 3222 bp, Artificial Sequence
  derived and/or modified sequence
cggagcctagggaagcaaattctcctggcggcctccgttcagacgcggcagctgtgacccacctgcctcctccgcagagcaatggcggtgtctgccgggtccgcgcggacctcgcccagctcagataaagtacagaaagacaaggctgaactgatctcagggcccaggcaggacagccgaatagggaaactcttgggttttgagtggacagatttgtccagttggcggaggctggtgaccctgctgaatcgaccaacggaccctgcaagcttagctgtctttcgttttctttttgggttcttgatggtgctagacattccccaggagcgggggctcagctctctggaccggaaataccttgatgggctggatgtgtgccgcttccccttgctggatgccctacgcccactgccacttgactggatgtatcttgtctacaccatcatgtttctgggggcactgggcatgatgctgggcctgtgctaccggataagctgtgtgttattcctgctgccatactggtatgtgtttctcctggacaagacatcatggaacaaccactcctatctgtatgggttgttggcctttcagctaacattcatggatgcaaaccactactggtctgtggacggtctgctgaatgcccataggaggaatgcccacgtgcccctttggaactatgcagtgctccgtggccagatcttcattgtgtacttcattgcgggtgtgaaaaagctggatgcagactgggttgaaggctattccatggaatatttgtcccggcactggctcttcagtcccttcaaactgctgttgtctgaggagctgactagcctgctggtcgtgcactggggtgggctgctgcttgacctctcagctggtttcctgctcttttttgatgtctcaagatccattggactgttctttgtgtcctacttccactgcatgaattcccagcttttcagcattggtatgttctcctacgtcatgctggccagcagccctctcttctgctcccctgagtggcctcggaagctggtgtcctactgcccccgaaggttgcaacaactgttgcccctcaaggcagcccctcagcccagtgtttcctgtgtgtataagaggagccggggcaaaagtggccagaagccagggctgcgccatcagctgggagctgccttcaccctgctctacctcctggagcagctattcctgccctattctcattttctcacccagggctataacaactggacaaatgggctgtatggctattcctgggacatgatggtgcactcccgctcccaccagcacgtgaagatcacctaccgtgatggccgcactggcgaactgggctaccttaaccctggggtatttacacagagtcggcgatggaaggatcatgcagacatgctgaagcaatatgccacttgcctgagccgcctgcttcccaagtataatgtcactgagccccagatctactttgatatttgggtctccatcaatgaccgcttccagcagaggatttttgaccctcgtgtggacatcgtgcaggccgcttggtcaccctttcagcgcacatcctgggtgcaaccactcttgatggacctgtctccctggagggccaagttacaggaaatcaagagcagcctagacaaccacactgaggtggtcttcattgcagatttccctggactgcacttggagaattttgtgagtgaagacctgggcaacactagcatccagctgctgcagggggaagtgactgtggagcttgtggcagaacagaagaaccagactcttcgagagggagaaaaaatgcagttgcctgctggtgagtaccataaggtgtatacgacatcacctagcccttcttgctacatgtacgtctatgtcaacactacagagcttgcactggagcaagacctggcatatctgcaagaattaaaggaaaaggtggagaatggaagtgaaacagggcctctacccccagagctgcagcctctgttggaaggggaagtaaaagggggccctgagccaacacctctggttcagacctttcttagacgccaacaaaggctccaggagattgaacgccggcgaaatactcctttccatgagcgattcttccgcttcttgttgcgaaagctctatgtctttcgccgcagcttcctgatgacttgtatctcacttcgaaatctgatattaggccgtccttccctggagcagctggcccaggaggtgacttatgcaaacttgagaccctttgaggcagttggagaactgaatccctcaaacacggattcttcacattctaatcctcctgagtcaaatcctgatcctgtccactcagagttctgaagggggccagatgttgggtgcagatgtagaagcagccagtcacagacccattctatgcaatggacatttatttgaaaaaaattctcaaaagttttttttttttttttgggggggcggggttctaaagctgtttttaactccgagattacaacttagaggaaccaaggaaataaagcaaataagatttaacaacccaagattaagaggccaggaagaggttagacgcaatgtgaaactgtcctcctaggataaggtttaaagtggctttttgggggctgggtgccgtggctcacgcctgtaatcccagcattttgggaggctgaggtgggcagatcacttgaggccaggagttcgagaccagcctggccaacatggcaaaaccccttctctactaaaaatacaaaaattagccagacgtggtggtgggtgcctgtaatccaactacccaggaggctgaggcatgagaatcgcttgggcccaggaggtggaggttgcagtgagccgagatcgagccactgcactcctgggcaacagagcaagacttcgtctcaaaataaataaataaagtggctcttggggaaaagcaatttaatgtaccacgatgaatagctaactgttcccaagtgtttgctatgtgcaacacaccgcgtgagcagtgttacctgcattattacattaggctgagaggtaaaataatttgcccgaagacatacagctagtgacgaatggactgatggtttgaacttaacgtctatttgacttaaggtcctgcaccctgccacttgtaattttcagaatcactgataatctgaaataatgcagcttaaaacatgttttcttaattaaaagtataattggatggtg

SEQ ID NO: 16327 - DNA, 2277 bp, Artificial Sequence
  derived and/or modified sequence
atggccgttagtgcagggtccgctaggacgagcccgagcagcgataaagtgcagaaagataaggcggagctcatttcagggccgcggcaggacagccgcattgggaaactccttgggtttgagtggacagacctttcctcctggagaagactcgtaacactgctgaatcgtcccacggaccctgcatccctggccgtgtttcgcttcctctttggtttcctgatggtcctggatatcccccaagaacgggggctcagctcccttgatcgcaaatatctggacggactggatgtctgcagattcccgcttctggatgccttacgcccactaccactggattggatgtacctcgtctatacaattatgtttctcggcgcccttggcatgatgctcggcctatgctataggatttcctgcgtgctgttcctcctcccctactggtatgtattcctcctcgataaaaccagctggaacaaccacagttatctgtatggccttctcgctttccagctaactttcatggatgccaatcactattggagtgttgatggactgttgaatgctcaccggcggaatgctcacgtcccattatggaattatgctgtgctacggggtcagatcttcattgtatatttcatcgctggagttaagaaattggacgctgattgggttgaaggatactctatggaatatctgtccagacactggttattctctccgttcaaacttctgttgtcggaggagctcacatccctacttgtggtgcactgggggggactcctccttgatctgtcggctggcttcctgctgttctttgatgtctcccgatcaataggcttgttcttcgtatcctatttccactgcatgaacagccagctgttttctattggtatgttttcgtacgtgatgctggccagcagtcccctgttttgtagtcccgagtggccccgtaagttagtttcttactgtccacgaagactacagcagttgcttcctctgaaagccgcccctcaaccctctgtgtcatgcgtctacaaacggtcacgcggcaagtctggacagaagccgggactgagacaccaattgggagccgctttcactctgttgtacctcctggagcagttattcctgccctactcacatttcctgacccagggttataacaactggaccaacggtctgtacggttacagctgggatatgatggtgcacagcagaagccaccagcacgtcaaaattacataccgagacgggcgcaccggagaactcgggtacctcaacccaggggtcttcacgcagagcagacggtggaaggaccatgctgatatgctcaaacagtacgcgacatgcctgagccgactcctccctaagtataatgtgacagaaccccaaatctattttgatatctgggtttccatcaacgatcgattccagcaacgcattttcgatcctcgggtagacatcgtgcaggccgcttggtcccctttccagcgaacctcctgggtacagcccctccttatggacctctcaccgtggcgcgccaaactgcaagagattaagagttcattagataaccacaccgaggtcgtttttatcgcagatttccccgggctgcatctggaaaacttcgttagtgaagatttggggaatacttccattcaattgctgcagggcgaggttactgtagagctcgttgcagagcaaaaaaaccagaccctgcgggagggtgagaagatgcagctcccagccggtgaataccataaggtctacacaacgagtcctagcccttcctgctatatgtacgtatatgtcaacaccaccgagcttgccctggaacaggatcttgcttaccttcaggagctcaaagaaaaagtggaaaatggatctgagactggccccttgcctccagagctccaaccacttcttgaaggagaggtaaagggcgggcctgagcccacaccattagttcagactttccttagaagacaacagcggctgcaggaaatcgagagaaggagaaatacgcctttccacgaacgcttctttcgtttcttgctgagaaaactctacgtgtttcgccgcagtttcctgatgacctgtatttcacttcggaacctgattctcgggcgtcccagtctggagcagctagcccaggaggtaacatacgccaacctgcgacccttcgaagctgtgggggaactgaaccctagtaatactgattcatcccattccaatccacccgaatctaacccggatcccgtccactcagaattctag

SEQ ID NO: 16328 - DNA, 2277 bp, Artificial Sequence
  derived and/or modified sequence
atggctgtgtctgctggcagcgcccggaccagccccagcagtgacaaggtgcagaaggacaaggccgagctgatcagcggcccccggcaggacagccgcatcggcaagctgctgggctttgagtggacagacctgagctcctggaggcggctggtgaccctgctgaaccggcccacagatcctgccagcctggccgtgttccgcttcctgtttggcttcctgatggtgctggacatcccccaggagcggggcctgagcagcctggacaggaagtacctggatggcctggatgtgtgccgcttccccctgctggatgccctgcggcccctgcccctggactggatgtacctggtgtacaccatcatgttcctgggcgccctgggcatgatgctgggcctgtgctaccgcatcagctgtgtgctcttcctgctgccctactggtacgtgttcctgctggacaagacctcctggaacaaccacagctacctgtatggcctgctggccttccagctgaccttcatggatgccaaccactactggagcgtggatggcctgctgaatgcccacagaagaaatgcccacgtgcccctgtggaactatgctgtgctgcggggccagatcttcatcgtgtacttcatcgccggcgtgaagaagctggatgctgactgggtggagggctacagcatggagtacctgagccgccactggctgttcagccccttcaagctgctgctgtctgaggagctgaccagcctgctggtggtgcactggggcggcctgctgctggacctgtctgctggcttcctgctcttctttgatgtgagccgcagcatcggcctcttctttgtgtcctacttccactgcatgaacagccagctgttcagcatcggcatgttctcctatgtgatgctggccagcagccccctcttctgcagccctgagtggcccaggaagctggtgtcctactgcccccggcggctgcagcagctgctgcccctgaaggccgccccccagcccagcgtgtcctgtgtgtacaagaggagccggggcaagagcggccagaagccaggcctgcggcaccagctgggcgccgccttcaccctgctgtacctgctggagcagctgttcctgccctacagccacttcctgacccagggctacaacaactggaccaacggcctgtatggctacagctgggacatgatggtgcacagccgcagccaccagcacgtgaagatcacctacagagatggccgcactggagagctgggctacctgaaccctggggtcttcacccagagccgccgctggaaggaccatgctgacatgctgaagcagtatgccacctgcctgagccggctgctgcccaagtacaacgtgacagagccccagatctactttgacatctgggtgtccatcaatgaccgcttccagcagaggatctttgacccccgggtggacatcgtgcaggccgcctggagccccttccagaggacctcctgggtgcagcccctgctgatggacctgagcccctggagggccaagctgcaggagatcaagagcagcctggacaaccacacagaggtggtgttcatcgctgacttccctggcctgcacctggagaactttgtgtctgaggacctgggcaacaccagcatccagctgctgcagggcgaggtgacagtggagctggtggccgagcagaagaaccagaccctgcgggagggggagaagatgcagctgcctgctggggagtaccacaaggtgtacaccaccagccccagccccagctgctacatgtatgtgtatgtgaacaccacagagctggccctggagcaggacctggcctacctgcaggagctgaaggagaaggtggagaatggaagtgaaacaggccccctgcccccagagctgcagcccctgctggagggggaggtgaagggcggccctgagcccacccccctggtgcagaccttcctgcggcggcagcagaggctgcaggagattgaaagaagaagaaacacccccttccacgagcgcttcttccgcttcctgctgaggaagctgtatgtgttcagaagaagcttcctgatgacctgcatcagcctgaggaacctgatcctgggccggcccagcctggagcagctggcccaggaggtgacctacgccaacctgcggccctttgaggccgtgggggagctgaaccccagcaacacagacagcagccacagcaaccccccagagagcaacccagaccctgtgcacagcgagttctag

SEQ ID NO: 16329 - DNA, 2277 bp, Artificial Sequence
  derived and/or modified sequence
atggccgtgagcgccggcagcgcccggaccagccccagcagcgacaaagtgcagaaggacaaggccgagcttatttccgggcctagacaggactctcgtatcggaaagctcctgggcttcgagtggactgatcttagcagttggaggcggctggtaacacttttaaatcggcccacagatccagctagcctcgccgtcttccgttttctgttcggatttctgatggtcctggatatcccacaggagaggggattaagttccctcgaccgtaagtatttggacggcctagatgtatgtaggttccccctacttgacgctctcaggccactccctttggactggatgtatctcgtctacacgattatgtttctgggagccctgggaatgatgctaggcttatgctataggatcagctgcgttctatttcttctgccttattggtacgtgtttctgctcgataaaacctcctggaataaccactcttatctgtatggcctcctcgccttccagctcaccttcatggacgcaaatcactactggtcagtggatggtctactcaacgcccaccgacgcaacgcccatgtgccgttgtggaactacgctgtgcttcgtggccagattttcattgtgtactttatagctggagtcaagaagctagacgctgactgggttgaagggtactcaatggagtacctctcgcgacactggctattttctccatttaaactgttgcttagtgaggagttgaccagcctactggtggtgcactggggggggctcctgttagacctttctgctggttttctgctgttcttcgacgtctccagaagcataggccttttctttgtgtcctacttccactgtatgaatagtcaactgttttccatcggcatgttttcctacgtgatgttggcgagttctcctctgttttgttctcccgaatggcctcggaagttggttagttactgtcctaggagacttcagcagctgcttcctttgaaggcagcgccacagccttccgtaagctgtgtgtacaaaagatcacggggcaaatcaggccagaagcccggtttacgacatcagttaggcgctgctttcaccctgctctacctgcttgagcagctctttctcccatactctcatttccttactcagggctacaataattggacaaatggcctgtacggttactcctgggatatgatggtgcacagccgcagccatcaacacgtgaaaattacttaccgcgatgggcggactggagagctgggctacttgaaccccggcgtgttcacccagtctcgccgctggaaagaccacgccgacatgctcaagcagtatgctacgtgcctgtctcgcctcctacctaaatataatgtcaccgagcctcagatatatttcgacatttgggtgtctatcaatgatagattccaacaaaggattttcgatccacgcgtggacattgtccaggctgcatggtccccctttcagcgcacatcatgggtccagccgctgttaatggatttaagtccatggcgggcaaaactacaggagatcaagtcttcccttgacaatcacactgaagtagtgttcatcgctgatttccccgggctgcacctggaaaactttgtaagtgaggacctcggaaatacgagcattcagctgttacaaggggaagtaacagtcgagctcgtcgctgagcagaagaatcaaaccctgcgggagggggagaaaatgcagctgcccgccggagaatatcacaaagtgtacacaacatcgccgagtccctcgtgctatatgtacgtgtatgtcaacactaccgaactggcccttgaacaggatctggcttacctgcaggaactcaaagagaaagtggagaatggaagcgaaaccggcccgcttccccccgaacttcagcccctgctggagggggaggttaaggggggccctgaacctacgcctctcgttcagacgttcttacgcaggcagcagcgcctgcaagagatcgaaagaagacggaacactcccttccacgagcgatttttcagatttctgctgcggaagctgtatgtgttcaggcggagcttcctgatgacttgcatcagcttacggaatctgatattggggaggccctccttggagcagctcgcccaagaggttacctatgccaatctccgacccttcgaggctgtaggcgaacttaatccgtctaacactgactcctctcactctaacccaccagaaagcaaccctgaccctgtgcacagtgagttctag

SEQ ID NO: 16330 - DNA, 2277 bp, Artificial Sequence
  derived and/or modified sequence
atggcagtcagtgccggatctgcccgaacgagtccaagctccgataaagtccagaaggataaggccgagttaattagcgggccacggcaggattccaggatcggtaaattgctggggttcgagtggactgacctcagctcatggagaaggttggtgacacttcttaatcgccctaccgaccctgcatcactggcagtatttcgctttctattcggcttcctgatggtgctggacatcccgcaggaaagggggctgagctccttagacaggaaatacttggatggcctggatgtatgcagattcccattacttgacgccctaagacccctgccattagactggatgtatctggtttatacgataatgttcttgggcgctctaggaatgatgctggggctctgctatcggatcagttgtgtgctgtttttgcttccttactggtacgtttttctgctggataaaacatcctggaacaatcattcatatctgtacggtctcctagcgtttcaactcaccttcatggacgccaaccattattggagcgttgacgggctgctgaacgctcacagacgcaacgcacacgtgcccctgtggaattatgcagtgctcaggggacagatattcatagtgtatttcatcgcaggggttaaaaagctggatgctgattgggtggagggttactcaatggaatacctgagtcgccactggctgttctccccatttaagcttctactttccgaggagttaacaagccttctggtagtgcattggggtgggctactattggatttgtcagccggttttctcttgttcttcgacgtatctagatctatcggcctgttcttcgtgtcctactttcattgcatgaactctcaactgttttccattggtatgttttcctacgtgatgctggctagtagccccttgttttgctccccagaatggccacggaagttggtaagctactgcccacgaagactgcagcagctgctgccattgaaggccgctccccagccatctgtgtcttgtgtgtataagagatctcgcggaaagtcaggacaaaaaccagggctacgtcaccagctcggagctgccttcaccctgctctatcttctggagcaactcttccttccgtacagtcattttctgacacaagggtataataactggaccaacggtctatatggatatagttgggacatgatggtacacagccgctctcaccagcacgtcaaaattacctatcgagatgggaggactggagagctaggatatctcaatccaggagtgttcacacagtcgcgacgttggaaggatcatgctgatatgcttaaacaatacgcaacatgcctgtcgcggctgctcccaaaatataacgtgactgagccccagatttatttcgatatttgggtgtctatcaatgatcggttccagcagcgcatctttgacccccgagtcgatattgttcaagccgcatggagcccgtttcagcgcacctcctgggtacagcccctgctaatggacctgtccccttggagagcaaaactccaggagatcaagtcctccctggataaccacaccgaggtggtgttcattgcagacttcccgggtctgcacctggagaactttgtttctgaggatctcggcaacacgtcaatacagttgttgcagggcgaagtgactgtagagcttgtggcagagcagaagaaccagacactgcgggagggtgagaaaatgcagctcccggcaggggaatatcacaaagtttatactaccagtcccagcccttcatgctacatgtacgtttatgtgaatactactgagctggcgctggaacaagatcttgcctacttacaggaactcaaggaaaaagtggaaaatggatccgagacaggccctctcccaccggagctgcagccccttcttgagggggaggttaaggggggaccggagccaacacccttagtgcagacgtttctgcggagacaacagagacttcaggagattgagcggagacgtaataccccctttcacgagcgattttttcgctttttgctaaggaagctgtacgtctttagaaggtcttttctcatgacctgtatttctctgcggaacctcatcttgggcaggccctcacttgagcagctcgctcaggaggttacctatgctaatctacggccttttgaagccgtcggtgagttgaatccctctaacacagacagctcgcactccaaccccccagagtcaaaccccgaccccgtgcattcggagttctag

SEQ ID NO: 16331 - DNA, 2277 bp, Artificial Sequence
  derived and/or modified sequence
atggccgtgagcgccggcagcgccagaaccagccccagcagcgacaaggtgcagaaggacaaggccgagctgatcagcggccccagacaggacagcagaatcggcaagctgctgggcttcgagtggaccgacctgagcagctggagaagactggtgaccctgctgaacagacccaccgaccccgccagcctggccgtgttcagattcctgttcggcttcctgatggtgctggacatcccccaggagagaggcctgagcagcctggacagaaagtacctggacggcctggacgtgtgcagattccccctgctggacgccctgagacccctgcccctggactggatgtacctggtgtacaccatcatgttcctgggcgccctgggcatgatgctgggcctgtgctacagaatcagctgcgtgctgttcctgctgccctactggtacgtgttcctgctggacaagaccagctggaacaaccacagctacctgtacggcctgctggccttccagctgaccttcatggacgccaaccactactggagcgtggacggcctgctgaacgcccacagaagaaacgcccacgtgcccctgtggaactacgccgtgctgagaggccagatcttcatcgtgtacttcatcgccggcgtgaagaagctggacgccgactgggtggagggctacagcatggagtacctgagcagacactggctgttcagccccttcaagctgctgctgagcgaggagctgaccagcctgctggtggtgcactggggcggcctgctgctggacctgagcgccggcttcctgctgttcttcgacgtgagcagaagcatcggcctgttcttcgtgagctacttccactgcatgaacagccagctgttcagcatcggcatgttcagctacgtgatgctggccagcagccccctgttctgcagccccgagtggcccagaaagctggtgagctactgccccagaagactgcagcagctgctgcccctgaaggccgccccccagcccagcgtgagctgcgtgtacaagagaagcagaggcaagagcggccagaagcccggcctgagacaccagctgggcgccgccttcaccctgctgtacctgctggagcagctgttcctgccctacagccacttcctgacccagggctacaacaactggaccaacggcctgtacggctacagctgggacatgatggtgcacagcagaagccaccagcacgtgaagatcacctacagagacggcagaaccggcgagctgggctacctgaaccccggcgtgttcacccagagcagaagatggaaggaccacgccgacatgctgaagcagtacgccacctgcctgagcagactgctgcccaagtacaacgtgaccgagccccagatctacttcgacatctgggtgagcatcaacgacagattccagcagagaatcttcgaccccagagtggacatcgtgcaggccgcctggagccccttccagagaaccagctgggtgcagcccctgctgatggacctgagcccctggagagccaagctgcaggagatcaagagcagcctggacaaccacaccgaggtggtgttcatcgccgacttccccggcctgcacctggagaacttcgtgagcgaggacctgggcaacaccagcatccagctgctgcagggcgaggtgaccgtggagctggtggccgagcagaagaaccagaccctgagagagggcgagaagatgcagctgcccgccggcgagtaccacaaggtgtacaccaccagccccagccccagctgctacatgtacgtgtacgtgaacaccaccgagctggccctggagcaggacctggcctacctgcaggagctgaaggagaaggtggagaacggcagcgagaccggccccctgccccccgagctgcagcccctgctggagggcgaggtgaagggcggccccgagcccacccccctggtgcagaccttcctgagaagacagcagagactgcaggagatcgagagaagaagaaacacccccttccacgagagattcttcagattcctgctgagaaagctgtacgtgttcagaagaagcttcctgatgacctgcatcagcctgagaaacctgatcctgggcagacccagcctggagcagctggcccaggaggtgacctacgccaacctgagacccttcgaggccgtgggcgagctgaaccccagcaacaccgacagcagccacagcaacccccccgagagcaaccccgaccccgtgcacagcgagttctag

SEQ ID NO: 16332 - protein, 423 aa, Artificial Sequence
  derived and/or modified sequence
MDRRMWGAHVFCVLSPLPTVLGHMHPECDFITQLREDESACLQAAEEMPNTTLGCPATWDGLLCWPTAGSGEWVTLPCPDFFSHFSSESGAVKRDCTITGWSEPFPPYPVACPVPLELLAEEESYFSTVKIIYTVGHSISIVALFVAITILVALRRLHCPRNYVHTQLFTTFILKAGAVFLKDAALFHSDDTDHCSFSTVLCKVSVAASHFATMTNFSWLLAEAVYLNCLLASTSPSSRRAFWWLVLAGWGLPVLFTGTWVSCKLAFEDIACWDLDDTSPYWWIIKGPIVLSVGVNFGLFLNIIRILVRKLEPAQGSLHTQSQYWRLSKSTLFLIPLFGIHYIIFNFLPDNAGLGIRLPLELGLGSFQGFIVAILYCFLNQEVRTEISRKWHGHDPELLPAWRTRAKWTTPSRSAAKVLTSMC

SEQ ID NO: 16333 - DNA, 348 bp, Artificial Sequence
  derived and/or modified sequence
gtgagcggcggcgtgagactgcccgccagcgagagaagattcctgagctgctgccccctgcccgccagacccctgctgcagagactggccagcagacaccccgccagcctgccctgcagccagcagctgctgtggagaagcagcagagccccccccctgctgcccagcctgcccctgggcgtgctgatcaccgaccccctgaccagacaccccggccaccaccaccccgcccccttccacagcgccgccctgctggtgcccgtgaagccccccaccgcctgggagggcaagagcagactggccagaccctgcctgagccaggccctggaggcctgccagctgacctag

SEQ ID NO: 16334 - DNA, 1272 bp, Artificial Sequence
  derived and/or modified sequence
atggataggcgaatgtggggcgcacacgtcttctgcgtgctctcacctcttccaacggtactggggcacatgcaccccgagtgtgattttatcacccagttaagagaagacgaatcagcctgtctgcaagccgcagaagagatgcctaataccaccctggggtgtcctgccacctgggatggcctcctgtgctggcctaccgctggctctggagaatgggtcaccctgccttgccccgatttcttttcacatttttcttccgagtccggcgctgtaaagagagactgcaccattactgggtggtcagaacccttccctccctatcctgtagcttgccccgttccccttgaactgctcgccgaagaggaatcctattttagcacagtgaagattatttacaccgtcggtcattcaatctccatcgtggctcttttcgtagctataactattctggtggccctgcgccgtctccactgtcccaggaactacgtgcacacccagctgtttaccaccttcatccttaaggcaggcgctgtgttcttaaaggatgctgccctattccattcagatgacacagaccactgcagtttctcaaccgtcctgtgtaaagtctccgtcgccgcatctcacttcgcaaccatgaccaatttctcatggctgctggcagaagcagtatatctcaattgcctgctcgctagcacaagtcctagctcacgacgagccttctggtggctggtgctcgccgggtggggcctgcccgtattgttcacaggtacatgggttagctgcaaacttgcatttgaagacatagcatgctgggatcttgatgatacaagcccctattggtggatcatcaagggccccatcgttctgtccgtgggcgtaaactttggcctgttccttaacattatacggattcttgtgagaaaacttgagcctgctcaaggttcactgcacacacagagtcaatattggagactgtcaaaatctacactcttcctcataccccttttcggaatccattatatcatattcaattttctgccggataatgccggccttggcattaggctgcctctggagctcgggcttggttcgtttcagggcttcattgtagctatcttgtattgtttcctgaaccaggaggttcgtacagagatctctcggaagtggcatggacacgatcctgaattactgccagcatggcgaaccagagcaaagtggacgaccccttcacggtctgccgccaaagtcctaacctctatgtgctag

SEQ ID NO: 16335 - DNA, 1602 bp, Artificial Sequence
  derived and/or modified sequence
ccaaggcttactgaggctggtggagggagccactgctgggctcaccatggaccgccggatgtggggggcccacgtcttctgcgtgttgagcccgttaccgaccgtattgggccacatgcacccagaatgtgacttcatcacccagctgagagaggatgagagtgcctgtctacaagcagcagaggagatgcccaacaccaccctgggctgccctgcgacctgggatgggctgctgtgctggccaacggcaggctctggcgagtgggtcaccctcccctgcccggatttcttctctcacttcagctcagagtcaggggctgtgaaacgggattgtactatcactggctggtctgagccctttccaccttaccctgtggcctgccctgtgcctctggagctgctggctgaggaggaatcttacttctccacagtgaagattatctacaccgtgggccatagcatctctattgtagccctcttcgtggccatcaccatcctggttgctctcaggaggctccactgcccccggaactacgtccacacccagctgttcaccacttttatcctcaaggcgggagctgtgttcctgaaggatgctgcccttttccacagcgacgacactgaccactgcagcttctccactgttctatgcaaggtctctgtggccgcctcccatttcgccaccatgaccaacttcagctggctgttggcagaagccgtctacctgaactgcctcctggcctccacctcccccagctcaaggagagccttctggtggctggttctcgctggctgggggctgcccgtgctcttcactggcacgtgggtgagctgcaaactggccttcgaggacatcgcgtgctgggacctggacgacacctccccctactggtggatcatcaaagggcccattgtcctctcggtcggggtgaactttgggctttttctcaatattatccgcatcctggtgaggaaactggagccagctcagggcagcctccatacccagtctcagtattggcgtctctccaagtcgacacttttcctgatcccactctttggaattcactacatcatcttcaacttcctgccagacaatgctggcctgggcatccgcctccccctggagctgggactgggttccttccagggcttcattgttgccatcctctactgcttcctcaaccaagaggtgaggactgagatctcacggaagtggcatggccatgaccctgagcttctgccagcctggaggacccgtgctaagtggaccacgccttcccgctcggcggcaaaggtgctgacatctatgtgctaggctgcctcatcacgccactggagtccacacttgaatttgggcagctaccacgggtctgccatgctctggaggagcaagggggccacatccccaccccagctgttacccagcccggggcaggtgcagcccttcctccctgtctctgcatctgactctcttttgaggtccctgtatgtctacctctgacttctgtggtccctctgtgtctgctctcatccattcctcttactggggcctggggctctagcccaaggctcagaggagccaataaacctgtaaatgaa

SEQ ID NO: 16336 - DNA, 1272 bp, Artificial Sequence
  derived and/or modified sequence
atggacaggaggatgtggggcgcccacgtgttctgtgtgctgagccccctgcccaccgtgctgggccacatgcacccagaatgtgacttcatcacccagctgcgggaggatgaaagtgcctgcctgcaggccgctgaggagatgcccaacaccaccctgggctgcccagccacctgggatggcctgctgtgctggcccacagctggcagcggggagtgggtgaccctgccctgcccagacttcttcagccacttcagcagcgagagcggggctgtgaagagggactgcaccatcaccggctggagcgagcccttccccccctaccctgtggcctgccctgtgcccctggagctgctggccgaggaggagagctacttcagcacagtgaagatcatctacacagtgggccacagcatcagcatcgtggccctgtttgtggccatcaccatcctggtggccctgcggcggctgcactgccccagaaattatgtgcacacccagctgttcaccaccttcatcctgaaggccggggctgtgttcctgaaggatgctgccctcttccacagtgatgacacagaccactgcagcttcagcacagtgctgtgcaaggtgtctgtggccgccagccactttgccaccatgaccaacttctcctggctgctggccgaggccgtgtacctgaactgcctgctggccagcaccagccccagcagcagaagagccttctggtggctggtgctggccggctggggcctgcctgtgctcttcaccggcacctgggtgtcctgcaagctggcctttgaggacatcgcctgctgggacctggatgacaccagcccctactggtggatcatcaagggccccatcgtgctgtctgtgggcgtgaactttggcctcttcctgaacatcatccgcatcctggtgaggaagctggagcccgcccagggcagcctgcacacccagagccagtactggaggctgagcaagagcaccctcttcctgatccccctgtttggcatccactacatcatcttcaacttcctgcctgacaatgccggcctgggcatccggctgcccctggagctgggcctgggcagcttccagggcttcatcgtggccatcctgtactgcttcctgaaccaggaggtgaggacagagatcagcaggaagtggcacggccatgaccctgagctgctgcctgcctggaggacccgggccaagtggaccacccccagccgctctgctgccaaggtgctgacctccatgtgctag

SEQ ID NO: 16337 - DNA, 1272 bp, Artificial Sequence
  derived and/or modified sequence
atggaccggcggatgtggggcgcccacgtgttctgcgtgctgagccccttacctactgtgctcggtcacatgcatcctgagtgtgacttcattacacagctgcgcgaagacgaaagcgcatgtttacaagccgctgaggagatgcccaacacaacactcgggtgtcccgcgacatgggatgggctgctgtgctggcctacggccgggagcggcgagtgggtgactttgccgtgtcccgatttcttcagccacttctcatcagaaagcggtgcagtaaaacgcgactgtaccatcacgggctggagcgaaccatttccaccatatccagtggcctgtcccgtacccctggagctcttagccgaagaggagtcatacttttctacagtcaaaattatctacactgtgggccacagcattagcatcgtcgctctatttgtcgccatcaccattctggtcgccttaaggaggctccattgtcctagaaactacgtgcacacacagctctttactacctttattctaaaagccggagcagtgttcctaaaagacgccgccttgttccatagcgatgacacagaccattgcagcttcagtacggtactctgcaaagttagcgtcgctgccagccactttgcaaccatgactaacttctcttggctcctggccgaggccgtgtacctaaattgcttgctggccagcacttccccctcaagccgacgcgctttttggtggctggtgttggctggttggggcctgccagtgctgtttacagggacctgggtgagctgtaagctggcatttgaggatattgcctgttgggacctggatgacacgtcaccttattggtggataataaaggggcccatcgtgctgtcagtaggagtgaattttggactgtttttaaacataatccggatcctggtgcggaaactggagccagctcaaggtagcctccacactcagtcccagtactggcgcctgagcaagtcaactttgttcctcatcccgctatttggcatccattatataatttttaactttctgcctgataatgcaggtctaggtatcaggctgcccttagagctggggcttggttcatttcaggggttcattgttgccatactctactgtttcctgaaccaggaggtgagaactgaaatttccaggaaatggcatggacacgatcccgagctcctgcctgcttggcgcaccagggcgaagtggactactccaagtagaagcgccgcaaaggtgctgacatccatgtgctag

SEQ ID NO: 16338 - DNA, 1272 bp, Artificial Sequence
  derived and/or modified sequence
atggaccgaagaatgtggggggcacatgtattctgcgtgctaagtccactgcccaccgtgttgggacatatgcacccagagtgcgacttcataactcagctccgagaagatgaaagcgcctgcctacaggctgctgaggaaatgccgaataccaccttgggatgcccagcaacttgggatgggctgctgtgctggcccaccgccggatccggcgaatgggtgacattaccttgtcccgatttctttagccacttctcctcggagtcaggtgcagtgaagcgggattgtacaattactggctggtccgaacctttcccaccataccccgtcgcctgccctgtacctttggagctcttggctgaggaggaaagctatttctccacggttaagatcatttatactgttggccatagcatttctatcgtcgccttgttcgtggctatcaccatcctggtcgctctacggcgtttgcactgtcctcgaaactatgtgcacacccagctgtttacaacgttcatcctgaaggccggtgcagtgttccttaaagatgctgcattgtttcacagtgatgataccgatcactgttcattctcaaccgtgctgtgtaaagtatcagttgctgcctctcacttcgctaccatgactaatttcagctggctcctggctgaggctgtgtatctgaactgcctgctcgccagtacgtctcccagttcccgcagggctttctggtggttggtgctcgctgggtggggactcccagttctatttaccggaacttgggtgtcctgtaagttggctttcgaggatatcgcgtgctgggacttggatgacaccagtccatactggtggatcatcaagggcccaatcgtgcttagtgtgggggtgaatttcggacttttcctgaacattatccgcattctggttcgaaagttggaaccagctcaggggagcctacacacccagtcacagtactggagactctcgaagagtaccctctttctcattccgctcttcggaatccattacataatctttaattttctcccagataatgccggactgggaatccggctgcctctggaacttggtcttggctcctttcaaggtttcatcgtggcaatcctgtactgttttcttaatcaagaggttagaaccgagatctctcgaaagtggcatggccacgatcccgaactgctccccgcttggcgaacaagggccaagtggaccactccctcccgaagcgccgcaaaggttctgacaagcatgtgctag

SEQ ID NO: 16339 - DNA, 1272 bp, Artificial Sequence
  derived and/or modified sequence
atggacagaagaatgtggggcgcccacgtgttctgcgtgctgagccccctgcccaccgtgctgggccacatgcaccccgagtgcgacttcatcacccagctgagagaggacgagagcgcctgcctgcaggccgccgaggagatgcccaacaccaccctgggctgccccgccacctgggacggcctgctgtgctggcccaccgccggcagcggcgagtgggtgaccctgccctgccccgacttcttcagccacttcagcagcgagagcggcgccgtgaagagagactgcaccatcaccggctggagcgagcccttccccccctaccccgtggcctgccccgtgcccctggagctgctggccgaggaggagagctacttcagcaccgtgaagatcatctacaccgtgggccacagcatcagcatcgtggccctgttcgtggccatcaccatcctggtggccctgagaagactgcactgccccagaaactacgtgcacacccagctgttcaccaccttcatcctgaaggccggcgccgtgttcctgaaggacgccgccctgttccacagcgacgacaccgaccactgcagcttcagcaccgtgctgtgcaaggtgagcgtggccgccagccacttcgccaccatgaccaacttcagctggctgctggccgaggccgtgtacctgaactgcctgctggccagcaccagccccagcagcagaagagccttctggtggctggtgctggccggctggggcctgcccgtgctgttcaccggcacctgggtgagctgcaagctggccttcgaggacatcgcctgctgggacctggacgacaccagcccctactggtggatcatcaagggccccatcgtgctgagcgtgggcgtgaacttcggcctgttcctgaacatcatcagaatcctggtgagaaagctggagcccgcccagggcagcctgcacacccagagccagtactggagactgagcaagagcaccctgttcctgatccccctgttcggcatccactacatcatcttcaacttcctgcccgacaacgccggcctgggcatcagactgcccctggagctgggcctgggcagcttccagggcttcatcgtggccatcctgtactgcttcctgaaccaggaggtgagaaccgagatcagcagaaagtggcacggccacgaccccgagctgctgcccgcctggagaaccagagccaagtggaccacccccagcagaagcgccgccaaggtgctgaccagcatgtgctag

SEQ ID NO: 16340 - DNA, 1760 bp, Artificial Sequence
  derived and/or modified sequence
gtcctatatttgttgtatagcctcctttgtggaagttatgtatgcatttgacttcacttaatctaagacatctattttccttgaactcttgataggtctgctggtttcctcaagggaatccaatctagctggattttaatctctttgaattgtgtcctcagctataaaagttttagctgaggttttaatggctgcacttaagtaaatctaacagatataccagggggtgttccaattacatacaccattaaagggctttatgtgaggatttttaaaaattaccattaaaaaaaaaaaagcatagtccatttgcagtataatttaccagcaggaaagatttcaatgtcctggaaaaattccctataaaaaggaagataggaaaacagaaaagtcacagtactcaacctacttcaagggaagattgggatctttttggctctctgcctctaaacaggtaaaaggctttgtattatttctagcacgagtttttcttctttagattgcatgctattgtatgtctacagggcatttgacagcccaagggctaaatccaggtgtgacggtatctaatgatgtcctgtccttcactgtccttgccatcaccagccacagagatccaggctttggggactcccacagcttatcgaccagtgtttgatttagtttttagcctctttcccatcaaatgaaaattaacttggagacacatttcattagaaaattagaggcccccttggctaggaaggcatctggtctgggactaactactttgaacagtgttgagtcctctctcccacagatggttcagccagcagtaatgctaggaagactgaaggataaatagaaaaatgtcattagtaccatggggtagccatgtaatgtcaagcaattttatattagccagagattcctagtaggagctacttttcttaacagatgactcagttctctttatctcaggaatgaaagagttgaagaccaatccacaacaggggaaatgttaaggcaaaatgatgaacttgataagggatgaattatggggtttggataaccaaacaataaaaataaaagtatagactattttagtactaaaaaggtcctgaacatgtgagcttaagtactcattttgtccccagtggctaagaaactaaaggcaagccagcaagtgtctctgagtttcagtgtctgtatgtaaaaactgactctgacttccatcttctgcagggttagtgatacagatgctagctttttcactaaagaggtcttttagtttatactcaaccttgtctggatctaatttgattgtgcattcatgtgccttagaatgaagccaattcaaaaactcctagctggccttattctactgacttggtgcgtggaaggctgctccagccagcactggtcctatggactgcgccctggaggaaagagagatgccgaaaatttgattgattctttccaagagatagtcaaagaggttggtcaactggcagaaacccaacgcttcgaatgcaccacgcaccagccacgttctcccctccgagacctgaaaggagctctggaaagtctgattgaagaggaaactgggcagaagaagatttaaatccattgggccagaaggaatgaccattactaacatgacttaagtataattctgacattgaaaatttataacccattaaatacctgtaaatggtatgaatttcagaaatccttacaccaagttgcacatattccataataaagtgctgtgttgtgaa

SEQ ID NO: 16341 - DNA, 470 bp, Artificial Sequence
  derived and/or modified sequence
gggatctttttggctctctgcctctaaacagaatgaagccaattcaaaaactcctagctggccttattctactgacttggtgcgtggaaggctgctccagccagcactggtcctatggactgcgccctggaggaaagagagatgccgaaaatttgattgattctttccaagagatagtcaaagaggttggtcaactggcagaaacccaacgcttcgaatgcaccacgcaccagccacgttctcccctccgagacctgaaaggagctctggaaagtctgattgaagaggaaactgggcagaagaagatttaaatccattgggccagaaggaatgaccattactaacatgacttaagtataattctgacattgaaaatttataacccattaaatacctgtaaatggtatgaatttcagaaatccttacaccaagttgcacatattccataataaagtgctgtgttgtgaatg

SEQ ID NO: 16342 - protein, 836 aa, Artificial Sequence
  derived and/or modified sequence
MVQFSTSEFRLTPHIDNLEVANSFAVTNAFCSQFSRGVYAIFGFYDKKSVNTITSFCGTLHVSFITPSFPTDGTHPFVIQMRPDLKGALLSLIEYYQWDKFAYLYDSDRGLSTLQAVLDSAAEKKWQVTAINVGNINNDKKDEMYRSLFQDLELKKERRVILDCERDKVNDIVDQVITIGKHVKGYHYIIANLGFTDGDLLKIQFGGANVSGFQIVDYDDSLVSKFIERWSTLEEKEYPGAHTTTIKYTSALTYDAVQVMTEAFRNLRKQRIEISRRGNAGDCLANPAVPWGQGVEIERALKQVQVEGLSGNIKFDQNGKRINYTINIMELKTNGPRKIGYWSEVDKMVVTLTELPSGNDTSGLENKTVVVTTILESPYVMMKKNHEMLEGNERYEGYCVDLAAEIAKHCGFKYKLTIVGDGKYGARDADTKIWNGMVGELVYGKADIAIAPLTITLVREEVIDFSKPFMSLGISIMIKKPQKSKPGVFSFLDPLAYEIWMCIVFAYIGVSVVLFLVSRFSPYEWHTEEFEDGRETQSSESTNEFGIFNSLWFSLGAFMQQGCDISPRSLSGRIVGGVWWFFTLIIISSYTANLAAFLTVERMVSPIESAEDLSKQTEIAYGTLDSGSTKEFFRRSKIAVFDKMWTYMRSAEPSVFVRTTAEGVARVRKSKGKYAYLLESTMNEYIEQRKPCDTMKVGGNLDSKGYGIATPKGSSLRTPVNLAVLKLSEQGVLDKLKNKWWYDKGECGAKDSGSKEKTSALSLSNVAGVFYILVGGLGLAMLVALIEFCYKSRAEAKRMKVAKNAQNINPSSSQNSQNFATYKEGYNVYGIESVKI

SEQ ID NO: 16343 - protein, 883 aa, Artificial Sequence
  derived and/or modified sequence
MQKIMHISVLLSPVLWGLIFGVSSNSIQIGGLFPRGADQEYSAFRVGMVQFSTSEFRLTPHIDNLEVANSFAVTNAFCSQFSRGVYAIFGFYDKKSVNTITSFCGTLHVSFITPSFPTDGTHPFVIQMRPDLKGALLSLIEYYQWDKFAYLYDSDRGLSTLQAVLDSAAEKKWQVTAINVGNINNDKKDEMYRSLFQDLELKKERRVILDCERDKVNDIVDQVITIGKHVKGYHYIIANLGFTDGDLLKIQFGGANVSGFQIVDYDDSLVSKFIERWSTLEEKEYPGAHTTTIKYTSALTYDAVQVMTEAFRNLRKQRIEISRRGNAGDCLANPAVPWGQGVEIERALKQVQVEGLSGNIKFDQNGKRINYTINIMELKTNGPRKIGYWSEVDKMVVTLTELPSGNDTSGLENKTVVVTTILESPYVMMKKNHEMLEGNERYEGYCVDLAAEIAKHCGFKYKLTIVGDGKYGARDADTKIWNGMVGELVYGKADIAIAPLTITLVREEVIDFSKPFMSLGISIMIKKPQKSKPGVFSFLDPLAYEIWMCIVFAYIGVSVVLFLVSRFSPYEWHTEEFEDGRETQSSESTNEFGIFNSLWFSLGAFMQQGCDISPRSLSGRIVGGVWWFFTLIIISSYTANLAAFLTVERMVSPIESAEDLSKQTEIAYGTLDSGSTKEFFRRSKIAVFDKMWTYMRSAEPSVFVRTTAEGVARVRKSKGKYAYLLESTMNEYIEQRKPCDTMKVGGNLDSKGYGIATPKGSSLRTPVNLAVLKLSEQGVLDKLKNKWWYDKGECGAKDSGSKEKTSALSLSNVAGVFYILVGGLGLAMLVALIEFCYKSRAEAKRMKVAKNAQNINPSSSQNSQNFATYKEGYNVYGIESVKI

SEQ ID NO: 16344 - DNA, 2652 bp, Artificial Sequence
  derived and/or modified sequence
atgcaaaagattatgcacatttccgtgctactgtcccctgtgctttggggcctcatctttggcgtgtctagcaacagcatccagattggaggtcttttcccaagaggagctgaccaggagtacagtgcattcagagtcgggatggtgcaattttctacaagcgagtttcgacttacaccacatatagataatctggaagttgcgaactcatttgctgtcacaaatgcattctgttcacagttttcccggggagtctacgccatttttgggttttacgacaaaaaatctgtgaacactatcacctccttttgcggaacactgcacgtttccttcattaccccttccttccctaccgatggaacccacccttttgtcatccagatgaggccagacctgaagggcgccttgttgtctctcatagagtattatcaatgggacaagttcgcctacttatacgatagtgaccggggtctgtcaaccctccaggcagtgttagactctgccgcagagaagaagtggcaggtcaccgctatcaatgtcgggaatattaacaacgataagaaagacgaaatgtaccggtctctgttccaggacctcgagctgaagaaggagcgccgagtcattctcgattgtgaacgcgacaaagttaacgacatcgtggaccaagtaatcaccatcgggaagcatgtgaagggctatcactatatcattgccaaccttggctttaccgatggcgacttgctgaagattcaattcggcggggccaacgttagtggattccaaatcgtcgactacgacgactctttggtaagcaagttcattgaaagatggagtacccttgaagagaaggaatatcctggtgcccatactacgacaatcaaatacaccagtgctcttacctacgacgcagttcaggtgatgaccgaggccttccggaaccttaggaagcagaggatcgagatatctcgtagaggcaacgccggggactgtcttgccaaccccgcggtgccttgggggcagggagtggaaattgaacgagctcttaagcaggtacaggtggaaggccttagtggcaacattaaatttgatcagaacggcaagcggataaactatactattaatatcatggaactgaagaccaacggtcctcgaaaaatcggttactggagtgaggtcgacaagatggttgtcactctcaccgagctgccctcaggaaatgacacttccggtcttgagaacaaaaccgtagtggtcactacaatcttggaaagcccttacgtgatgatgaagaaaaatcacgagatgcttgagggaaatgagcgttatgagggctactgcgtcgaccttgctgccgagattgccaaacactgcggattcaagtacaaactgaccatcgtgggggatgggaagtatggagcccgcgacgccgacaccaagatctggaacggaatggttggcgaattggtctatggaaaggctgatattgccatcgccccattaacaatcacgcttgtacgtgaagaggtcatagatttttcaaagccctttatgagtctgggaatctctataatgatcaagaagccacagaaatccaaacctggtgtcttcagcttcctggatccacttgcgtacgagatctggatgtgtatcgtgttcgcttacataggcgtgtccgttgtgctattccttgtgtctagatttagcccttatgagtggcataccgaggaattcgaggatggtcgcgagacacagagcagtgagtcaaccaatgagtttgggatctttaatagcttgtggttttccctgggcgccttcatgcagcagggctgcgacatatcccccaggagcctctcaggcagaattgtcgggggagtgtggtggttctttaccctcatcataatttccagctacacagccaacctggcagcctttctcacggtcgaacgcatggtcagtccaatcgaatcagccgaagatttatcgaagcagactgagatcgcatacgggacgctcgattccggtagcaccaaggagttcttcagacgctcaaaaattgctgttttcgacaaaatgtggacatacatgagatccgcggagcccagcgtgttcgtccggacaacggcagaaggagtggcacgggtgcgcaagtccaagggtaagtacgcgtatctcctggagagtactatgaacgagtatatcgagcagaggaagccatgcgataccatgaaggtgggggggaacctggatagcaaggggtatggaatagccactcccaagggctcttccctgcgaacacctgtgaatctcgcggtgctgaaacttagcgagcagggggtcttagacaaactgaagaataaatggtggtacgataaaggtgagtgcggggctaaagactcaggaagtaaagagaagacgtcagcactatctctttccaatgtcgctggcgtcttttatattctggttggcggactgggcttggccatgctggttgcacttatcgaattctgctataagtctagggctgaggccaagcgaatgaaggtggctaagaacgcacaaaatataaatccctcttcttcccagaactctcaaaacttcgctacatacaaagagggctataatgtctacggaatagaatccgtaaagatctag

SEQ ID NO: 16345 - DNA, 5260 bp, Artificial Sequence
  derived and/or modified sequence
gtgtgtgcgcgcgcgcgtgagtgagagaggagagagggagaagagagcgcgagagagggggggctatttcctaggggcgccgatcaagaatacagtgcatttcgagtagggatggttcagttttccacttcggagttcagactgacaccccacatcgacaatttggaggtggcaaacagcttcgcagtcactaatgctttctgctcccagttttcgagaggagtctatgctatttttggattttatgacaagaagtctgtaaataccatcacatcattttgcggaacactccacgtctccttcatcactcccagcttcccaacagatggcacacatccatttgtcattcagatgagacccgacctcaaaggagctctccttagcttgattgaatactatcaatgggacaagtttgcatacctctatgacagtgacagaggcttatcaacactgcaagctgtgctggattctgctgctgaaaagaaatggcaagtgactgctatcaatgtgggaaacattaacaatgacaagaaagatgagatgtaccgatcactttttcaagatctggagttaaaaaaggaacggcgtgtaattctggactgtgaaagggataaagtaaacgacattgtagaccaggttattaccattggaaaacatgttaaagggtaccactacatcattgcaaatctgggatttactgatggagacctattaaaaatccagtttggaggtgcaaatgtctctggatttcagatagtggactatgatgattcgttggtatctaaatttatagaaagatggtcaacactggaagaaaaagaataccctggagctcacacaacaacaattaagtatacttctgctctgacctatgatgccgttcaagtgatgactgaagccttccgcaacctaaggaagcaaagaattgaaatctcccgaagggggaatgcaggagactgtctggcaaacccagcagtgccctggggacaaggtgtagaaatagaaagggccctcaaacaggttcaggttgaaggtctctcaggaaatataaagtttgaccagaatggaaaaagaataaactatacaattaacatcatggagctcaaaactaatgggccccggaagattggctactggagtgaagtggacaaaatggttgttacccttactgagctcccttctggaaatgacacctctgggcttgagaataagactgttgttgtcaccacaattttggaatctccgtatgttatgatgaagaaaaatcatgaaatgcttgaaggcaatgagcgctatgagggctactgtgttgacctggctgcagaaatcgccaaacattgtgggttcaagtacaagttgacaattgttggtgatggcaagtatggggccagggatgcagacacgaaaatttggaatgggatggttggagaacttgtatatgggaaagctgatattgcaattgctccattaactattacccttgtgagagaagaggtgattgacttctcaaagcccttcatgagcctcgggatatctatcatgatcaagaagcctcagaagtccaaaccaggagtgttttcctttcttgatcctttagcctatgagatctggatgtgcattgtttttgcctacattggggtcagtgtagttttattcctggtcagcagatttagcccctacgagtggcacactgaggagtttgaagatggaagagaaacacaaagtagtgaatcaactaatgaatttgggatttttaatagtctctggttttccttgggtgcctttatgcagcaaggatgcgatatttcgccaagatccctctctgggcgcattgttggaggtgtgtggtggttctttaccctgatcataatctcctcctacacggctaacttagctgccttcctgactgtagagaggatggtgtctcccatcgaaagtgctgaggatctttctaagcaaacagaaattgcttatggaacattagactctggctccactaaagagtttttcaggagatctaaaattgcagtgtttgataaaatgtggacctacatgcggagtgcggagccctctgtgtttgtgaggactacggccgaaggggtggctagagtgcggaagtccaaagggaaatatgcctacttgttggagtccacgatgaacgagtacattgagcaaaggaagccttgcgacaccatgaaagttggtggaaacctggattccaaaggctatggcatcgcaacacctaaaggatcctcattaagaaccccagtaaatcttgcagtattgaaactcagtgagcaaggcgtcttagacaagctgaaaaacaaatggtggtacgataaaggtgaatgtggagccaaggactctggaagtaaggaaaagaccagtgccctcagtctgagcaacgttgctggagtattctacatccttgtcgggggccttggtttggcaatgctggtggctttgattgagttctgttacaagtcaagggccgaggcgaaacgaatgaaggtggcaaagaatgcacagaatattaacccatcttcctcgcagaattcacagaattttgcaacttataaggaaggttacaacgtatatggcatcgaaagtgttaaaatttaggggatgaccttgaatgatgccatgaggaacaaggcaaggctgtcaattacaggaagtactggagaaaatggacgtgttatgactccagaatttcccaaagcagtgcatgctgtcccttacgtgagtcctggcatgggaatgaatgtcagtgtgactgatctctcgtgattgataagaaccttttgagtgccttacacaatggttttcttgtgtgtttattgtcaaagtggtgagaggcatccagtatcttgaagacttttctttcagccaagaattcttaaatatgtggagttcatcttgaattgtaaggaatgattaattaaaacacaacatctttttctactcgagttacagacaaagcgtggtggacatgcacagctaacatggaagtactataatttacctgaagtctttgtacagacaacaaacctgtttctgcagccactattgttagtctcttgattcataatgacttaagcacacttgacatcaactgcatcaagatgtgacatgttttataaaaaaaggaaaaaaaacatttaaaactaaaaaatatttttaggtattttcacaaacaaactggcttttaaataaatttgcttccatattggttgaataagacaaaaacaattaaactgagtgggaagtgaataaaaaaaggctttaggtatcgattccatatttttcaaagccaaatatgtaaatgctaaggaaagtaaacaaagaggagattccaatcttgtaatttaatattgttattaaaactttaatgtatcctattctttaacatttggtgttaatataaaattacttggcaatgcttgacatttgaaataaacatttttctattgttttattgcaagtggtccaattaattttgcttagctacagtttggtcataaatcaagtgagtttaaagacactaccaagttgttaggtgcccagagaaaatttctcccttttaaaaaggccaggtgatttttcaaatgtaatcttgcccccaaagtaatatctgaatatctttttgacatgtctaaatatatatatatataaagaaatatttgttaacacaaaagcatttgatctatgtagataaatgctaatagatttaaaaagctaatattaacaaataccagaatacgtgaagttccatttttaaagtgtttgagcttacagaagagaaacattcattttaaatgaagtaaaaaatgccttgaaagtaattctttagatagttgcccattgattaaattccaaaaactaaatatgtttttagctttaaaattataaaagctgtcataaactttatatattatgaattttaaaatatgtttgagtctcctgcaatatagtttcatcccattgacatcaattaaaaataaccctaatatattatttttatatttattcctcaggtggaatggctattttaatatgcccagtgtggataaaatgtcacatttctgtaacttttgactaaagagcctatatttatctagttaatgaatttaaaggatctatctttcccttcataaaatacctcttatttccattaaagccccccaagtttaattaatttaggattttgaatgattattgacatccaatagttatttttaatatttgtattcttgttatttctggaagaaagcctttgtgtagcacttggtattttgcaaagtgcttttaaaacattcttacttaccgtatttcatagaagggaaggaaaaatgtaaggtttaacagtaagcacttgcattgaacatggaggcatgtggtatcatgatattcttcactaaatttagctgtccctaatcacagatcctaaggtaatataatataattttagtgcatttctcctcatcaggaatgctggaggtgcattttaagttttaataataagtgctagaatgaccaaattgcagactaattgtttccatattgtacttaaaatgagtttttaaaagtgaaaaagaaatgactatatacaatcaatgctatttattgtacctctgggcctactcttctaaaaattgtagcttatcgatttttctctgtcaagcttgaactaatgtaaataattgaaataatgtaaagttatattttcatgtttttatagatacaacatgacaagaatacataatgtaagagtatttcaactatggataatgttgattggataatgcacatctcagttacaagcagtactcatagtttaatatccatgtaacggtgcatcaatatattgctatataaatatgtctgtgtgcatataagtgaaaagtggtcaaacaagagtgatgacagctgtctaaaggtttttttattcattttatataaaaactgttatggaaagaccaaaatgtttatgaactattcttatgtaaatttacaattgtcctttactgtacttttttgtttacagtatagtaccttattttctgctgtgttaagtgggtgtcaaactccaagaagacatacactttctataacttctattgaagatattggaatttccaatttttcatgtgtactatgtcagaaaatgctttcgattttatttttaaatctaacatcggatggcttttccggagtgttgtaaaaacttcaatcatacataaaacatgttcttacaaaa

SEQ ID NO: 16346 - DNA, 5621 bp, Artificial Sequence
  derived and/or modified sequence
gagagagggtgagtgtgtgtgagtgcatgggagggtgctgaatattccgagacactgggaccacagcggcagctccgctgaaaactgcattcagccagtcctccggacttctggagcggggacagggcgcagggcatcagcagccaccagcaggacctgggaaatagggattcttctgcctccacttcaggttttagcagcttggtgctaaattgctgtctcaaaatgcagaggatctaatttgcagaggaaaacagccaaagaaggaagaggaggaaaaggaaaaaaaaaggggtatattgtggatgctctacttttcttggaaatgcaaaagattatgcatatttctgtcctcctttctcctgttttatggggactgatttttggtgtctcttctaacagcatacagataggggggctatttcctaggggcgccgatcaagaatacagtgcatttcgagtagggatggttcagttttccacttcggagttcagactgacaccccacatcgacaatttggaggtggcaaacagcttcgcagtcactaatgctttctgctcccagttttcgagaggagtctatgctatttttggattttatgacaagaagtctgtaaataccatcacatcattttgcggaacactccacgtctccttcatcactcccagcttcccaacagatggcacacatccatttgtcattcagatgagacccgacctcaaaggagctctccttagcttgattgaatactatcaatgggacaagtttgcatacctctatgacagtgacagaggcttatcaacactgcaagctgtgctggattctgctgctgaaaagaaatggcaagtgactgctatcaatgtgggaaacattaacaatgacaagaaagatgagatgtaccgatcactttttcaagatctggagttaaaaaaggaacggcgtgtaattctggactgtgaaagggataaagtaaacgacattgtagaccaggttattaccattggaaaacatgttaaagggtaccactacatcattgcaaatctgggatttactgatggagacctattaaaaatccagtttggaggtgcaaatgtctctggatttcagatagtggactatgatgattcgttggtatctaaatttatagaaagatggtcaacactggaagaaaaagaataccctggagctcacacaacaacaattaagtatacttctgctctgacctatgatgccgttcaagtgatgactgaagccttccgcaacctaaggaagcaaagaattgaaatctcccgaagggggaatgcaggagactgtctggcaaacccagcagtgccctggggacaaggtgtagaaatagaaagggccctcaaacaggttcaggttgaaggtctctcaggaaatataaagtttgaccagaatggaaaaagaataaactatacaattaacatcatggagctcaaaactaatgggccccggaagattggctactggagtgaagtggacaaaatggttgttacccttactgagctcccttctggaaatgacacctctgggcttgagaataagactgttgttgtcaccacaattttggaatctccgtatgttatgatgaagaaaaatcatgaaatgcttgaaggcaatgagcgctatgagggctactgtgttgacctggctgcagaaatcgccaaacattgtgggttcaagtacaagttgacaattgttggtgatggcaagtatggggccagggatgcagacacgaaaatttggaatgggatggttggagaacttgtatatgggaaagctgatattgcaattgctccattaactattacccttgtgagagaagaggtgattgacttctcaaagcccttcatgagcctcgggatatctatcatgatcaagaagcctcagaagtccaaaccaggagtgttttcctttcttgatcctttagcctatgagatctggatgtgcattgtttttgcctacattggggtcagtgtagttttattcctggtcagcagatttagcccctacgagtggcacactgaggagtttgaagatggaagagaaacacaaagtagtgaatcaactaatgaatttgggatttttaatagtctctggttttccttgggtgcctttatgcagcaaggatgcgatatttcgccaagatccctctctgggcgcattgttggaggtgtgtggtggttctttaccctgatcataatctcctcctacacggctaacttagctgccttcctgactgtagagaggatggtgtctcccatcgaaagtgctgaggatctttctaagcaaacagaaattgcttatggaacattagactctggctccactaaagagtttttcaggagatctaaaattgcagtgtttgataaaatgtggacctacatgcggagtgcggagccctctgtgtttgtgaggactacggccgaaggggtggctagagtgcggaagtccaaagggaaatatgcctacttgttggagtccacgatgaacgagtacattgagcaaaggaagccttgcgacaccatgaaagttggtggaaacctggattccaaaggctatggcatcgcaacacctaaaggatcctcattaagaaccccagtaaatcttgcagtattgaaactcagtgagcaaggcgtcttagacaagctgaaaaacaaatggtggtacgataaaggtgaatgtggagccaaggactctggaagtaaggaaaagaccagtgccctcagtctgagcaacgttgctggagtattctacatccttgtcgggggccttggtttggcaatgctggtggctttgattgagttctgttacaagtcaagggccgaggcgaaacgaatgaaggtggcaaagaatgcacagaatattaacccatcttcctcgcagaattcacagaattttgcaacttataaggaaggttacaacgtatatggcatcgaaagtgttaaaatttaggggatgaccttgaatgatgccatgaggaacaaggcaaggctgtcaattacaggaagtactggagaaaatggacgtgttatgactccagaatttcccaaagcagtgcatgctgtcccttacgtgagtcctggcatgggaatgaatgtcagtgtgactgatctctcgtgattgataagaaccttttgagtgccttacacaatggttttcttgtgtgtttattgtcaaagtggtgagaggcatccagtatcttgaagacttttctttcagccaagaattcttaaatatgtggagttcatcttgaattgtaaggaatgattaattaaaacacaacatctttttctactcgagttacagacaaagcgtggtggacatgcacagctaacatggaagtactataatttacctgaagtctttgtacagacaacaaacctgtttctgcagccactattgttagtctcttgattcataatgacttaagcacacttgacatcaactgcatcaagatgtgacatgttttataaaaaaaggaaaaaaaacatttaaaactaaaaaatatttttaggtattttcacaaacaaactggcttttaaataaatttgcttccatattggttgaataagacaaaaacaattaaactgagtgggaagtgaataaaaaaaggctttaggtatcgattccatatttttcaaagccaaatatgtaaatgctaaggaaagtaaacaaagaggagattccaatcttgtaatttaatattgttattaaaactttaatgtatcctattctttaacatttggtgttaatataaaattacttggcaatgcttgacatttgaaataaacatttttctattgttttattgcaagtggtccaattaattttgcttagctacagtttggtcataaatcaagtgagtttaaagacactaccaagttgttaggtgcccagagaaaatttctcccttttaaaaaggccaggtgatttttcaaatgtaatcttgcccccaaagtaatatctgaatatctttttgacatgtctaaatatatatatatataaagaaatatttgttaacacaaaagcatttgatctatgtagataaatgctaatagatttaaaaagctaatattaacaaataccagaatacgtgaagttccatttttaaagtgtttgagcttacagaagagaaacattcattttaaatgaagtaaaaaatgccttgaaagtaattctttagatagttgcccattgattaaattccaaaaactaaatatgtttttagctttaaaattataaaagctgtcataaactttatatattatgaattttaaaatatgtttgagtctcctgcaatatagtttcatcccattgacatcaattaaaaataaccctaatatattatttttatatttattcctcaggtggaatggctattttaatatgcccagtgtggataaaatgtcacatttctgtaacttttgactaaagagcctatatttatctagttaatgaatttaaaggatctatctttcccttcataaaatacctcttatttccattaaagccccccaagtttaattaatttaggattttgaatgattattgacatccaatagttatttttaatatttgtattcttgttatttctggaagaaagcctttgtgtagcacttggtattttgcaaagtgcttttaaaacattcttacttaccgtatttcatagaagggaaggaaaaatgtaaggtttaacagtaagcacttgcattgaacatggaggcatgtggtatcatgatattcttcactaaatttagctgtccctaatcacagatcctaaggtaatataatataattttagtgcatttctcctcatcaggaatgctggaggtgcattttaagttttaataataagtgctagaatgaccaaattgcagactaattgtttccatattgtacttaaaatgagtttttaaaagtgaaaaagaaatgactatatacaatcaatgctatttattgtacctctgggcctactcttctaaaaattgtagcttatcgatttttctctgtcaagcttgaactaatgtaaataattgaaataatgtaaagttatattttcatgtttttatagatacaacatgacaagaatacataatgtaagagtatttcaactatggataatgttgattggataatgcacatctcagttacaagcagtactcatagtttaatatccatgtaacggtgcatcaatatattgctatataaatatgtctgtgtgcatataagtgaaaagtggtcaaacaagagtgatgacagctgtctaaaggtttttttattcattttatataaaaactgttatggaaagaccaaaatgtttatgaactattcttatgtaaatttacaattgtcctttactgtacttttttgtttacagtatagtaccttattttctgctgtgttaagtgggtgtcaaactccaagaagacatacactttctataacttctattgaagatattggaatttccaatttttcatgtgtactatgtcagaaaatgctttcgattttatttttaaatctaacatcggatggcttttccggagtgttgtaaaaacttcaatcatacataaaacatgttcttacaaaaggcaaa

SEQ ID NO: 16347 - DNA, 2798 bp, Artificial Sequence
  derived and/or modified sequence
attccagatttaaactacctagaatatacatgtttttcttaggatgaagcaaaaggaaaagactatgcctttgatacaatagaagaaaaggtcctctcatttcggatccccaaattttattaattctgccttagcgacattttccagtttgctcagattttcttggggtctgaatgcaaagcttgtgattacatggaaaggtgaaggtttctggccgcctacctcgccttcagactctcatctgggtcttgaccccttggctagcttttggatattccacccccgctgtccgagtccgtaggggggctatttcctaggggcgccgatcaagaatacagtgcatttcgagtagggatggttcagttttccacttcggagttcagactgacaccccacatcgacaatttggaggtggcaaacagcttcgcagtcactaatgctttctgctcccagttttcgagaggagtctatgctatttttggattttatgacaagaagtctgtaaataccatcacatcattttgcggaacactccacgtctccttcatcactcccagcttcccaacagatggcacacatccatttgtcattcagatgagacccgacctcaaaggagctctccttagcttgattgaatactatcaatgggacaagtttgcatacctctatgacagtgacagaggcttatcaacactgcaagctgtgctggattctgctgctgaaaagaaatggcaagtgactgctatcaatgtgggaaacattaacaatgacaagaaagatgagatgtaccgatcactttttcaagatctggagttaaaaaaggaacggcgtgtaattctggactgtgaaagggataaagtaaacgacattgtagaccaggttattaccattggaaaacatgttaaagggtaccactacatcattgcaaatctgggatttactgatggagacctattaaaaatccagtttggaggtgcaaatgtctctggatttcagatagtggactatgatgattcgttggtatctaaatttatagaaagatggtcaacactggaagaaaaagaataccctggagctcacacaacaacaattaagtatacttctgctctgacctatgatgccgttcaagtgatgactgaagccttccgcaacctaaggaagcaaagaattgaaatctcccgaagggggaatgcaggagactgtctggcaaacccagcagtgccctggggacaaggtgtagaaatagaaagggccctcaaacaggttcaggttgaaggtctctcaggaaatataaagtttgaccagaatggaaaaagaataaactatacaattaacatcatggagctcaaaactaatgggccccggaagattggctactggagtgaagtggacaaaatggttgttacccttactgagctcccttctggaaatgacacctctgggcttgagaataagactgttgttgtcaccacaattttggaatctccgtatgttatgatgaagaaaaatcatgaaatgcttgaaggcaatgagcgctatgagggctactgtgttgacctggctgcagaaatcgccaaacattgtgggttcaagtacaagttgacaattgttggtgatggcaagtatggggccagggatgcagacacgaaaatttggaatgggatggttggagaacttgtatatgggaaagctgatattgcaattgctccattaactattacccttgtgagagaagaggtgattgacttctcaaagcccttcatgagcctcgggatatctatcatgatcaagaagcctcagaagtccaaaccaggagtgttttcctttcttgatcctttagcctatgagatctggatgtgcattgtttttgcctacattggggtcagtgtagttttattcctggtcagcagatttagcccctacgagtggcacactgaggagtttgaagatggaagagaaacacaaagtagtgaatcaactaatgaatttgggatttttaatagtctctggttttccttgggtgcctttatgcagcaaggatgcgatatttcgccaagatccctctctgggcgcattgttggaggtgtgtggtggttctttaccctgatcataatctcctcctacacggctaacttagctgccttcctgactgtagagaggatggtgtctcccatcgaaagtgctgaggatctttctaagcaaacagaaattgcttatggaacattagactctggctccactaaagagtttttcaggagatctaaaattgcagtgtttgataaaatgtggacctacatgcggagtgcggagccctctgtgtttgtgaggactacggccgaaggggtggctagagtgcggaagtccaaagggaaatatgcctacttgttggagtccacgatgaacgagtacattgagcaaaggaagccttgcgacaccatgaaagttggtggaaacctggattccaaaggctatggcatcgcaacacctaaaggatcctcattaagtggagtcacattcaagacactgttatttgtttgttgtggataaatgcggttaacctcgcagtactaaaactgaatgaacaaggcctgttggacaaattgaaaaacaaatggtggtacgacaaaggagagtgcggcagcgggggaggtgattccaagaaccccagtaaatcttgcagtattgaaactcagtgagcaaggcgtcttagacaagctgaaaaacaaatggtggtacgataaaggtgaatgtggagccaaggactctggaagtaaggaaaagaccagtgccctcagtct

SEQ ID NO: 16348 - DNA, 5209 bp, Artificial Sequence
  derived and/or modified sequence
ggggggctatttcctaggggcgccgatcaagaatacagtgcatttcgagtagggatggttcagttttccacttcggagttcagactgacaccccacatcgacaatttggaggtggcaaacagcttcgcagtcactaatgctttctgctcccagttttcgagaggagtctatgctatttttggattttatgacaagaagtctgtaaataccatcacatcattttgcggaacactccacgtctccttcatcactcccagcttcccaacagatggcacacatccatttgtcattcagatgagacccgacctcaaaggagctctccttagcttgattgaatactatcaatgggacaagtttgcatacctctatgacagtgacagaggcttatcaacactgcaagctgtgctggattctgctgctgaaaagaaatggcaagtgactgctatcaatgtgggaaacattaacaatgacaagaaagatgagatgtaccgatcactttttcaagatctggagttaaaaaaggaacggcgtgtaattctggactgtgaaagggataaagtaaacgacattgtagaccaggttattaccattggaaaacatgttaaagggtaccactacatcattgcaaatctgggatttactgatggagacctattaaaaatccagtttggaggtgcaaatgtctctggatttcagatagtggactatgatgattcgttggtatctaaatttatagaaagatggtcaacactggaagaaaaagaataccctggagctcacacaacaacaattaagtatacttctgctctgacctatgatgccgttcaagtgatgactgaagccttccgcaacctaaggaagcaaagaattgaaatctcccgaagggggaatgcaggagactgtctggcaaacccagcagtgccctggggacaaggtgtagaaatagaaagggccctcaaacaggttcaggttgaaggtctctcaggaaatataaagtttgaccagaatggaaaaagaataaactatacaattaacatcatggagctcaaaactaatgggccccggaagattggctactggagtgaagtggacaaaatggttgttacccttactgagctcccttctggaaatgacacctctgggcttgagaataagactgttgttgtcaccacaattttggaatctccgtatgttatgatgaagaaaaatcatgaaatgcttgaaggcaatgagcgctatgagggctactgtgttgacctggctgcagaaatcgccaaacattgtgggttcaagtacaagttgacaattgttggtgatggcaagtatggggccagggatgcagacacgaaaatttggaatgggatggttggagaacttgtatatgggaaagctgatattgcaattgctccattaactattacccttgtgagagaagaggtgattgacttctcaaagcccttcatgagcctcgggatatctatcatgatcaagaagcctcagaagtccaaaccaggagtgttttcctttcttgatcctttagcctatgagatctggatgtgcattgtttttgcctacattggggtcagtgtagttttattcctggtcagcagatttagcccctacgagtggcacactgaggagtttgaagatggaagagaaacacaaagtagtgaatcaactaatgaatttgggatttttaatagtctctggttttccttgggtgcctttatgcagcaaggatgcgatatttcgccaagatccctctctgggcgcattgttggaggtgtgtggtggttctttaccctgatcataatctcctcctacacggctaacttagctgccttcctgactgtagagaggatggtgtctcccatcgaaagtgctgaggatctttctaagcaaacagaaattgcttatggaacattagactctggctccactaaagagtttttcaggagatctaaaattgcagtgtttgataaaatgtggacctacatgcggagtgcggagccctctgtgtttgtgaggactacggccgaaggggtggctagagtgcggaagtccaaagggaaatatgcctacttgttggagtccacgatgaacgagtacattgagcaaaggaagccttgcgacaccatgaaagttggtggaaacctggattccaaaggctatggcatcgcaacacctaaaggatcctcattaagaaccccagtaaatcttgcagtattgaaactcagtgagcaaggcgtcttagacaagctgaaaaacaaatggtggtacgataaaggtgaatgtggagccaaggactctggaagtaaggaaaagaccagtgccctcagtctgagcaacgttgctggagtattctacatccttgtcgggggccttggtttggcaatgctggtggctttgattgagttctgttacaagtcaagggccgaggcgaaacgaatgaaggtggcaaagaatgcacagaatattaacccatcttcctcgcagaattcacagaattttgcaacttataaggaaggttacaacgtatatggcatcgaaagtgttaaaatttaggggatgaccttgaatgatgccatgaggaacaaggcaaggctgtcaattacaggaagtactggagaaaatggacgtgttatgactccagaatttcccaaagcagtgcatgctgtcccttacgtgagtcctggcatgggaatgaatgtcagtgtgactgatctctcgtgattgataagaaccttttgagtgccttacacaatggttttcttgtgtgtttattgtcaaagtggtgagaggcatccagtatcttgaagacttttctttcagccaagaattcttaaatatgtggagttcatcttgaattgtaaggaatgattaattaaaacacaacatctttttctactcgagttacagacaaagcgtggtggacatgcacagctaacatggaagtactataatttacctgaagtctttgtacagacaacaaacctgtttctgcagccactattgttagtctcttgattcataatgacttaagcacacttgacatcaactgcatcaagatgtgacatgttttataaaaaaaggaaaaaaaacatttaaaactaaaaaatatttttaggtattttcacaaacaaactggcttttaaataaatttgcttccatattggttgaataagacaaaaacaattaaactgagtgggaagtgaataaaaaaaggctttaggtatcgattccatatttttcaaagccaaatatgtaaatgctaaggaaagtaaacaaagaggagattccaatcttgtaatttaatattgttattaaaactttaatgtatcctattctttaacatttggtgttaatataaaattacttggcaatgcttgacatttgaaataaacatttttctattgttttattgcaagtggtccaattaattttgcttagctacagtttggtcataaatcaagtgagtttaaagacactaccaagttgttaggtgcccagagaaaatttctcccttttaaaaaggccaggtgatttttcaaatgtaatcttgcccccaaagtaatatctgaatatctttttgacatgtctaaatatatatatatataaagaaatatttgttaacacaaaagcatttgatctatgtagataaatgctaatagatttaaaaagctaatattaacaaataccagaatacgtgaagttccatttttaaagtgtttgagcttacagaagagaaacattcattttaaatgaagtaaaaaatgccttgaaagtaattctttagatagttgcccattgattaaattccaaaaactaaatatgtttttagctttaaaattataaaagctgtcataaactttatatattatgaattttaaaatatgtttgagtctcctgcaatatagtttcatcccattgacatcaattaaaaataaccctaatatattatttttatatttattcctcaggtggaatggctattttaatatgcccagtgtggataaaatgtcacatttctgtaacttttgactaaagagcctatatttatctagttaatgaatttaaaggatctatctttcccttcataaaatacctcttatttccattaaagccccccaagtttaattaatttaggattttgaatgattattgacatccaatagttatttttaatatttgtattcttgttatttctggaagaaagcctttgtgtagcacttggtattttgcaaagtgcttttaaaacattcttacttaccgtatttcatagaagggaaggaaaaatgtaaggtttaacagtaagcacttgcattgaacatggaggcatgtggtatcatgatattcttcactaaatttagctgtccctaatcacagatcctaaggtaatataatataattttagtgcatttctcctcatcaggaatgctggaggtgcattttaagttttaataataagtgctagaatgaccaaattgcagactaattgtttccatattgtacttaaaatgagtttttaaaagtgaaaaagaaatgactatatacaatcaatgctatttattgtacctctgggcctactcttctaaaaattgtagcttatcgatttttctctgtcaagcttgaactaatgtaaataattgaaataatgtaaagttatattttcatgtttttatagatacaacatgacaagaatacataatgtaagagtatttcaactatggataatgttgattggataatgcacatctcagttacaagcagtactcatagtttaatatccatgtaacggtgcatcaatatattgctatataaatatgtctgtgtgcatataagtgaaaagtggtcaaacaagagtgatgacagctgtctaaaggtttttttattcattttatataaaaactgttatggaaagaccaaaatgtttatgaactattcttatgtaaatttacaattgtcctttactgtacttttttgtttacagtatagtaccttattttctgctgtgttaagtgggtgtcaaactccaagaagacatacactttctataacttctattgaagatattggaatttccaatttttcatgtgtactatgtcagaaaatgctttcgattttatttttaaatctaacatcggatggcttttccggagtgttgtaaaaacttcaatcatacataaaacatgttcttacaaaaggcaaa

SEQ ID NO: 16349 - DNA, 3041 bp, Artificial Sequence
  derived and/or modified sequence
aggtgaggaggatgacagggcttctgtattgctaaatgggttttcacaggagatggaagataaaaatcaaaattatttgtaacgtaagacagcagggcctggtgagaggacgcttcgccgccaacaattagcaattcggcttctacacagcagccggagatcagctttgctgcatttggtccaggttggagcatctccgcagcagctgcaacagccgcacgaaggggggctatttcctaggggcgccgatcaagaatacagtgcatttcgagtagggatggttcagttttccacttcggagttcagactgacaccccacatcgacaatttggaggtggcaaacagcttcgcagtcactaatgctttctgctcccagttttcgagaggagtctatgctatttttggattttatgacaagaagtctgtaaataccatcacatcattttgcggaacactccacgtctccttcatcactcccagcttcccaacagatggcacacatccatttgtcattcagatgagacccgacctcaaaggagctctccttagcttgattgaatactatcaatgggacaagtttgcatacctctatgacagtgacagaggcttatcaacactgcaagctgtgctggattctgctgctgaaaagaaatggcaagtgactgctatcaatgtgggaaacattaacaatgacaagaaagatgagatgtaccgatcactttttcaagatctggagttaaaaaaggaacggcgtgtaattctggactgtgaaagggataaagtaaacgacattgtagaccaggttattaccattggaaaacatgttaaagggtaccactacatcattgcaaatctgggatttactgatggagacctattaaaaatccagtttggaggtgcaaatgtctctggatttcagatagtggactatgatgattcgttggtatctaaatttatagaaagatggtcaacactggaagaaaaagaataccctggagctcacacaacaacaattaagtatacttctgctctgacctatgatgccgttcaagtgatgactgaagccttccgcaacctaaggaagcaaagaattgaaatctcccgaagggggaatgcaggagactgtctggcaaacccagcagtgccctggggacaaggtgtagaaatagaaagggccctcaaacaggttcaggttgaaggtctctcaggaaatataaagtttgaccagaatggaaaaagaataaactatacaattaacatcatggagctcaaaactaatgggccccggaagattggctactggagtgaagtggacaaaatggttgttacccttactgagctcccttctggaaatgacacctctgggcttgagaataagactgttgttgtcaccacaattttggaatctccgtatgttatgatgaagaaaaatcatgaaatgcttgaaggcaatgagcgctatgagggctactgtgttgacctggctgcagaaatcgccaaacattgtgggttcaagtacaagttgacaattgttggtgatggcaagtatggggccagggatgcagacacgaaaatttggaatgggatggttggagaacttgtatatgggaaagctgatattgcaattgctccattaactattacccttgtgagagaagaggtgattgacttctcaaagcccttcatgagcctcgggatatctatcatgatcaagaagcctcagaagtccaaaccaggagtgttttcctttcttgatcctttagcctatgagatctggatgtgcattgtttttgcctacattggggtcagtgtagttttattcctggtcagcagatttagcccctacgagtggcacactgaggagtttgaagatggaagagaaacacaaagtagtgaatcaactaatgaatttgggatttttaatagtctctggttttccttgggtgcctttatgcagcaaggatgcgatatttcgccaagatccctctctgggcgcattgttggaggtgtgtggtggttctttaccctgatcataatctcctcctacacggctaacttagctgccttcctgactgtagagaggatggtgtctcccatcgaaagtgctgaggatctttctaagcaaacagaaattgcttatggaacattagactctggctccactaaagagtttttcaggagatctaaaattgcagtgtttgataaaatgtggacctacatgcggagtgcggagccctctgtgtttgtgaggactacggccgaaggggtggctagagtgcggaagtccaaagggaaatatgcctacttgttggagtccacgatgaacgagtacattgagcaaaggaagccttgcgacaccatgaaagttggtggaaacctggattccaaaggctatggcatcgcaacacctaaaggatcctcattaagaaccccagtaaatcttgcagtattgaaactcagtgagcaaggcgtcttagacaagctgaaaaacaaatggtggtacgataaaggtgaatgtggagccaaggactctggaagtaaggaaaagaccagtgccctcagtctgagcaacgttgctggagtattctacatccttgtcgggggccttggtttggcaatgctggtggctttgattgagttctgttacaagtcaagggccgaggcgaaacgaatgaaggtggcaaagaatgcacagaatattaacccatcttcctcgcagaattcacagaattttgcaacttataaggaaggttacaacgtatatggcatcgaaagtgttaaaatttaggggatgaccttgaatgatgccatgaggaacaaggcaaggctgtcaattacaggaagtactggagaaaatggacgtgttatgactccagaatttcccaaagcagtgcatgctgtcccttacgtgagtcctggcatgggaatgaatgtcagtgtgactgatctctcgtgattgataagaaccttttgagtgccttacacaatggttttcttgtgtgtttattgtcaaagtggtgagaggcatccagtatcttgaa

SEQ ID NO: 16350 - DNA, 2652 bp, Artificial Sequence
  derived and/or modified sequence
atgcagaagatcatgcacatctctgtgctgctgagccctgtgctgtggggcctcatcttcggcgtgagcagcaacagcatccagattggaggcctcttccccagaggagctgaccaggagtacagcgccttccgggtgggcatggtgcagttcagcaccagcgagttccggctgaccccccacatcgacaacctggaggtggccaacagctttgctgtgaccaatgccttctgcagccagttcagccggggcgtgtatgccatcttcggcttctatgacaagaagtctgtgaacaccatcaccagcttctgtggcaccctgcacgtgtccttcatcacccccagcttccccacagatggcacccaccccttcgtcatccagatgaggccagacctgaagggggccctgctgagcctcatcgagtactaccagtgggacaagtttgcctacctgtatgacagcgaccggggcctgagcaccctgcaggccgtgctggacagcgctgctgagaagaagtggcaggtgacagccatcaacgtgggcaacatcaacaatgacaagaaggatgagatgtaccgcagcctcttccaggacctggagctgaagaaggagaggagggtcatcctggactgtgagcgggacaaggtgaatgacatcgtggaccaggtgatcaccatcggcaagcacgtgaagggctaccactacatcatcgccaacctgggcttcacagatggagacctgctgaagatccagtttggaggagccaacgtgtctggcttccagatcgtggactatgatgacagcctggtgtccaagttcatcgagcgctggagcaccctggaggagaaggagtacccaggggcccacaccaccaccatcaagtacaccagcgccctgacctatgatgctgtgcaggtgatgacagaggccttcaggaacctgaggaagcagagaattgagatcagcagaagaggaaatgctggggactgcctggccaacccagctgtgccctggggccagggcgtggagattgaaagagccctgaagcaggtgcaggtggagggcctgagcggcaacatcaagtttgaccagaatggcaagaggatcaactacaccatcaacatcatggagctgaagaccaacggccccaggaagattggctactggagcgaggtggacaagatggtggtgaccctgacagagctgcccagcggaaatgacaccagcggcctggagaacaagacagtggtggtgaccaccatcctggagagcccctacgtgatgatgaagaagaaccacgagatgctggagggcaatgaaagatatgagggctactgtgtggacctggccgctgagatcgccaagcactgcggcttcaagtacaagctgaccatcgtgggagatggcaagtatggagccagagatgctgacaccaagatctggaatggcatggtgggggagctggtgtatggcaaggctgacatcgccatcgcccccctgaccatcaccctggtgcgggaggaggtgattgacttcagcaagcccttcatgagcctgggcatcagcatcatgatcaagaagccccagaagagcaagccaggagtcttctccttcctggaccccctggcctatgagatctggatgtgcatcgtgtttgcctacatcggcgtgtctgtggtgctcttcctggtgagccgcttcagcccctatgagtggcacacagaggagtttgaagatggccgggagacccagagcagcgagagcaccaatgaatttggcatcttcaacagcctgtggttcagcctgggcgccttcatgcagcagggctgtgacatcagccccaggagcctgagcggcagaattgtgggcggcgtgtggtggttcttcaccctcatcatcatcagcagctacacagccaacctggccgccttcctgactgtggagaggatggtgagccccatcgagagcgctgaggacctgagcaagcagacagagatcgcctacggcaccctggacagcggcagcaccaaggagttcttcagaagaagcaagattgctgtgtttgacaagatgtggacctacatgaggtctgctgagcccagcgtgtttgtgaggaccacagctgagggcgtggcccgggtgaggaagagcaagggcaagtatgcctacctgctggagagcaccatgaatgagtacatcgagcagaggaagccctgtgacaccatgaaggtgggcggcaacctggacagcaagggctatggaattgccacccccaagggcagcagcctgcggacccctgtgaacctggccgtgctgaagctgtctgagcagggcgtgctggacaagctgaagaacaagtggtggtatgacaagggagaatgtggggccaaggacagcggcagcaaggagaagaccagcgccctgagcctgagcaatgtggccggggtcttctacatcctggtgggcggcctgggcctggccatgctggtggccctgattgagttctgctacaagagcagagctgaggccaagaggatgaaggtggccaagaatgcccagaacatcaaccccagcagcagccagaacagccagaactttgccacctacaaggagggctacaacgtgtatggcatcgagagcgtgaagatctag

SEQ ID NO: 16351 - DNA, 2652 bp, Artificial Sequence
  derived and/or modified sequence
atgcagaagatcatgcacatcagcgtgctgctgagccccgtgctgtggggcctgatcttcggggtgtcaagcaacagcattcagatcgggggccttttcccgcggggggccgaccaggagtattccgcttttagagttgggatggtgcagttctccacctctgagttcagactgacacctcacatcgataaccttgaggtcgccaacagtttcgccgtcaccaacgccttctgcagtcagttctcccgaggggtctacgctattttcggcttctatgacaagaagagtgtgaatactattacgtcattctgtggaacactgcatgtgagcttcatcactccctccttcccgacagatgggactcaccccttcgtgatccaaatgcgaccggacttgaaaggagctcttctgagcctcattgagtattaccagtgggataagttcgcgtatttatatgactcagatagaggactctcaaccctgcaagccgtgctggattcagcggccgagaagaaatggcaggtaacagccatcaacgtcgggaatattaacaatgacaagaaggatgaaatgtatcgaagcctgttccaggatttggagttaaaaaaggaacggagagtcatattagattgtgaacgcgataaagtgaacgatattgtcgaccaggttattacgattggaaaacacgtcaagggttatcattacatcatcgcaaacctaggatttactgacggtgacctccttaagatccagttcgggggcgccaatgtcagcggattccagattgtggactatgacgacagcctggtgtccaagtttatcgaacgctggagcaccttggaagagaaagagtacccgggcgcccacacaaccacaatcaaatacacatcagcattgacctacgacgcagttcaggtcatgaccgaggccttccgcaatcttagaaaacagaggattgagatcagccgcagagggaacgcgggggattgcttggccaaccccgctgtgccttggggtcagggcgtcgagatcgaacgggccttgaaacaggtgcaggtagaagggttgtcgggcaacattaagtttgatcagaacggaaagaggattaactatacaattaatattatggaactaaaaaccaacgggccaagaaagattggctactggtcagaggtggataaaatggtcgtgaccctgacggagttgcctagtgggaacgatacctcagggctggagaataagaccgttgtggttacaacgattctggagtctccctatgtcatgatgaagaagaaccatgagatgctagagggtaatgagagatacgaaggttattgtgtggatttagcggcggagattgccaaacattgtggcttcaagtataaattaacgatcgtaggagatgggaagtacggggctcgtgacgctgacacaaagatctggaacggcatggtgggcgagctcgtgtacggtaaggctgatatagcaatcgctcctctgacaatcacactcgtgcgggaggaagttatagatttcagcaagccatttatgagcttgggaatctctattatgattaaaaaaccccagaagtccaagcctggggtgtttagtttcttggatcccctcgcttatgaaatctggatgtgtattgtcttcgcttacatcggggtatctgtggtgctctttctggtcagcaggttctcaccttatgagtggcacaccgaggaattcgaggatggccgggagacacagagctcagagagcactaatgagtttggaatctttaattctctgtggttttctcttggagcatttatgcagcaaggttgcgatatatccccccgctctctgtccggtcgaatagtcggcggggtgtggtggtttttcactttgatcattatcagcagttatactgccaacctcgctgctttcttgactgttgaacgcatggtgagccctatcgaatcagccgaggacttgtcaaaacagacagaaatcgcctacggcacccttgacagcggctccacaaaagagttcttccgaaggagcaaaatcgctgttttcgacaagatgtggacatacatgcggagtgccgagccatcagtgttcgttagaacaacagccgagggcgtggcccgcgtgcggaagagcaagggtaagtacgcctatttacttgagtccacaatgaacgagtatattgagcagcgcaagccctgcgacactatgaaggtcggggggaatctcgactccaaggggtatggaattgccacccccaaagggtcctccctcagaacaccagtgaatttggcggtgttgaaactttcagaacagggggtgcttgataagctgaaaaataagtggtggtacgataaaggtgagtgcggcgccaaggactctgggtctaaggaaaagaccagcgcactgtccctatctaacgtagccggagtgttctacatcctcgttggaggtctcggactggcgatgctcgttgcgctgatcgagttttgctataagtcgcgtgccgaagcgaagcgtatgaaagtcgctaaaaatgcacagaacatcaatccaagctctagtcagaactcacaaaactttgcaacctacaaggagggatacaatgtctacgggatcgaatccgtgaaaatttag

SEQ ID NO: 16352 - DNA, 2652 bp, Artificial Sequence
  derived and/or modified sequence
atgcagaagatcatgcacatatccgtgctgttgagtccggtattatgggggctcatcttcggcgtgtccagtaactccatacagattggcggactgttccccagaggtgctgaccaggaatactctgcgtttcgagtgggtatggtccaattcagtactagtgaattcagattaacgcctcatatcgacaatctggaggtagccaacagtttcgccgtgaccaacgcattttgtagccaattttcaagaggtgtctacgcaattttcggattttacgacaagaagtctgtgaacacaattacatccttttgcgggacgttgcacgtgagcttcattacaccctccttccctaccgacggtacacatcccttcgtaatccagatgcgtcctgatctcaagggagcgctcctgtccctgatcgagtactaccagtgggacaagtttgcttacttatatgactctgatcgagggctgtccaccctgcaggccgtgttggattccgctgccgaaaaaaagtggcaagtgaccgccataaacgtgggaaatatcaataatgataagaaagatgagatgtaccggagcttatttcaggatctagaactgaaaaaagagagaagagtgattctagactgcgaacgagacaaggtgaatgacattgtggaccaggtgattactattgggaagcatgtgaaggggtaccattacattatcgcaaatttgggattcacagatggggacctgctgaagattcagttcgggggagcaaacgtctccggattccagatcgtcgactatgacgatagtttggtgtctaagttcattgaacggtggtcgaccctggaggaaaaggaataccctggcgcacataccacaactatcaagtacaccagcgctctcacctatgatgccgtgcaggtgatgacagaagcttttcgcaaccttagaaagcaaaggatcgaaattagtaggagaggcaatgccggtgactgtctcgcgaatccggcagtcccctggggccaaggggtggagattgaacgagctctgaagcaagtgcaggtggaggggctgtcaggaaacattaaattcgaccaaaacggcaagcgcatcaactataccattaatatcatggagctcaagacaaatgggcctcgtaagataggttattggtccgaggttgataaaatggttgtgacgctgaccgaactgccatcaggtaacgacacatcaggtcttgagaataagaccgttgtggttactacaatcctggagtccccttatgtgatgatgaagaaaaaccacgagatgctggaaggcaacgaacgctacgagggttactgtgtcgacctcgctgctgagattgcaaaacactgcggcttcaagtacaagctgacaatcgtgggagatggaaagtatggggctcgtgatgctgacaccaaaatatggaacggtatggttggagagttggtatatggcaaggccgacatcgccattgctcccttgaccattacgttagtgagagaagaggttattgatttctctaagcctttcatgagtctgggcatctccattatgatcaagaaaccacaaaagtcgaagcccggtgttttcagttttctggatccgctcgcgtatgagatctggatgtgcatcgtattcgcatacataggtgtctccgtcgtcttatttctggtctctaggtttagtccatacgagtggcacaccgaggagtttgaggacgggagagaaactcaaagctcagagtccactaacgagttcggtatcttcaactcgttgtggtttagcttaggcgcattcatgcagcagggctgtgatatcagcccacgttctttgagcggccgaatcgttggcggtgtatggtggttcttcacattgatcatcatttcatcatatacggcgaatctcgcagctttcctcacagtagaacggatggtgagtccaattgaaagcgccgaggatcttagtaaacagacagagattgcctacggcaccctcgactcgggaagcactaaagagtttttccggagaagcaaaatagcagtgtttgacaaaatgtggacctacatgcgaagtgcagagccgagcgtatttgtgcggactacagctgaaggcgtggcacgagtgaggaagtccaagggaaagtatgcttatctgctggaaagtacaatgaatgaatatatcgagcagcgaaagccttgtgataccatgaaagtgggcggtaacttggatagtaagggttacggaatagccacaccaaaaggctccagtctgagaacacccgtcaacctcgctgtgctgaaactttccgaacagggtgtcctcgataagcttaagaacaagtggtggtacgataaaggcgagtgcggcgcaaaagactcgggaagcaaagaaaaaacatctgccttgagcctctccaatgtggccggagtgttctacatcctcgtggggggactgggcttagccatgctcgtggctctgatcgagttttgttataagagtagggcggaggctaaaagaatgaaagtggcaaagaatgctcaaaatatcaatccctcctctagccagaattctcaaaacttcgcaacctacaaagaaggatacaacgtatatggcatagagtcagtgaaaatatag

SEQ ID NO: 16353 - DNA, 2652 bp, Artificial Sequence
  derived and/or modified sequence
atgcagaagatcatgcacatcagcgtgctgctgagccccgtgctgtggggcctgatcttcggcgtgagcagcaacagcatccagatcggcggcctgttccccagaggcgccgaccaggagtacagcgccttcagagtgggcatggtgcagttcagcaccagcgagttcagactgaccccccacatcgacaacctggaggtggccaacagcttcgccgtgaccaacgccttctgcagccagttcagcagaggcgtgtacgccatcttcggcttctacgacaagaagagcgtgaacaccatcaccagcttctgcggcaccctgcacgtgagcttcatcacccccagcttccccaccgacggcacccaccccttcgtgatccagatgagacccgacctgaagggcgccctgctgagcctgatcgagtactaccagtgggacaagttcgcctacctgtacgacagcgacagaggcctgagcaccctgcaggccgtgctggacagcgccgccgagaagaagtggcaggtgaccgccatcaacgtgggcaacatcaacaacgacaagaaggacgagatgtacagaagcctgttccaggacctggagctgaagaaggagagaagagtgatcctggactgcgagagagacaaggtgaacgacatcgtggaccaggtgatcaccatcggcaagcacgtgaagggctaccactacatcatcgccaacctgggcttcaccgacggcgacctgctgaagatccagttcggcggcgccaacgtgagcggcttccagatcgtggactacgacgacagcctggtgagcaagttcatcgagagatggagcaccctggaggagaaggagtaccccggcgcccacaccaccaccatcaagtacaccagcgccctgacctacgacgccgtgcaggtgatgaccgaggccttcagaaacctgagaaagcagagaatcgagatcagcagaagaggcaacgccggcgactgcctggccaaccccgccgtgccctggggccagggcgtggagatcgagagagccctgaagcaggtgcaggtggagggcctgagcggcaacatcaagttcgaccagaacggcaagagaatcaactacaccatcaacatcatggagctgaagaccaacggccccagaaagatcggctactggagcgaggtggacaagatggtggtgaccctgaccgagctgcccagcggcaacgacaccagcggcctggagaacaagaccgtggtggtgaccaccatcctggagagcccctacgtgatgatgaagaagaaccacgagatgctggagggcaacgagagatacgagggctactgcgtggacctggccgccgagatcgccaagcactgcggcttcaagtacaagctgaccatcgtgggcgacggcaagtacggcgccagagacgccgacaccaagatctggaacggcatggtgggcgagctggtgtacggcaaggccgacatcgccatcgcccccctgaccatcaccctggtgagagaggaggtgatcgacttcagcaagcccttcatgagcctgggcatcagcatcatgatcaagaagccccagaagagcaagcccggcgtgttcagcttcctggaccccctggcctacgagatctggatgtgcatcgtgttcgcctacatcggcgtgagcgtggtgctgttcctggtgagcagattcagcccctacgagtggcacaccgaggagttcgaggacggcagagagacccagagcagcgagagcaccaacgagttcggcatcttcaacagcctgtggttcagcctgggcgccttcatgcagcagggctgcgacatcagccccagaagcctgagcggcagaatcgtgggcggcgtgtggtggttcttcaccctgatcatcatcagcagctacaccgccaacctggccgccttcctgaccgtggagagaatggtgagccccatcgagagcgccgaggacctgagcaagcagaccgagatcgcctacggcaccctggacagcggcagcaccaaggagttcttcagaagaagcaagatcgccgtgttcgacaagatgtggacctacatgagaagcgccgagcccagcgtgttcgtgagaaccaccgccgagggcgtggccagagtgagaaagagcaagggcaagtacgcctacctgctggagagcaccatgaacgagtacatcgagcagagaaagccctgcgacaccatgaaggtgggcggcaacctggacagcaagggctacggcatcgccacccccaagggcagcagcctgagaacccccgtgaacctggccgtgctgaagctgagcgagcagggcgtgctggacaagctgaagaacaagtggtggtacgacaagggcgagtgcggcgccaaggacagcggcagcaaggagaagaccagcgccctgagcctgagcaacgtggccggcgtgttctacatcctggtgggcggcctgggcctggccatgctggtggccctgatcgagttctgctacaagagcagagccgaggccaagagaatgaaggtggccaagaacgcccagaacatcaaccccagcagcagccagaacagccagaacttcgccacctacaaggagggctacaacgtgtacggcatcgagagcgtgaagatctag

SEQ ID NO: 16354 - protein, 906 aa, Artificial Sequence
  derived and/or modified sequence
MQHIFAFFCTGFLGAVVGANFPNNIQIGGLFPNQQSQEHAAFRFALSQLTEPPKLLPQIDIVNISDSFEMTYRFCSQFSKGVYAIFGFYERRTVNMLTSFCGALHVCFITPSFPVDTSNQFVLQLRPELQDALISIIDHYKWQKFVYIYDADRGLSVLQKVLDTAAEKNWQVTAVNILTTTEEGYRMLFQDLEKKKERLVVVDCESERLNAILGQIIKLEKNGIGYHYILANLGFMDIDLNKFKESGANVTGFQLVNYTDTIPAKIMQQWKNSDARDHTRVDWKRPKYTSALTYDGVKVMAEAFQSLRRQRIDISRRGNAGDCLANPAVPWGQGIDIQRALQQVRFEGLTGNVQFNEKGRRTNYTLHVIEMKHDGIRKIGYWNEDDKFVPAATDAQAGGDNSSVQNRTYIVTTILEDPYVMLKKNANQFEGNDRYEGYCVELAAEIAKHVGYSYRLEIVSDGKYGARDPDTKAWNGMVGELVYGRADVAVAPLTITLVREEVIDFSKPFMSLGISIMIKKPQKSKPGVFSFLDPLAYEIWMCIVFAYIGVSVVLFLVSRFSPYEWHSEEFEEGRDQTTSDQSNEFGIFNSLWFSLGAFMQQGCDISPRSLSGRIVGGVWWFFTLIIISSYTANLAAFLTVERMVSPIESAEDLAKQTEIAYGTLEAGSTKEFFRRSKIAVFEKMWTYMKSAEPSVFVRTTEEGMIRVRKSKGKYAYLLESTMNEYIEQRKPCDTMKVGGNLDSKGYGIATPKGSALRNPVNLAVLKLNEQGLLDKLKNKWWYDKGECGSGGGDSKDKTSALSLSNVAGVFYILIGGLGLAMLVALIEFCYKSRSESKRMKGFCLIPQQSINEAIRTSTLPRNSGAGASSGGSGENGRVVSHDFPKSMQSIPCMSHSSGMPLGATGL

SEQ ID NO: 16355 - protein, 837 aa, Artificial Sequence
  derived and/or modified sequence
MTYRFCSQFSKGVYAIFGFYERRTVNMLTSFCGALHVCFITPSFPVDTSNQFVLQLRPELQDALISIIDHYKWQKFVYIYDADRGLSVLQKVLDTAAEKNWQVTAVNILTTTEEGYRMLFQDLEKKKERLVVVDCESERLNAILGQIIKLEKNGIGYHYILANLGFMDIDLNKFKESGANVTGFQLVNYTDTIPAKIMQQWKNSDARDHTRVDWKRPKYTSALTYDGVKVMAEAFQSLRRQRIDISRRGNAGDCLANPAVPWGQGIDIQRALQQVRFEGLTGNVQFNEKGRRTNYTLHVIEMKHDGIRKIGYWNEDDKFVPAATDAQAGGDNSSVQNRTYIVTTILEDPYVMLKKNANQFEGNDRYEGYCVELAAEIAKHVGYSYRLEIVSDGKYGARDPDTKAWNGMVGELVYGRADVAVAPLTITLVREEVIDFSKPFMSLGISIMIKKPQKSKPGVFSFLDPLAYEIWMCIVFAYIGVSVVLFLVSRFSPYEWHSEEFEEGRDQTTSDQSNEFGIFNSLWFSLGAFMQQGCDISPRSLSGRIVGGVWWFFTLIIISSYTANLAAFLTVERMVSPIESAEDLAKQTEIAYGTLEAGSTKEFFRRSKIAVFEKMWTYMKSAEPSVFVRTTEEGMIRVRKSKGKYAYLLESTMNEYIEQRKPCDTMKVGGNLDSKGYGIATPKGSALRNPVNLAVLKLNEQGLLDKLKNKWWYDKGECGSGGGDSKDKTSALSLSNVAGVFYILIGGLGLAMLVALIEFCYKSRSESKRMKGFCLIPQQSINEAIRTSTLPRNSGAGASSGGSGENGRVVSHDFPKSMQSIPCMSHSSGMPLGATGL

SEQ ID NO: 16356 - DNA, 2721 bp, Artificial Sequence
  derived and/or modified sequence
atgcagcatatctttgcctttttttgtaccggctttctgggagccgtggttggtgccaatttccccaacaacattcagatcggcggactttttcctaatcagcagtcacaggaacatgctgcttttagatttgcattgtcccagcttacagagccaccgaagcttctgccccagatcgacatcgtaaatatttcagactcatttgaaatgacataccgcttttgttctcagttttcgaaaggtgtatatgccatctttggcttctatgaaagacgaactgtgaacatgttgacctccttctgcggtgccctgcacgtctgctttatcacaccctccttccccgtagacacatccaatcagtttgttttgcagttgcgacccgaactgcaggatgcactgatctcaattatcgatcattacaaatggcagaaatttgtgtatatctacgatgccgatcggggtctgtcggtcctgcagaaagtgctagatacagcagcggagaaaaattggcaagtgacggccgtaaacattttaacaaccaccgaggagggttacagaatgttgtttcaagacctcgagaagaaaaaagaaagactggttgtggtggactgtgagtcagagcgccttaacgccatactagggcaaataatcaaactggagaaaaacggaattggctatcattacatcctggctaacctgggctttatggacattgatctaaataaatttaaggagtctggcgccaacgtcaccgggttccagcttgtaaactatactgataccatccctgcgaagattatgcagcagtggaagaacagtgatgcccgcgaccacacgcgcgtggactggaagcgcccaaagtatacctcagccctgacctatgatggtgtgaaagtcatggcagaggcctttcagtcactgcgaaggcaaagaatagatatctctcgacgagggaacgcaggagactgcttggcaaaccccgccgtgccttgggggcagggcatcgatatccagagggccttacaacaggtgcgatttgagggcttgacaggaaatgtccagttcaacgaaaagggtcgcagaaccaattacacactacacgtgatagaaatgaaacatgacgggataaggaagatcggctattggaacgaagatgataaattcgtgccagcggcaaccgatgcccaggctggcggggacaacagttcggtacagaataggacatacattgtcacaacaatactagaagacccatacgttatgctgaaaaagaatgccaatcagttcgaggggaatgaccggtatgagggatattgtgtcgaactggctgccgaaatagctaaacatgtcggatactcgtataggctggagatcgtctcagacgggaaatatggtgcaagggacccagacacaaaagcctggaacggtatggtgggtgagcttgtttatggtagggcggacgtggcagtggccccactgaccatcaccctcgtgagggaggaggtcatcgactttagtaagccatttatgtctctcggtatctctattatgatcaaaaaaccacagaaatccaaacctggagttttttcctttcttgatcccctcgcgtacgagatatggatgtgcattgtttttgcatacatcggcgtttcagtggtactcttcttagtcagccgcttctcaccctatgagtggcactcggaagagtttgaagagggacgggaccagactacttccgaccagagcaatgaattcggaatattcaattctctgtggttttctctgggagcttttatgcagcagggatgtgatatctctccacggtctctttctggtcgtatcgtgggcggagtctggtggttctttaccctcattatcatctcttcttataccgctaatctcgccgccttcctgaccgtcgagaggatggtctctccaatcgagtccgcagaggacttagctaagcagacggagatcgcttatgggaccctcgaagccggcagcactaaggagttttttcgcaggtctaaaatcgcagtgtttgagaagatgtggacctatatgaagtctgccgaacccagtgtattcgtgcgcacgacagaggagggtatgatccgtgtgcggaagagtaaaggtaagtatgcctacctcctggagtctaccatgaacgagtacattgaacagcgcaagccatgcgataccatgaaggtcggcgggaacttagactcgaaaggctatggcattgcaactccaaaaggctcagccctccggaaccccgtcaacctcgccgttctgaaactgaacgagcagggcctacttgacaagctgaaaaacaagtggtggtatgacaagggcgaatgtgggagtggggggggcgacagcaaagataagacctccgccctcagtctttctaacgtggccggcgtattctacatcctgatcggggggctgggactcgccatgctggtggcactcattgaattttgctacaagtccagatccgagagcaaacgcatgaaaggattctgtttgatcccacaacagagcatcaacgaggcgatccgcacgtccactttgccacggaattccggagctggggcatccagtgggggatccggggagaacggtcgcgtggtgtcccatgactttccgaaatccatgcagagtattccttgcatgtcccactccagcgggatgccactcggagcgacgggactctag

SEQ ID NO: 16357 - DNA, 2514 bp, Artificial Sequence
  derived and/or modified sequence
atgacctatcggttttgcagtcaattctcgaaaggtgtgtatgcgatttttggcttttacgagcgcaggactgtcaacatgctcacatcattttgcggagcactgcatgtgtgctttatcactcccagttttcccgtagacacatccaatcagttcgttctccagttgagacccgaattgcaggacgccctgattagtataatcgaccactacaaatggcagaaattcgtatacatctacgacgcagatagaggtctctctgtgctgcaaaaggttcttgacactgccgccgaaaagaactggcaggtgaccgccgtaaacatcctgactaccaccgaggagggctacaggatgttgtttcaggacctggagaagaagaaggagaggttggtggtcgtggactgcgagtccgagaggttaaacgccattcttggacagataataaagctcgaaaagaacggaatcggctaccactatatcttggctaacctgggctttatggacattgacctgaataagttcaaggagtccggagcaaacgtgactggattccaactggtgaattataccgatactattcccgctaaaattatgcaacagtggaagaactcagatgccagagaccacacaagagtggattggaagaggcccaagtatacctcagccctaacatatgatggggtgaaggttatggccgaagcctttcagagccttaggaggcagcgcatcgacatctcccgcagaggcaacgctggggactgcttggcaaaccccgccgtaccatggggccaaggaattgatatccagagagcactccaacaagtgagattcgagggacttacagggaatgtgcagttcaacgagaagggacggcgcactaactatactcttcacgtcatcgaaatgaagcatgatggcatccgtaagatcgggtattggaacgaggacgacaagttcgtgccagctgccaccgatgcgcaggccggcggtgacaatagcagtgtgcagaacaggacatatatagttacaacgatattggaagacccttatgtgatgttgaagaaaaacgccaatcaatttgaagggaacgaccggtacgagggctattgcgttgagttggcggccgagattgctaagcatgtgggctactcataccggctagaaatagtctccgacggaaagtacggcgcacgcgatccggatacaaaggcatggaatggtatggtaggggagcttgtgtacggccgagctgacgtggcagtcgcacccctaactatcaccttggtcagggaggaagtgattgatttctccaaaccttttatgagcctggggataagcatcatgattaaaaagccacaaaagtctaaacccggcgtgttcagctttctcgaccccctggcgtacgaaatttggatgtgtattgttttcgcgtatatcggggtgagcgttgtgctgttcttggtctctcgattctctccatacgaatggcactcagaggagttcgaagaagggagagaccagactacctctgatcagtctaacgaattcggtatatttaactctctgtggtttagcctgggagcatttatgcagcagggatgcgatattagcccaaggtcactttccggccgcattgtcggaggggtatggtggttcttcaccctgattattattagcagctataccgccaatctggctgcatttctgaccgttgagcggatggtttcgccgatcgagtcggcagaagaccttgcaaagcagaccgagattgcatatgggaccctggaggctggatcaaccaaggaattcttcaggcggagcaagattgcagtatttgagaagatgtggacttacatgaaatccgctgagccatctgttttcgtaagaaccactgaagagggcatgataagggtgcgaaagtcaaaggggaagtatgcgtacctgttagaatcaactatgaacgagtatatcgaacagaggaagccctgcgacacaatgaaagttgggggcaaccttgactcaaagggctacggaattgccactccaaaagggtcggctctgcgcaatcccgttaaccttgcagtgttgaagctgaatgaacagggccttctcgataagttgaagaataaatggtggtacgataaaggtgagtgcggctcaggtggcggggacagcaaagataagaccagtgcactgtctttgtcaaatgtcgccggtgtcttctacattctgataggcggcctcggccttgctatgctggtcgctctgatcgagttctgctacaagtcccggtccgagtctaaaagaatgaagggattttgcttaattccccaacagtctatcaacgaggcaattcgaacctcaaccctcccaagaaacagtggggccggcgccagctctggggggtcaggggagaatggacgagtggtctctcacgatttccccaaaagcatgcagagcataccgtgtatgagccattctagtggcatgccacttggagctactgggctgtag

SEQ ID NO: 16358 - DNA, 5519 bp, Artificial Sequence
  derived and/or modified sequence
gtgtgagggggagagcgagagagagcaagggagggagagagaggcaggctgcgaggggagaggagagggagtgggggagccagcgctccagctagcatgaggacgggcttcttttcccgtgctcagttaatctggctgtcagttggtgttaacgctgcagtttaagtgttcggattccaagggaaacagacaaacctcacgaaaggaaggaagcaagcaagcaaggaaggaactgcaggaggaaaagaacaggcagaacagcgagaagaataaagggaaagggggggaaacaccaaatctatgattggacctgggcttctttttcgccaatgcaaaaaggaatatgcagcacatttttgccttcttctgcaccggtttcctaggcgcggtagtaggtgccaatttccccaacaatatccagatcgggggattatttccaaaccagcagtcacaggaacatgctgcttttagatttgctttgtcgcaactcacagagcccccgaagctgctcccccagattgatattgtgaacatcagcgacagctttgagatgacctatagattctgttcccagttctccaaaggagtctatgccatctttgggttttatgaacgtaggactgtcaacatgctgacctccttttgtggggccctccacgtctgcttcattacgccgagctttcccgttgatacatccaatcagtttgtccttcagctgcgccctgaactgcaggatgccctcatcagcatcattgaccattacaagtggcagaaatttgtctacatttatgatgccgaccggggcttatccgtcctgcagaaagtcctggatacagctgctgagaagaactggcaggtgacagcagtcaacattttgacaaccacagaggagggataccggatgctctttcaggacctggagaagaaaaaggagcggctggtggtggtggactgtgaatcagaacgcctcaatgctatcttgggccagattataaagctagagaagaatggcatcggctaccactacattcttgcaaatctgggcttcatggacattgacttaaacaaattcaaggagagtggcgccaatgtgacaggtttccagctggtgaactacacagacactattccggccaagatcatgcagcagtggaagaatagtgatgctcgagaccacacacgggtggactggaagagacccaagtacacctctgcgctcacctacgatggggtgaaggtgatggctgaggctttccagagcctgcggaggcagagaattgatatatctcgccgggggaatgctggggattgtctggctaacccagctgttccctggggccaagggatcgacatccagagagctctgcagcaggtgcgatttgaaggtttaacaggaaacgtgcagtttaatgagaaaggacgccggaccaactacacgctccacgtgattgaaatgaaacatgacggcatccgaaagattggttactggaatgaagatgataagtttgtccctgcagccaccgatgcccaagctgggggcgataattcaagtgttcagaacagaacatacatcgtcacaacaatcctagaagatccttatgtgatgctcaagaagaacgccaatcagtttgagggcaatgaccgttacgagggctactgtgtagagctggcggcagagattgccaagcacgtgggctactcctaccgtctggagattgtcagtgatggaaaatacggagcccgagaccctgacacgaaggcctggaatggcatggtgggagagctggtctatggaagagcagatgtggctgtggctcccttaactatcactttggtccgggaagaagttatagatttctccaaaccatttatgagtttggggatctccatcatgattaaaaaaccacagaaatccaagccgggtgtcttctccttccttgatcctttggcttatgagatttggatgtgcattgtttttgcctacattggagtgagtgttgtcctcttcctggtcagccgcttcagtccctatgaatggcacagtgaagagtttgaggaaggacgggaccagacaaccagtgaccagtccaatgagtttgggatattcaacagtttgtggttctccctgggagccttcatgcagcaaggatgtgacatttctcccaggtccctgtctggtcgcatcgttggtggcgtctggtggttcttcaccttaatcatcatctcctcatatacagccaatctggccgccttcctgaccgtggagaggatggtgtctcccattgagagtgcagaggacctagcgaagcagacagaaattgcctacgggacgctggaagcaggatctactaaggagttcttcaggaggtctaaaattgctgtgtttgagaagatgtggacatacatgaagtcagcagagccatcagtttttgtgcggaccacagaggaggggatgattcgagtgaggaaatccaaaggcaaatatgcctacctcctggagtccaccatgaatgagtacattgagcagcggaaaccctgtgacaccatgaaggtgggaggtaacttggattccaaaggctatggcattgcaacacccaaggggtctgccctgagaaatccagtaaacctggcagtgttaaaactgaacgagcaggggcttttggacaaattgaaaaacaaatggtggtacgacaagggcgagtgcggcagcgggggaggtgattccaaggacaagacaagcgctctgagcctcagcaatgtggcaggcgtgttctacatcctgatcggaggacttggactagccatgctggttgccttaatcgagttctgctacaaatcccgtagtgaatccaagcggatgaagggtttttgtttgatcccacagcaatccatcaacgaagccatacggacatcgaccctcccccgcaacagcggggcaggagccagcagcggcggcagtggagagaatggtcgggtggtcagccatgacttccccaagtccatgcaatcgattccttgcatgagccacagttcagggatgcccttgggagccacgggattgtaactggagcagatggagaccccttggggagcaggctcgggctccccagccccatcccaaacccttcagtgccaaaaacaacaacaaaatgaaacgcaaccaccaccaaccactgcgaccacaagaaggatgattcaacaggttttcctgaagaattgaaaaaccattttgctgtcccttttccttttttgatgttctttcacccttttctgtttgctaagtgaggatgaaaaaataacactgtactgcaataaggggagagtaaccctgtctaatgaaacctgtgtctctgagagtagagtcactggaacactaatgaggaaactgcactgttttattttaattcagttgttagtgtgtcttagtgtgtgcaattttttttcttactaatatccatggtttgcaggttctgttaggccctttccttctccttacttcttatccccaactccctacccacccctcttcagttttcagattggagattcaagatttgttccactttacaagcaagaggaaaaaaaagcaaccttcaaactaattctccatgggggctctccatgttaccctccactccttggcccaaacctctgatggagatagacattgttggagaagtgggctgccttccccaagtggggcactgcttaagcacttattcagtggagaacacaggtgaaaagcaactcaggatgagggtggtggagagggcaggggcagatgtgcagtcagagaaggactcctgaagttactgctgctcagaaaaacagttcctttaatgtggaagagccatttcataggtcataggtggtatggtatatttcttcagagtcaaccttggccctgagaagtatgtcctcctggtgtgctcaggctcaacggcagtctggtggctgaaggcacttggcctcctaaaccaagcagaattttgggaagagataacagccagggagatattgcccatgattctcactttttctttgcctggcatctaagcaggaacccattgtggagtagactctcttcttctatggagcctctgacatggggagcaatgctaagcaagctaagtgtaaaagaaaagtgacagaataattttggaagaggaagcctcatcaaaagctcacacaaaatagagcttcccatggtgtgccctatcctaggtttaagaaaacacgtatgaagtttatgctgatgcaaagaacttgggtttttatgttaatataaagtgttgttttagcatgtggccagatgatgctctgtcatctttagaaagtgagataaccaaggaaataattgaaggagtatagggagatggattaagttgataatgacatttagggcaacttaagacctttgatcccaggttctaactcaaagaggctgaccttcccccagctaagatagcatgaggacgttgtattccaatatacgtatgattggggctacaaagctgaactaaagcaagattggtgaagtggcagggtttatagagagaagcccaggctgagttcagcttttgttggaagtgagaatccctgacatatagctttcttggagatcccaactctcattcttggtgcaactggcttccagctctccagcagtcactctcctaggtgcatgattcagtgcgtgccatgtgtcattagcttttactgataaccatattctggcttgttcccttaccccctacttctatccaattttctctgctaggggttatcattagcaattgacatgctaaaggttttggagcccacctaggggtaggtgcagctttattggcttttctgtggattctctcagtggacccacaccatctctatgtctctccactctcctgccttcagccatagcaaagaatccttccaaaatcaaactcttcacttttttgactcaagtgttgttgttcagtctctcgcgtgtcaatgtggtcatggttcatgaaaccggaccctcaagatggatgattgcttttaactactgccagctgatgtctctcagcccctgccctcatacaagatttttctcagccttcagcctaccactgcagaatccgatgtgacccaccattagggagtctgcatcttggaagagttggaaataaccctttaacatcaacatgcttcaaagactttttgcctttggcctagtaagatgcctctccagctactgagcccacaagtaacatgagcggataaaaagagacttgtttgtgctagaaatgagggtctatgctatgagggggtccaagactctggcgaaatgtgctttttcatcaatggagaaatgaaaggaaaacacaagcaagaaaaaagttaacttgtattatgtatttttactacacttttcttaaaaatagagcattgggaaaactctgaaagagactgacatttttctcaacaggaatccatacttaacagttctggctttcattaaattttgctctttggta

SEQ ID NO: 16359 - DNA, 2721 bp, Artificial Sequence
  derived and/or modified sequence
atgcagcacatctttgccttcttctgcaccggcttcctgggcgctgtggtgggcgccaacttccccaacaacatccagattggaggcctcttccccaaccagcagagccaggagcacgccgccttccgctttgccctgagccagctgacagagccccccaagctgctgccccagattgatattgtgaacatcagtgacagctttgagatgacctaccgcttctgcagccagttcagcaagggcgtgtatgccatcttcggcttctatgaaagaagaacagtgaacatgctgaccagcttctgtggggccctgcacgtgtgcttcatcacccccagcttccctgtggacaccagcaaccagtttgtgctgcagctgcggcctgagctgcaggatgccctgatcagcatcatcgaccactacaagtggcagaagtttgtgtacatctatgatgctgaccggggcctgtctgtgctgcagaaggtgctggacacagctgctgagaagaactggcaggtgacagctgtgaacatcctgaccaccacagaggagggctacaggatgctgttccaggacctggagaagaagaaggagcggctggtggtggtggactgtgagagcgagcggctgaatgccatcctgggccagatcatcaagctggagaagaatggcatcggctaccactacatcctggccaacctgggcttcatggacatcgacctgaacaagttcaaggagagcggggccaacgtgacaggcttccagctggtgaactacacagacaccatcccagccaagatcatgcagcagtggaagaacagtgatgcccgggaccacaccagggtggactggaagaggcccaagtacaccagcgccctgacctatgatggagtgaaggtgatggccgaggccttccagagcctgcggcggcagagaattgacatcagcagaagaggaaatgctggggactgcctggccaacccagctgtgccctggggccagggcatcgacatccagagggccctgcagcaggtgcgctttgagggcctgactggaaatgtgcagttcaatgagaagggccgccgcaccaactacaccctgcacgtgattgagatgaagcatgatggcatcaggaagattggctactggaatgaagatgacaagtttgtgcctgctgccacagatgcccaggccggcggggacaacagctctgtgcagaacagaacctacatcgtgaccaccatcctggaggacccctacgtgatgctgaagaagaatgccaaccagtttgagggcaatgacagatatgagggctactgtgtggagctggccgctgagatcgccaagcacgtgggctacagctaccgcctggagatcgtgtctgatggcaagtacggggcccgggaccctgacaccaaggcctggaatggcatggtgggggagctggtgtatggccgggcagatgtggccgtggcccccctgaccatcaccctggtgcgggaggaggtgattgacttcagcaagcccttcatgagcctgggcatcagcatcatgatcaagaagccccagaagagcaagccaggagtcttctccttcctggaccccctggcctatgagatctggatgtgcatcgtgtttgcctacatcggcgtgtctgtggtgctcttcctggtgagccgcttcagcccctatgagtggcacagcgaggagtttgaggagggccgggaccagaccaccagtgaccagagcaatgaatttggcatcttcaacagcctgtggttcagcctgggcgccttcatgcagcagggctgtgacatcagccccaggagcctgagcggccgcatcgtgggcggcgtgtggtggttcttcaccctcatcatcatcagcagctacacagccaacctggccgccttcctgactgtggagaggatggtgagccccattgaatctgctgaggacctggccaagcagacagaaattgcctacggcaccctggaggccggcagcaccaaggagttcttccgccgcagcaagattgctgtgtttgagaagatgtggacctacatgaagtctgctgagcccagcgtgtttgtgaggaccacagaggagggcatgatccgggtgaggaagagcaagggcaagtatgcctacctgctggagagcaccatgaatgagtacatcgagcagaggaagccctgtgacaccatgaaggtgggcggcaacctggacagcaagggctacggcatcgccacccccaagggcagcgccctgagaaatcctgtgaacctggccgtgctgaagctgaatgagcagggcctgctggacaagctgaagaacaagtggtggtatgacaagggggagtgtggcagcggcggcggggacagcaaggacaagaccagcgccctgagcctgagcaatgtggccggggtcttctacatcctgattggaggcctgggcctggccatgctggtggccctgattgagttctgctacaagagccgctctgagagcaagaggatgaagggcttctgcctgatcccccagcagagcatcaatgaggccatccgcaccagcaccctgcccagaaattctggagctggggccagcagcggcggcagcggggagaatggccgggtggtgtcccatgacttccccaagtccatgcagagcatcccctgcatgagccacagcagcggcatgcccctgggcgccaccggcctgtag

SEQ ID NO: 16360 - DNA, 2514 bp, Artificial Sequence
  derived and/or modified sequence
atgacctaccgcttctgcagccagttcagcaaaggagtgtatgccatcttcggcttctatgaaagaagaacagtgaacatgctgaccagcttctgtggggccctgcacgtgtgcttcatcacccccagcttccctgtggacaccagcaaccagtttgtgctgcagctgcggcctgagctgcaggatgccctgatcagcatcatcgaccactacaagtggcagaagtttgtgtacatctatgatgctgaccggggcctgtctgtgctgcagaaggtgctggacacagctgctgagaagaactggcaggtgacagctgtgaacatcctgaccaccacagaggagggctacaggatgctgttccaggacctggagaagaagaaggagcggctggtggtggtggactgtgagagcgagcggctgaatgccatcctgggccagatcatcaagctggagaagaatggaattggctaccactacatcctggccaacctgggcttcatggacatcgacctgaacaagttcaaggagagcggggccaacgtgacaggcttccagctggtgaactacacagacaccatcccagccaagatcatgcagcagtggaagaacagtgatgcccgggaccacaccagggtggactggaagaggcccaagtacaccagcgccctgacctatgatggagtgaaggtgatggccgaggccttccagagcctgcggcggcagagaattgacatcagcagaagaggaaatgctggggactgcctggccaacccagctgtgccctggggccagggcatcgacatccagagggccctgcagcaggtgcgctttgagggcctgactggaaatgtgcagttcaatgaaaaaggaagaaggaccaactacaccctgcacgtgattgagatgaagcatgatggcatcaggaagattggctactggaatgaagatgacaagtttgtgcctgctgccacagatgcccaggccggcggggacaacagctctgtgcagaacagaacctacatcgtgaccaccatcctggaggacccctacgtgatgctgaagaagaatgccaaccagtttgagggcaatgacagatatgagggctactgtgtggagctggccgctgagatcgccaagcacgtgggctacagctaccgcctggagatcgtgtctgatggcaagtatggagcccgggaccctgacaccaaggcctggaatggcatggtgggggagctggtgtatggccgggcagatgtggccgtggcccccctgaccatcaccctggtgcgggaggaggtgattgacttcagcaagcccttcatgagcctgggcatcagcatcatgatcaagaagccccagaagagcaagccaggagtcttctccttcctggaccccctggcctatgagatctggatgtgcatcgtgtttgcctacatcggcgtgtctgtggtgctcttcctggtgagccgcttcagcccctatgagtggcacagcgaggagtttgaggagggccgggaccagaccaccagtgaccagagcaatgaatttggcatcttcaacagcctgtggttcagcctgggcgccttcatgcagcagggctgtgacatcagccccaggagcctgagcggcagaattgtgggcggcgtgtggtggttcttcaccctcatcatcatcagcagctacacagccaacctggccgccttcctgactgtggagaggatggtgagccccatcgagagcgctgaggacctggccaagcagacagagatcgcctacggcaccctggaggccggcagcaccaaggagttcttcagaagaagcaagattgctgtgtttgagaagatgtggacctacatgaagtctgctgagcccagcgtgtttgtgaggaccacagaggagggcatgatccgggtgaggaagagcaagggcaagtatgcctacctgctggagagcaccatgaatgagtacatcgagcagaggaagccctgtgacaccatgaaggtgggcggcaacctggacagcaagggctatggaattgccacccccaagggcagcgccctgaggaaccctgtgaacctggccgtgctgaagctgaatgagcagggcctgctggacaagctgaagaacaagtggtggtatgacaagggagaatgtggcagcggcggcggggacagcaaggacaagaccagcgccctgagcctgagcaatgtggccggggtcttctacatcctgattggaggcctgggcctggccatgctggtggccctgattgagttctgctacaagagccgctctgagagcaagaggatgaagggcttctgcctgatcccccagcagagcatcaatgaggccatccgcaccagcaccctgcccaggaacagcggggccggggccagcagcggcggcagcggagaaaatggccgggtggtgtcccatgacttccccaagtccatgcagagcatcccctgcatgagccacagcagcggcatgcccctgggcgccaccggcctgtag

SEQ ID NO: 16361 - DNA, 2721 bp, Artificial Sequence
  derived and/or modified sequence
atgcagcacatcttcgccttcttctgcaccggcttcctgggcgccgtcgtcggagccaacttccccaataacatccaaattggtggcctgtttcctaaccagcaatcacaggagcatgccgcttttcggtttgcactctcccagcttactgagccgccaaaacttctgccccagatcgatatcgtgaatatctccgatagcttcgaaatgacttatcgattctgcagtcagttctctaaaggcgtttatgccatctttggcttttatgagagaaggacagtgaatatgctcacgagcttctgtggggcacttcacgtctgcttcatcacacccagcttcccagtcgacacaagcaatcagttcgtgttacagttgaggcctgaacttcaggacgccctcatttcaattatagatcattacaaatggcaaaaatttgtctatatctatgatgccgatagaggactgagtgtgctgcagaaggttttagacaccgctgctgaaaagaactggcaggttacagcggtgaacattctgaccactactgaggaggggtacaggatgctcttccaggacctggaaaaaaagaaagaacgccttgtggtcgtcgattgtgaaagcgagaggttaaatgccatacttggacaaatcattaaattagaaaaaaatggaattggatatcattatatattggcaaatctgggctttatggatattgatctgaacaagttcaaggagtctggcgcgaatgtcacaggcttccagctagtgaattatacagacacgatacctgccaagatcatgcaacagtggaagaactcagacgcccgcgaccatacccgcgtggactggaagcgccccaaatacaccagtgctcttacctatgatggcgtgaaggtgatggctgaggctttccaatcactccggcgccagcggatcgacatctcccgccggggtaatgctggggattgtctggctaaccccgcagtgccctggggccagggaattgacatccagagagcgttacagcaggtgcggtttgaagggcttacaggaaatgttcagtttaacgaaaagggcagaaggacaaactataccttgcatgtcatcgagatgaagcatgatggaatcagaaagatcggctattggaacgaggacgacaaattcgttcccgccgcgacggatgcccaggcaggaggcgacaattcaagtgtgcagaatcgcacctacattgtgacaaccatcctggaagatccttacgtgatgctcaagaagaacgcgaatcaattcgagggaaatgaccggtatgagggctactgcgtagagctcgcggcagaaattgcaaagcacgttggctattcttacagactggaaatagtttcagatgggaaatacggagctcgcgacccagacactaaggcttggaatggaatggtcggagaactggtctatgggcgcgctgatgtcgctgtcgcgccgttgactattaccctggtgcgagaggaggtcattgatttctctaaacccttcatgagtctgggcatcagtataatgattaagaagccccaaaagtccaagcccggcgttttttccttcctggatccactggcttatgagatctggatgtgtattgttttcgcgtacattggcgtcagcgttgtccttttcctcgtgtcccgttttagcccttacgaatggcacagtgaggagtttgaagagggaagggatcagacaacaagcgatcagagtaatgaattcggcattttcaattccctctggtttagtctcggcgcttttatgcaacagggctgcgacataagtcctcggtccctgagcggtagaatagtaggaggagtgtggtggttcttcactttaataatcatttcctcctatactgcgaaccttgctgcattccttaccgtcgagcgaatggtctcaccaattgagtctgcagaggacctcgcgaagcaaaccgaaattgcctatggcacgctggaggccggcagcacaaaggaatttttccgcagatcaaagattgcggtgtttgagaagatgtggacctatatgaagagcgccgagccaagcgttttcgtacgtaccacagaagaaggtatgataagggttagaaaatcaaaaggcaaatacgcatacctgctagaaagcactatgaatgagtacattgagcagagaaagccctgtgacaccatgaaggttggcgggaacctggattccaaagggtacggaattgccacccccaaagggagcgccctgagaaaccccgtgaacctggccgtactgaagttgaatgagcaaggccttcttgacaagctgaagaacaagtggtggtatgacaaaggggagtgcggctctggtggcggggactccaaagacaagacctcagccttgtctctgtctaacgtggcaggagttttctatatcctgattggaggcctgggcctggctatgctcgtcgcattgatagagttttgctacaagtcaaggagtgagtctaagcggatgaagggcttctgtctcattcctcagcagagtatcaatgaagcaattcgcacctccactcttccaagaaactccggcgccggggctagcagtggtggttcaggcgaaaatgggcgcgtggtgtcccacgattttccgaagtcaatgcagtcgatcccttgtatgtctcatagcagcggtatgcctttaggggctacaggcctgtag

SEQ ID NO: 16362 - DNA, 2514 bp, Artificial Sequence
  derived and/or modified sequence
atgacctaccggttctgcagccagttcagcaagggcgtgtacgccattttcggtttctatgagaggcgaaccgtcaacatgctcacatctttttgtggagccctccacgtgtgttttattactccttcattccccgtggacacatctaaccaattcgttttgcagcttcgcccagagttgcaggacgcactgatcagcatcattgaccactataagtggcagaagtttgtctacatatatgacgccgatcggggcctgtccgtgctgcaaaaagtactggatactgcggctgagaaaaattggcaggttactgcagtcaatattctcaccactaccgaggaaggatacaggatgttgttccaagacctggagaaaaagaaagaaagacttgtggtcgtcgactgtgaatccgagagactgaatgctatcctggggcaaattatcaaattggagaaaaacggtatcgggtatcattacattctcgcaaatttgggatttatggacattgatctgaataaatttaaggaatctggtgccaacgttaccggctttcagttagtcaactacactgatacaatccccgcaaagataatgcaacagtggaagaactcagacgctagggatcatacaagagtagattggaagaggccaaagtacactagtgccctgacatatgatggagtaaaagtgatggctgaagcctttcagagcctgagacggcaaaggatcgacatcagccgtaggggaaatgcaggcgattgcctggcaaaccccgctgtgccttggggacagggcatagatatccagagagcgctccaacaagtaagatttgagggcctcaccggaaacgttcagtttaatgaaaaagggaggagaaccaactacacgctacatgtaattgaaatgaagcatgatggcatcaggaaaataggctactggaatgaggatgataaattcgttcctgcagcaacagatgcacaggcagggggggataattccagtgtgcagaacaggacctatatcgttacaactattctggaggacccatacgtgatgcttaagaagaacgctaaccagttcgaagggaacgatcgatatgagggctactgcgtagagctcgctgccgagattgccaagcacgtggggtatagctacagacttgaaatcgtgagcgatggcaagtacggagcccgcgaccccgatacaaaagcctggaatggaatggtgggagaacttgtgtatggaagagccgatgtcgctgtggcccccctgactattacgctggttcgggaggaggtcatcgacttctctaagccgttcatgtctctcggaatttctattatgatcaagaaaccccagaaatccaagccaggcgttttttccttcctggaccctctagcatatgaaatttggatgtgtatagtgttcgcttacattggagtgtccgtggtgctgtttctggtgagccgcttttctccctacgagtggcatagtgaagagtttgaggagggtagggatcagactacgtctgaccagagcaatgaatttggcatcttcaacagtctttggtttagtcttggcgcctttatgcaacagggatgcgatattagcccccgcagtctgtcaggcagaattgttgggggtgtgtggtggttcttcaccttgatcatcattagcagctatactgctaatttggccgcatttcttactgttgagcggatggtgagccccattgaaagcgccgaggatcttgccaagcaaactgagatcgcctatggcactctcgaggccggctctacaaaggaatttttcagacgttcaaaaattgccgtgtttgagaagatgtggacctacatgaagagcgccgaaccgagcgtctttgtgagaaccacagaagaaggcatgatacgtgtgcgcaagtcgaagggcaagtacgcatacctgttggagtcaacgatgaacgagtacatcgagcagcgtaaaccttgtgacaccatgaaggttggcggcaaccttgatagtaagggatatggaatcgcaaccccaaaaggatcggccctccgcaaccccgtgaacctggctgttctgaagctgaatgaacaaggtctgcttgacaaactgaaaaacaagtggtggtatgataagggggagtgtggaagtggcggtggcgactcgaaagacaagacaagtgctctcagtctcagcaacgtggccggagttttctacatccttatcggtggcctcggcctggccatgctcgtcgctctcatagagttctgttacaaatctcgaagtgaatcaaagcgcatgaagggtttctgcctgattccccagcagtcgatcaacgaggccatccgaacatctaccctcccccgcaactccggagcaggagctagctctggcgggagcggagagaacggtagggtggtgtcacatgactttcctaaaagtatgcagagtatcccatgcatgtcccacagctccggcatgccactgggtgcaacaggactttag

SEQ ID NO: 16363 - DNA, 2721 bp, Artificial Sequence
  derived and/or modified sequence
atgcagcacattttcgcattcttttgcaccgggttcctgggtgccgtcgtgggggctaattttccaaataatattcagatcgggggtctcttccctaatcaacagtcccaggagcacgcagcttttaggttcgctctgagccaactaactgagcccccaaaacttctgcctcagattgacatcgtaaacatttctgattctttcgagatgacctaccgcttctgctcccagttctccaaaggggtgtacgctatctttggattctatgaaagaagaactgtgaatatgctcacctccttctgtggagccctgcacgtttgtttcataaccccttcctttccggtagacaccagcaatcagtttgtcctccagttgcgcccagagctgcaggatgcattaatttccattatcgatcattacaaatggcaaaaatttgtgtatatctacgatgctgatagaggtctgtcagtcctgcaaaaggtactggataccgcagctgagaagaactggcaagtcacagccgtgaacatcctgactacaacggaagagggataccggatgctatttcaggacttagagaaaaagaaggagaggctggtggtggttgactgcgaatcggaacgactgaatgcaatcctcgggcagataatcaaacttgagaagaacggaattggataccactatatcctggcaaatctggggtttatggatattgatctgaataaattcaaagaaagcggtgcaaacgtcaccggatttcaattggtgaactacactgataccatccccgctaaaatcatgcaacagtggaaaaattctgacgcaagggaccacaccagggtcgattggaagaggcccaaatacacaagcgcgcttacatatgacggagttaaagtgatggctgaggctttccagtctttacgcagacaaaggatagatatatcgaggcggggaaacgcaggcgattgcctggccaacccagcggtcccatgggggcagggtatcgatattcagagagcactgcaacaagtgagatttgaagggttgactggaaacgtccagtttaatgaaaagggcaggcggaccaactacaccctgcacgtgattgaaatgaaacatgacgggatccgtaagatagggtattggaacgaggatgacaagtttgtgccagctgccactgatgctcaggccggaggtgacaattcatccgtacagaatcggacatatatcgtgacgaccatcctcgaagatccttacgtgatgctcaagaagaacgccaaccagttcgaaggtaatgatcggtatgaaggatattgtgtggagctagctgccgagatagccaaacacgttgggtactcctatcggctcgagatcgtgtccgacggaaaatatggggctcgtgatcctgacacaaaggcttggaacggtatggttggggagctagtttacggtagggcagacgtggccgttgcacctctcacaatcaccttggtccgcgaggaggtgattgacttctctaaaccttttatgtctcttggcatttctatcatgattaaaaaacctcagaaatcaaaacctggagtcttctctttccttgatcctttggcgtatgagatttggatgtgtatcgtatttgcatatatcggggtatcagtggttctgtttcttgtttcacggtttagtccgtacgagtggcacagcgaagagtttgaggaaggaagggaccaaacaactagcgaccagtccaacgagttcggaatttttaactccctttggttctctctgggtgcattcatgcagcagggatgtgatatctcgcccaggagtctgagcggcagaatcgtcgggggagtgtggtggttctttaccctgatcattatctccagttatacagccaatctcgccgcattcctgaccgttgaacgaatggtatcaccaatcgagagcgccgaagacttggcaaaacagacggagatagcatacggaacattagaagcagggtctaccaaggaattctttcgcagatctaaaatcgccgtgtttgaaaaaatgtggacctacatgaagtccgctgagcccagtgtctttgtaaggacaactgaggaaggcatgatcagggttaggaaatctaagggtaaatacgcctatctccttgagtcaacaatgaacgaatacattgaacagcggaaaccatgcgatacaatgaaggtgggagggaacctagatagtaagggttatggtattgccacccccaaaggatccgctcttaggaatcctgtcaatcttgcggttctgaaattgaatgaacagggcttactcgacaagttgaaaaataagtggtggtacgacaagggagaatgtggatctggaggtggagactctaaggataagacctctgccttatctctgagtaacgtggcaggtgtcttctatatcctgatcggaggactcgggctggcaatgttggtcgcgctgatcgagttttgctacaaatcccgaagcgagtctaagaggatgaagggcttttgcctcatacctcagcagtcaatcaatgaggcgatcaggacaagcactctaccaagaaactctggagccggtgctagcagtggtggcagcggtgaaaatggccgtgttgtttcgcatgacttccctaagagtatgcaaagtattccgtgtatgtcccactccagtggcatgcccttgggggcaaccggtttgtag

SEQ ID NO: 16364 - DNA, 2514 bp, Artificial Sequence
  derived and/or modified sequence
atgacataccgattttgttcccagttctctaaaggcgtctacgcaatattcggattttatgagagacgaaccgttaacatgttgacctcattctgcggtgcgctgcatgtctgctttattacccccagctttcccgtggacacctccaaccaattcgtcctacagctgcgaccagagctgcaagatgcattgatttcaattatagaccattacaagtggcagaaatttgtctacatctacgacgccgatagaggactctccgtcctgcagaaagtcctggacaccgcagctgagaagaattggcaggttacagccgtcaacatacttactaccactgaggagggatacaggatgcttttccaggacctcgaaaaaaagaaggagagactggtagtggtagattgtgaaagtgagcgacttaacgctattctgggacagattattaagcttgagaagaacggcattggttaccattacattctcgcaaatctgggttttatggatattgacctcaacaagttcaaagagtctggcgctaacgtcaccggatttcaactcgtgaactataccgatactattccggctaagattatgcaacaatggaaaaacagtgatgccagggaccacacacgagtggattggaagaggccgaaatatacttccgccttaacctacgacggagttaaagtgatggccgaggcctttcagtccctgcgcagacagcggatcgacatcagccggaggggaaatgctggtgactgtctcgcgaaccctgcagtcccatggggacagggcatagacattcaaagagctttgcagcaagtgaggtttgaagggctcactggtaatgttcagttcaatgaaaagggcagacgaactaactacaccctgcacgtgattgagatgaaacatgacgggatcagaaagatagggtactggaatgaagacgataagttcgtacccgctgcgacggacgcacaggcagggggtgataactcgtcagtgcagaaccggacttacattgtaactaccattcttgaggatccctacgtcatgctgaaaaagaacgcgaaccagtttgaggggaatgatcgctatgagggttattgtgtcgagttggctgctgaaattgcaaagcacgtcggctattcgtaccgcctcgagatcgttagtgacgggaaatatggagcgagggacccagacaccaaggcctggaacgggatggtgggcgaactcgtctatggcagggccgacgtggccgtggcacctctcacaatcacactcgtgcgggaagaagtgattgacttcagtaaaccatttatgtctcttggcattagtattatgataaagaagcctcagaaatcaaagcctggtgtgttctcttttctcgatcccctagcttacgagatttggatgtgcattgtctttgcgtatatcggggtatcagtggtacttttcctggtaagcagatttagcccttatgagtggcattcagaagaatttgaagagggaagggatcagacaacaagcgatcaatctaacgagtttggaatcttcaatagcctgtggttcagcctgggtgcattcatgcagcaaggttgcgacatcagcccccgttcacttagcggcagaatagtcggaggggtgtggtggttttttaccctaataataatctccagctatactgctaacctggcggctttcctgactgtggagagaatggtgtcccctattgaaagcgccgaggatcttgctaagcagactgagatcgcatatggaactctggaagcaggttcgactaaggaatttttccggcgttctaagattgccgtgttcgagaagatgtggacctacatgaaaagtgctgagccctctgtcttcgtcagaacaaccgaagaaggtatgatacgggtcagaaagagcaagggaaaatacgcctacctgttggagtccaccatgaatgaatatatcgaacaaagaaagccctgcgatacaatgaaagtgggaggcaacctagacagcaagggatatggcatagccacacccaaaggcagtgcactccgtaatccggtcaatctggcagtgctcaaactgaatgaacaagggctgttggataagctcaagaacaaatggtggtacgataagggagaatgcggcagcgggggaggggacagcaaagacaaaacctctgccttatccctctctaatgtggccggagtattttacatcctgattgggggactgggactcgcaatgctagttgctctgatagagttctgctataagagtcgatctgaaagtaagaggatgaagggcttctgccttataccccagcaatctatcaacgaggcaattagaacctctaccctgcctcggaactctggggctggagcgtcatccggagggagcggggaaaacggcagagtggtgagtcatgacttcccgaagagtatgcagtcaatcccatgcatgtcccactcaagcggaatgcccctgggcgctacaggcctgtag

SEQ ID NO: 16365 - DNA, 2721 bp, Artificial Sequence
  derived and/or modified sequence
atgcagcacatcttcgccttcttctgcaccggcttcctgggcgccgtggtgggcgccaacttccccaacaacatccagatcggcggcctgttccccaaccagcagagccaggagcacgccgccttcagattcgccctgagccagctgaccgagccccccaagctgctgccccagatcgacatcgtgaacatcagcgacagcttcgagatgacctacagattctgcagccagttcagcaagggcgtgtacgccatcttcggcttctacgagagaagaaccgtgaacatgctgaccagcttctgcggcgccctgcacgtgtgcttcatcacccccagcttccccgtggacaccagcaaccagttcgtgctgcagctgagacccgagctgcaggacgccctgatcagcatcatcgaccactacaagtggcagaagttcgtgtacatctacgacgccgacagaggcctgagcgtgctgcagaaggtgctggacaccgccgccgagaagaactggcaggtgaccgccgtgaacatcctgaccaccaccgaggagggctacagaatgctgttccaggacctggagaagaagaaggagagactggtggtggtggactgcgagagcgagagactgaacgccatcctgggccagatcatcaagctggagaagaacggcatcggctaccactacatcctggccaacctgggcttcatggacatcgacctgaacaagttcaaggagagcggcgccaacgtgaccggcttccagctggtgaactacaccgacaccatccccgccaagatcatgcagcagtggaagaacagcgacgccagagaccacaccagagtggactggaagagacccaagtacaccagcgccctgacctacgacggcgtgaaggtgatggccgaggccttccagagcctgagaagacagagaatcgacatcagcagaagaggcaacgccggcgactgcctggccaaccccgccgtgccctggggccagggcatcgacatccagagagccctgcagcaggtgagattcgagggcctgaccggcaacgtgcagttcaacgagaagggcagaagaaccaactacaccctgcacgtgatcgagatgaagcacgacggcatcagaaagatcggctactggaacgaggacgacaagttcgtgcccgccgccaccgacgcccaggccggcggcgacaacagcagcgtgcagaacagaacctacatcgtgaccaccatcctggaggacccctacgtgatgctgaagaagaacgccaaccagttcgagggcaacgacagatacgagggctactgcgtggagctggccgccgagatcgccaagcacgtgggctacagctacagactggagatcgtgagcgacggcaagtacggcgccagagaccccgacaccaaggcctggaacggcatggtgggcgagctggtgtacggcagagccgacgtggccgtggcccccctgaccatcaccctggtgagagaggaggtgatcgacttcagcaagcccttcatgagcctgggcatcagcatcatgatcaagaagccccagaagagcaagcccggcgtgttcagcttcctggaccccctggcctacgagatctggatgtgcatcgtgttcgcctacatcggcgtgagcgtggtgctgttcctggtgagcagattcagcccctacgagtggcacagcgaggagttcgaggagggcagagaccagaccaccagcgaccagagcaacgagttcggcatcttcaacagcctgtggttcagcctgggcgccttcatgcagcagggctgcgacatcagccccagaagcctgagcggcagaatcgtgggcggcgtgtggtggttcttcaccctgatcatcatcagcagctacaccgccaacctggccgccttcctgaccgtggagagaatggtgagccccatcgagagcgccgaggacctggccaagcagaccgagatcgcctacggcaccctggaggccggcagcaccaaggagttcttcagaagaagcaagatcgccgtgttcgagaagatgtggacctacatgaagagcgccgagcccagcgtgttcgtgagaaccaccgaggagggcatgatcagagtgagaaagagcaagggcaagtacgcctacctgctggagagcaccatgaacgagtacatcgagcagagaaagccctgcgacaccatgaaggtgggcggcaacctggacagcaagggctacggcatcgccacccccaagggcagcgccctgagaaaccccgtgaacctggccgtgctgaagctgaacgagcagggcctgctggacaagctgaagaacaagtggtggtacgacaagggcgagtgcggcagcggcggcggcgacagcaaggacaagaccagcgccctgagcctgagcaacgtggccggcgtgttctacatcctgatcggcggcctgggcctggccatgctggtggccctgatcgagttctgctacaagagcagaagcgagagcaagagaatgaagggcttctgcctgatcccccagcagagcatcaacgaggccatcagaaccagcaccctgcccagaaacagcggcgccggcgccagcagcggcggcagcggcgagaacggcagagtggtgagccacgacttccccaagagcatgcagagcatcccctgcatgagccacagcagcggcatgcccctgggcgccaccggcctgtag

SEQ ID NO: 16366 - DNA, 2514 bp, Artificial Sequence
  derived and/or modified sequence
atgacctacagattctgcagccagttcagcaagggcgtgtacgccatcttcggcttctacgagagaagaaccgtgaacatgctgaccagcttctgcggcgccctgcacgtgtgcttcatcacccccagcttccccgtggacaccagcaaccagttcgtgctgcagctgagacccgagctgcaggacgccctgatcagcatcatcgaccactacaagtggcagaagttcgtgtacatctacgacgccgacagaggcctgagcgtgctgcagaaggtgctggacaccgccgccgagaagaactggcaggtgaccgccgtgaacatcctgaccaccaccgaggagggctacagaatgctgttccaggacctggagaagaagaaggagagactggtggtggtggactgcgagagcgagagactgaacgccatcctgggccagatcatcaagctggagaagaacggcatcggctaccactacatcctggccaacctgggcttcatggacatcgacctgaacaagttcaaggagagcggcgccaacgtgaccggcttccagctggtgaactacaccgacaccatccccgccaagatcatgcagcagtggaagaacagcgacgccagagaccacaccagagtggactggaagagacccaagtacaccagcgccctgacctacgacggcgtgaaggtgatggccgaggccttccagagcctgagaagacagagaatcgacatcagcagaagaggcaacgccggcgactgcctggccaaccccgccgtgccctggggccagggcatcgacatccagagagccctgcagcaggtgagattcgagggcctgaccggcaacgtgcagttcaacgagaagggcagaagaaccaactacaccctgcacgtgatcgagatgaagcacgacggcatcagaaagatcggctactggaacgaggacgacaagttcgtgcccgccgccaccgacgcccaggccggcggcgacaacagcagcgtgcagaacagaacctacatcgtgaccaccatcctggaggacccctacgtgatgctgaagaagaacgccaaccagttcgagggcaacgacagatacgagggctactgcgtggagctggccgccgagatcgccaagcacgtgggctacagctacagactggagatcgtgagcgacggcaagtacggcgccagagaccccgacaccaaggcctggaacggcatggtgggcgagctggtgtacggcagagccgacgtggccgtggcccccctgaccatcaccctggtgagagaggaggtgatcgacttcagcaagcccttcatgagcctgggcatcagcatcatgatcaagaagccccagaagagcaagcccggcgtgttcagcttcctggaccccctggcctacgagatctggatgtgcatcgtgttcgcctacatcggcgtgagcgtggtgctgttcctggtgagcagattcagcccctacgagtggcacagcgaggagttcgaggagggcagagaccagaccaccagcgaccagagcaacgagttcggcatcttcaacagcctgtggttcagcctgggcgccttcatgcagcagggctgcgacatcagccccagaagcctgagcggcagaatcgtgggcggcgtgtggtggttcttcaccctgatcatcatcagcagctacaccgccaacctggccgccttcctgaccgtggagagaatggtgagccccatcgagagcgccgaggacctggccaagcagaccgagatcgcctacggcaccctggaggccggcagcaccaaggagttcttcagaagaagcaagatcgccgtgttcgagaagatgtggacctacatgaagagcgccgagcccagcgtgttcgtgagaaccaccgaggagggcatgatcagagtgagaaagagcaagggcaagtacgcctacctgctggagagcaccatgaacgagtacatcgagcagagaaagccctgcgacaccatgaaggtgggcggcaacctggacagcaagggctacggcatcgccacccccaagggcagcgccctgagaaaccccgtgaacctggccgtgctgaagctgaacgagcagggcctgctggacaagctgaagaacaagtggtggtacgacaagggcgagtgcggcagcggcggcggcgacagcaaggacaagaccagcgccctgagcctgagcaacgtggccggcgtgttctacatcctgatcggcggcctgggcctggccatgctggtggccctgatcgagttctgctacaagagcagaagcgagagcaagagaatgaagggcttctgcctgatcccccagcagagcatcaacgaggccatcagaaccagcaccctgcccagaaacagcggcgccggcgccagcagcggcggcagcggcgagaacggcagagtggtgagccacgacttccccaagagcatgcagagcatcccctgcatgagccacagcagcggcatgcccctgggcgccaccggcctgtag

SEQ ID NO: 16367 - protein, 894 aa, Artificial Sequence
  derived and/or modified sequence
MARQKKMGQSVLRAVFFLVLGLLGHSHGGFPNTISIGGLFMRNTVQEHSAFRFAVQLYNTNQNTTEKPFHLNYHVDHLDSSNSFSVTNAFCSQFSRGVYAIFGFYDQMSMNTLTSFCGALHTSFVTPSFPTDADVQFVIQMRPALKGAILSLLGHYKWEKFVYLYDTERGFSILQAIMEAAVQNNWQVTARSVGNIKDVQEFRRIIEEMDRRQEKRYLIDCEVERINTILEQVVILGKHSRGYHYMLANLGFTDILLERVMHGGANITGFQIVNNENPMVQQFIQRWVRLDEREFPEAKNAPLKYTSALTHDAILVIAEAFRYLRRQRVDVSRRGSAGDCLANPAVPWSQGIDIERALKMVQVQGMTGNIQFDTYGRRTNYTIDVYEMKVSGSRKAGYWNEYERFVPFSDQQISNDSASSENRTIVVTTILESPYVMYKKNHEQLEGNERYEGYCVDLAYEIAKHVRIKYKLSIVGDGKYGARDPETKIWNGMVGELVYGRADIAVAPLTITLVREEVIDFSKPFMSLGISIMIKKPQKSKPGVFSFLDPLAYEIWMCIVFAYIGVSVVLFLVSRFSPYEWHLEDNNEEPRDPQSPPDPPNEFGIFNSLWFSLGAFMQQGCDISPRSLSGRIVGGVWWFFTLIIISSYTANLAAFLTVERMVSPIESAEDLAKQTEIAYGTLDSGSTKEFFRRSKIAVYEKMWSYMKSAEPSVFTKTTADGVARVRKSKGKFAFLLESTMNEYIEQRKPCDTMKVGGNLDSKGYGVATPKGSALRNAVNLAVLKLNEQGLLDKLKNKWWYDKGECGSGGGDSKDKTSALSLSNVAGVFYILVGGLGLAMMVALIEFCYKSRAESKRMKLTKNTQNFKPAPATNTQNYATYREGYNVYGTESVKI

SEQ ID NO: 16368 - protein, 824 aa, Artificial Sequence
  derived and/or modified sequence
MARQKKMGQSVLRAVFFLVLGLLGHSHGGFPNTISIGGLFMRNTVQEHSAFRFAVQLYNTNQNTTEKPFHLNYHVDHLDSSNSFSVTNAFCSQFSRGVYAIFGFYDQMSMNTLTSFCGALHTSFVTPSFPTDADVQFVIQMRPALKGAILSLLGHYKWEKFVYLYDTERGFSILQAIMEAAVQNNWQVTARSVGNIKDVQEFRRIIEEMDRRQEKRYLIDCEVERINTILEQVVILGKHSRGYHYMLANLGFTDILLERVMHGGANITGFQIVNNENPMVQQFIQRWVRLDEREFPEAKNAPLKYTSALTHDAILVIAEAFRYLRRQRVDVSRRGSAGDCLANPAVPWSQGIDIERALKMVQVQGMTGNIQFDTYGRRTNYTIDVYEMKVSGSRKAGYWNEYERFVPFSDQQISNDSASSENRTIVVTTILESPYVMYKKNHEQLEGNERYEGYCVDLAYEIAKHVRIKYKLSIVGDGKYGARDPETKIWNGMVGELVYGRADIAVAPLTITLVREEVIDFSKPFMSLGISIMIKKPQKSKPGVFSFLDPLAYEIWMCIVFAYIGVSVVLFLVSRFSPYEWHLEDNNEEPRDPQSPPDPPNEFGIFNSLWFSLGAFMQQGCDISPRSLSGRIVGGVWWFFTLIIISSYTANLAAFLTVERMVSPIESAEDLAKQTEIAYGTLDSGSTKEFFRRSKIAVYEKMWSYMKSAEPSVFTKTTADGVARVRKSKGKFAFLLESTMNEYIEQRKPCDTMKVGGNLDSKGYGVATPKGSALRNAVNLAVLKLNEQGLLDKLKNKWWYDKGECGSGGGDSKNACKPCSIETQ

SEQ ID NO: 16369 - DNA, 2685 bp, Artificial Sequence
  derived and/or modified sequence
atggccaggcaaaaaaagatgggtcaatctgtgctgcgggctgtattctttctcgtgttgggtctgctgggccattcccatggggggtttccgaacactattagcattgggggcctgtttatgagaaatacagtccaggagcattctgccttcaggtttgcagtacagctgtacaatacaaatcagaacactaccgagaaacccttccacctgaactaccacgttgaccacctggacagctctaactcctttagtgtcactaacgccttctgttcccagttctcaagaggagtctacgccatcttcggtttctatgaccagatgagcatgaatacgcttacaagcttctgcggggcactccatacgagttttgttactcctagcttcccaaccgacgccgacgtgcagtttgtgatccaaatgcgtcccgccctaaaaggagccatcctatcacttctcgggcattacaagtgggaaaagtttgtatatttatacgatacggagagagggttcagcattctgcaggcgatcatggaggccgccgtccagaacaactggcaggttaccgccagatccgtgggcaatataaaggacgtgcaggagtttagacgaattatcgaggaaatggaccgcaggcaggagaagagatacctgatcgactgtgaggtggagcgcatcaacaccatcctggagcaggtcgtgattctgggcaagcattcccggggataccactatatgctggcgaatctcggatttacagatattctgctcgagagggtgatgcatggcggcgctaacatcacgggatttcagattgtaaacaacgaaaatcccatggtgcagcagttcattcagcggtgggtacgtctggatgagcgagagtttccagaagccaagaatgctcccctgaaatacacctcagctctcacgcatgacgctatcctggtgatagctgaggcattcaggtacctacgacgacaacgagtagacgtctcccggcgagggagcgctggagactgccttgcaaaccctgcagtgccctggtcacagggaattgacatcgagcgcgccctcaagatggtgcaggtgcagggaatgaccggcaatattcagtttgacacctacggtcggcgcactaattacactattgatgtctacgagatgaaggtgagcggaagccgcaaagctggttattggaatgagtatgaacggtttgtgcctttctcagaccagcagatctctaacgactccgcctcatctgaaaaccggactatcgtggtaaccacgattctggaaagcccgtacgtgatgtacaagaagaaccatgagcaacttgaggggaatgaacgctacgagggatattgtgtagacttggcctacgaaattgctaagcatgttcgtataaagtataaattgtctattgttggagacggtaaatatggggccagggaccctgaaaccaagatctggaacggaatggtgggcgaactcgtgtacgggcgcgcagacatcgccgtcgcacctctgacgatcaccttagtgcgggaagaggttatcgacttctcaaagccttttatgtctctcggaatcagcattatgatcaagaagccacagaaatccaaaccaggtgtcttcagttttctggaccccctcgcctacgagatctggatgtgtatagttttcgcttatatcggggtctcagtagtgctgttcttagtgagccggtttagtccctatgagtggcacctggaggacaataacgaggaaccccgggatccacaatcacctcctgaccctcccaatgagtttggaatttttaacagtttgtggttctctcttggtgccttcatgcagcagggatgtgacatcagccctaggtcactgagcggacggatcgtgggaggcgtttggtggtttttcacattaataataattagcagctacacagccaatttggccgcattcttgaccgtcgagcgaatggtgtctcccatcgagagtgctgaggacttagctaagcagacagaaatcgcatacgggacactagactccgggagtactaaagagttttttcggcgctcaaagattgctgtctacgagaaaatgtggtcctacatgaagagcgcggagccatcggtgtttaccaaaaccacggccgacggggtcgccagggtacggaagagtaaggggaaattcgcgtttctgctcgagagtactatgaacgagtacatcgagcaaaggaagccctgtgacaccatgaaggtgggaggcaacctcgactccaaagggtacggtgtggctaccccgaagggctctgctctccggaacgccgttaacctggctgtcctgaagctgaacgaacagggactgttagacaaacttaagaacaaatggtggtacgataaaggagaatgtgggtcggggggcggagacagtaaagacaagacatccgcacttagcctgagtaatgttgctggggtgttttatatcctcgtcggcggcctcggtctagccatgatggtcgctctgattgagttttgttacaaatcaagagcagaatccaaacgaatgaaattgacaaaaaacacccagaatttcaagccagccccagcaaccaatacacagaattacgctacctaccgggaggggtacaatgtgtacggaaccgagtctgttaaaatttag

SEQ ID NO: 16370 - DNA, 2685 bp, Artificial Sequence
  derived and/or modified sequence
atggcaagacagaaaaagatggggcagagcgttctccgcgcagtcttctttttagtgcttggtcttctcggacactcgcatggcggctttccaaatacaatcagcatcgggggtctgtttatgagaaatactgtccaggagcacagtgcatttagattcgcagtacagttgtataataccaaccagaatacgacggaaaaaccattccaccttaactatcatgtcgaccacctggacagctcaaattctttctctgtcacaaacgctttttgctctcagttcagcaggggggtatacgcgatttttggattctacgaccagatgtccatgaacacacttacgtcattttgtggagcgctccacacgtcattcgttactccctccttccctacagacgccgatgtgcagtttgttatccaaatgcgacctgcactcaagggggcaatcctgtccctgcttggccattacaagtgggaaaagtttgtgtatctgtatgatacagaaagaggctttagcattctccaggcaataatggaagccgctgtacagaacaattggcaggtgaccgcccggtccgtgggcaacatcaaagacgtccaggaattccgcagaattattgaggagatggaccgaagacaggagaagaggtatcttatagattgcgaagtcgaaagaataaatacaatactggagcaggttgttatactaggcaaacactctagggggtatcactacatgcttgccaacctcggatttacagacatcttactggaacgggtgatgcatggaggcgcaaatataactggtttccagatcgtcaataatgaaaaccccatggttcaacaatttattcaacggtgggtgaggctggatgagcgcgaatttcccgaagcaaaaaatgctcccctgaagtatactagcgctcttacgcacgacgccatactggttattgccgaggcctttagatatctgcggaggcagagggtcgatgtatccaggcgcggcagcgccggggactgcctggctaaccccgctgtaccctggtcccagggcattgacatcgaaagggccttaaagatggtacaggtccaggggatgacagggaatatccagttcgatacttacggccgcaggaccaactacactatagatgtttacgagatgaaagtcagcggatcccggaaggctggctattggaatgaatacgaaagatttgtcccctttagcgaccagcagatctccaatgatagcgcaagtagcgagaatagaacgatcgttgtaacgactatactggagtcaccatacgtaatgtacaagaagaaccacgaacaattggaagggaacgagcgttatgagggatactgtgtcgatttggcatacgagatcgccaagcacgtcagaatcaagtacaaactgtcgattgtcggcgatgggaagtacggggcccgtgaccctgaaaccaagatctggaacgggatggtcggggagctcgtgtacggtcgcgccgacatcgctgttgcgccccttaccatcaccctcgtgagggaagaggtaattgacttctctaaacctttcatgtctttagggatctccattatgattaaaaaacctcagaaatcaaagcctggcgtgttctccttcttggatcctctagcctatgagatctggatgtgcattgtgttcgcctatattggcgttagtgttgttttgttcctggtgagtcgattctctccctacgagtggcacctggaggataataatgaggagccgagagacccccagtcgccacccgatcctccaaacgaatttggcatttttaactctttatggttcagtctcggcgctttcatgcagcagggctgcgacatctcccctcggagcctctctggacgcatagttggaggcgtttggtggttcttcacattgatcattatttcctcttacacagccaatttggctgccttcctgaccgtggagcggatggtgtcccctatcgagtcagcggaagaccttgccaagcagactgagatcgcatatggcactctcgattccgggagcaccaaagagttcttccggcggagtaaaatagccgtttatgagaaaatgtggagttatatgaaatccgccgagccatctgttttcacaaagaccaccgcggatggagtggcaagagtgaggaagtccaaaggaaagtttgcttttttactggagtctacgatgaatgagtacatagagcagcggaaaccctgcgataccatgaaggtgggaggtaacctggattctaagggctatggtgtggctacacctaaaggtagtgcactgagaaatgccgtgaatcttgccgtattgaaactcaatgagcaggggttgctggataagttaaaaaacaagtggtggtacgacaaaggcgagtgcgggtccggcggaggcgactcaaaggacaaaacatccgccttgtctctgtccaacgtggccggcgtgttttacatcttggtagggggcctcggcttggcaatgatggtggcattgatcgaattctgctataagtctcgagccgaatccaagcgcatgaagctgactaagaacacacagaattttaaaccagcgcccgctacaaacactcaaaactacgctacttaccgcgaagggtacaacgtatacggaactgagtctgtgaaaatatag

SEQ ID NO: 16371 - DNA, 1989 bp, Artificial Sequence
  derived and/or modified sequence
atgctgcagggaggcgaggaatccagacttttcgggtctctgctttggactctgccatggcgagggcttttcatgcgaaacaccgtacaggaacacagtgctttccgcttcgccgtgcagctgtacaatacaaaccagaacactaccgagaaacctttccacttgaactatcacgtggatcatttagactctagcaactcgttcagtgtgacaaacgcgttctgcagccagttctcccggggagtgtacgccatttttggcttttacgatcaaatgtctatgaatacgttaacaagcttttgcggtgctctccatacctcattcgtcacgcctagctttccaactgatgctgacgtgcagttcgtcatacagatgaggcccgcgctgaagggcgctattctcagcctcctgggtcactacaagtgggagaagtttgtatacctctatgataccgagagaggtttcagcattctccaagccattatggaggccgccgtgcagaataactggcaagtgactgctagaagcgttggtaacatcaaagacgttcaggagttccgccgcatcattgaggagatggataggagacaagaaaaaaggtacctcattgattgcgaagtggaacggattaatactatcctggagcaggtggtgatactgggcaaacactcacgaggatatcactatatgttggcaaatctgggatttactgatatattacttgagcgcgtgatgcacggcggcgcaaatattacaggattccagatagtgaataacgaaaacccgatggtacaacagtttattcagcgctgggtccgactcgatgaacgagaattccccgaggcaaagaacgcgcccctgaaatatacgagtgccctgacacatgacgcaattcttgtgattgccgaagcttttagatacttgagacgccagcgcgttgacgtatcccgacggggctccgccggtgactgtctggccaacccggccgtcccttggagccagggcattgatattgaacgggccttgaagatggttcaggttcagggcatgactggtaatatccagtttgacacatacggtcgccgcactaattacacaatcgacgtgtatgagatgaaggtgtccggttcacggaaagctggatattggaacgaatacgagcgatttgtgccattttccgaccagcagatctccaatgattctgcctcctctgaaaaccggactatcgtggtgacgactattttggagtctccttatgtgatgtataaaaaaaaccacgaacagctcgaagggaatgaaaggtatgagggctactgtgtggacctggcatatgagatcgcgaagcacgtgcgcataaaatacaagttgtccattgtgggtgatggaaaatacggcgctagagacccagagaccaaaatttggaatggaatggtcggcgaattggtgtacggtcgagctgatatagccgtcgcccccttgacaattacactcgtgcgagaggaggttatcgatttctctaagccattcatgtcattgggcatttcaattatgataaagaaaccccagaagtccaagcctggtgttttttcatttcttgatcccctcgcctatgaaatctggatgtgtatcgtctttgcatacatcggagtatccgtcgtgcttttcctggtctctaggttcagcccttatgaatggcatttggaagataacaatgaggagcccagggaccctcagagcccaccagacccccctaacgagttcgggatcttcaactccctttggttctcccttggcgccttcatgcaacaaggatgcgacatctcgccaaggtttgtttttgtcgcatattcaatgccccattgcatactttggtcgtactccatacacgtacatatggtgtttatccatcttaactctagattcttctcctttaacatcccttccaacgatcgtcttagctctagccattgcgtgtgtttgtgcccatag

SEQ ID NO: 16372 - DNA, 2475 bp, Artificial Sequence
  derived and/or modified sequence
atggcccggcagaagaaaatggggcaaagcgtgctgcgtgccgttttttttctagttctaggactgcttggccatagccatggcggatttcctaatacgattagtatcggtgggctattcatgaggaatactgtgcaggaacatagcgctttccggttcgctgttcagctgtataacacaaaccagaataccactgaaaaaccttttcatctcaactaccatgtcgaccacctggactcaagcaattcattctccgtgaccaacgccttctgttctcaatttagcagaggcgtctatgctatttttgggttctatgatcaaatgtccatgaacacactgaccagcttctgtggagctctccacacaagttttgtaacaccatctttccctacagacgccgatgtccagttcgtgattcaaatgagacccgcgctcaagggggctatcctatcgctcttaggacactataagtgggagaagttcgtttacctatatgacaccgagcgcggattttcaattctgcaggccatcatggaggccgccgtccagaacaactggcaggtgactgcgcggtccgttgggaatataaaagacgtgcaggaattccgacgcattattgaagagatggaccgccgtcaggagaagcgttacctgatcgactgtgaagttgaaagaattaatactatactggagcaggttgtcatcctcggcaagcattcacggggataccattatatgctcgctaaccttggattcacagatatcttactggagagagtgatgcatggtggcgcaaatattaccggcttccagattgtcaataatgaaaatcctatggtgcagcagttcatccaacggtgggtgcgactcgatgagcgcgagttccccgaagccaaaaacgctcccctgaaatacactagcgccttgacacatgatgcgatattggtgattgctgaggcatttcgatatctgagacgacagcgggtcgacgtgtcacgtcggggctctgcaggagactgtctggctaatccggctgtcccctggtcccagggaatcgacatcgagagagccctgaaaatggtgcaggtgcaagggatgaccggcaacatacagttcgacacatacgggcgccgaactaactacacaatcgatgtatatgaaatgaaagtaagcggctcacggaaagctggatactggaatgaatatgaaaggtttgtaccgtttagtgaccagcaaatctcaaatgatagcgcttcaagcgaaaatcggactattgtggtcacaactatcttggagtccccttacgtgatgtacaagaagaaccatgagcagctcgaggggaatgaacggtacgaagggtactgtgtcgacctggcttatgagatcgctaaacatgtgagaataaagtataagctgtccatcgtcggagatggcaagtatggcgcccgggacccagagaccaagatttggaacggcatggtaggcgagcttgtatatggaagagcagacatcgccgtcgcaccacttacaatcacactggtccgggaagaggtgattgacttttcgaagccttttatgtccttgggaatcagtattatgatcaaaaagccccagaagagcaagcctggagtcttctcctttcttgacccactggcgtacgagatctggatgtgcatagtcttcgcctacattggcgttagcgtggtactgtttttggtaagcaggttcagtccttatgagtggcacctggaggacaataatgaggaacctagagacccacagtcaccacccgaccctcccaacgagtttggaatctttaattccctttggttctccttaggcgcgttcatgcaacaaggttgcgatatatcgcctcgctcacttagtgggcggatcgttggcggcgtttggtggttcttcacactcatcattatttcgtcctacaccgcaaacctggccgcttttttgacagtggagcggatggtctcccccattgaaagcgctgaagatttggctaagcagacagagattgcctatgggactcttgattctgggtccactaaggagttcttccgacgatctaaaatcgccgtgtatgagaagatgtggtcctacatgaaatctgcagagcccagtgtgttcacaaagactactgccgacggcgtggcccgagttcgtaagagtaagggaaagttcgcatttcttctggaatctaccatgaatgaatacatcgagcaacggaaaccatgtgatacgatgaaggtgggcggcaatctggacagtaagggctatggcgttgccactcctaagggctccgccttgcggaacgctgttaacctagcggtgttaaaactgaacgagcaggggttgctcgacaaactcaagaacaagtggtggtatgacaaaggagagtgtggaagtgggggcggtgatagcaagaacgcctgcaagccttgctcgattgaaactcagtag

SEQ ID NO: 16373 - DNA, 5172 bp, Artificial Sequence
  derived and/or modified sequence
agagatcctgggagcgagagggagagagagggagcaagaaaggaagagagagcgagcgagagagagcgagcgaataagagagagagtaagagggagagagaagaagaggaagaagaggaggcggcggcagcggaggaggaggaggactagtgtggggtggaaaggaagagtgagcgagagcaagttaaggggagggggtgtaagagccagcgaattctttttctttttctattattattttgacgactcctgagttgcgcccatgctcttgtcagcttcgttttaggcgtacatggccaggcagaagaaaatggggcaaagcgtgctccgggcggtcttctttttagtcctggggcttttgggtcattctcacggaggattccccaacaccatcagcataggtggacttttcatgagaaacacagtgcaggagcacagcgctttccgctttgccgtgcagttatacaacaccaaccagaacaccaccgagaagcccttccatttgaattaccacgtagatcacttggattcctccaatagtttttccgtgacaaatgctttctgctcccagttctcgagaggggtgtatgccatctttggattctatgaccagatgtcaatgaacaccctgacctccttctgtggggccctgcacacatcctttgttacgcctagcttccccactgacgcagatgtgcagtttgtcatccagatgcgcccagccttgaagggcgctattctgagtcttctgggtcattacaagtgggagaagtttgtgtacctctatgacacagaacgaggattttccatcctccaagcgattatggaagcagcagtgcaaaacaactggcaagtaacagcaaggtctgtgggaaacataaaggacgtccaagaattcaggcgcatcattgaagaaatggacaggaggcaggaaaagcgatacttgattgactgcgaagtcgaaaggattaacacaattttggaacaggttgtgatcctagggaaacactcaagaggttatcactacatgctcgctaacctgggttttactgatattttactggaaagagtcatgcatgggggagccaacattacaggtttccagattgtcaacaatgaaaaccctatggttcagcagttcatacagcgctgggtgaggctggatgaaagggaattccctgaagccaagaatgcaccactaaagtatacatctgcattgacacacgacgcaatactggtcatagcagaagctttccgctacctgaggaggcagcgagtagatgtgtcccggagaggaagtgctggagactgcttagcaaatcctgctgtgccctggagtcaaggaattgatattgagagagctctgaaaatggtgcaagtacaaggaatgactggaaatattcaatttgacacttatggacgtaggacaaattataccatcgatgtgtatgaaatgaaagtcagtggctctcgaaaagctggctactggaatgagtatgaaaggtttgtgcctttctcagatcagcaaatcagcaatgacagtgcatcctcagagaatcggaccatagtagtgactaccattctggaatcaccatatgtaatgtacaagaagaaccatgagcaactggaaggaaatgaacgatatgaaggctattgtgtagacctagcctatgaaatagccaaacatgtaaggatcaaatacaaattgtccatcgttggtgacgggaaatatggtgcaagggatccagagactaaaatatggaacggcatggttggggaacttgtctatgggagagctgatatagctgttgctccactcactataacattggtccgtgaagaagtcatagatttttcaaagccattcatgagcctgggcatctccatcatgataaagaagcctcagaaatcaaaaccaggcgtattctcatttctggatcccctggcttatgaaatctggatgtgcattgtctttgcttacattggagtcagcgtagttcttttcctagtcagcaggttcagtccttatgaatggcacttggaagacaacaatgaagaacctcgtgacccacaaagtcctcctgatcctccaaatgaatttggaatatttaacagtctttggttttccttgggtgcctttatgcagcaaggatgtgatatttctccaagatcactctccgggcgcattgttggaggggtttggtggttcttcaccctgatcataatttcttcctatactgccaatctcgctgctttcctgactgtggagaggatggtttctcccatagagagtgctgaagacttagctaaacagactgaaattgcatatgggaccctggactccggttcaacaaaagaatttttcagaagatccaaaattgctgtgtacgagaaaatgtggtcttacatgaaatcagcggagccatctgtgtttaccaaaacaacagcagacggagtggcccgagtgcgaaagtccaagggaaagttcgccttcctgctggagtcaaccatgaatgagtacattgagcagagaaaaccatgtgatacgatgaaagttggtggaaatctggattccaaaggctatggtgtggcaacccctaaaggctcagcattaagaaatgctgttaacctggcagtattaaaactgaatgagcaaggcctcttggacaaattgaaaaacaaatggtggtacgacaaaggagagtgcggcagcgggggcggtgactccaaggacaagaccagcgctctgagcctgagcaatgtggcaggcgttttctatatacttgtcggaggtctggggctggccatgatggtggctttgatagaattctgttacaaatcacgggcagagtccaaacgcatgaaactcacaaagaacacccaaaactttaagcctgctcctgccaccaacactcagaattatgctacatacagagaaggctacaacgtgtatggaacagagagtgttaagatctagggatcccttcccactggaggcatgtgatgagaggaaatcaccgaaaacgtggctgcttcaaggatcctgagccagatttcactctccttggtgtcgggcatgacacgaatattgctgatggtgcaatgacctttcaataggaaaaactgatttttttttccttcagtgccttatggaacactctgagactcgcgacaatgcaaaccatcattgaaatctttttgctttgcttgaaaaaaaataattaaaataaaaaccaacaaaaatggacatgcaagattccagtatgcgaaaaaaaatcttattaagtcaattcaacaaaagccattctttgataccactgcagagtatataaacaccatgttctttaatacacacacacacacacacacacacacacacacacatttaaattccaattcagcaaagaggcccatctaagctaaaaaaattaattcttcctgattaaaaagaaaaaatctgtctcccagtgtttgggaagacggactggcatttcttctaggatctgctgaccagatgtttttggtatttcctgttggtggtgatgttctgtgcactctatttcctttcaatgttgctgaaatgtgtatatctttagaatgtaaatgcaacacttaagaaaattcaaacactttggaaaagggactaaacagtgatttctctgtgttcttgaaatggttttgtgaaaatgctttgataacttcccactcaaagaagagatttacagagctttcgaaattgactttgtgtgtagcaagggacggggcactatcaggatacctcttggtgctttcctaaaatggatcccggggctttccaaggagcctggaatttcagctcacagatctgtttttcttgcttcagtgtgcattttaagtcaatagagctgagtatctagcattgaggtgagggaaatgctgcctatactcccagatgtgtttagaatatctcagaaacaacactgtgtttagctcggctttctctgctaagtatgcctttcaagtgtacaccacggagacaggaccgcgttgcaaggcgggacagcaggttcagaccacagttctcagtctgactttactcttgctaggtctgtcctactagctgttgcctgctaccgcccatggctctccatcggactgcatgtgtccttttctagtttgcaaagactaaaatgcattcccaaacctactgctaatctgagggcctcagcatcacttccagatccttgcttggagcagtctctctattgactctctcagatcgctccactgctccatgggctatcaagtaactaactgcatacctgccgttggcatcatcagaacagtccgaagaaatagtctccactcactaattacctcctatataacgacgtatgcttcctgtagttcagtagtttgctctcatcgataacgtgcattgggaagtttccagactgcaaaaactaggagctcgcattcatttcccaagtgtgacccttagatgcttagttgactcgctgcatatttgctcttgtcttcagaaaagaaaggaagaagtatcgttccaacgaaatgtttccagaaaagtgtactataaactttcattccaaaaatggtgtcataagcaaacaactcacttgtcaaatttcaaatggtattgaacaaaaaaagaaagctgttgtgtttttgttttgttttgttttcatgaaactgtgattttcaacttatgaatgctataatgtcccagcgcgggaagctcacgctgtgtgaacatgaagttgtataaaacaaaccaaccaacctacacacaaatgttttcataggcactgtataaagaaaaatgtatgtttattaactcaaatcagtttttcagagaggaaacgtcactgagatgaagaggcgggtaaattggtttgttattttttaaaaaaaacttgcatgtttaaaaaaaagttgattgcttcaaatttctgctactaacttcaagctatgggagtttggcagtagtcacttgaggattttttttccaattcttttctttttgttgttaaagctgtacttcagtgaacagaaaaattgccaagcaaactaatggctataaaagcgtaatttgcatgtgtgggcataaactacagagcctcattgccatgaggtattgtacaaagttttaatacattttgtaaataaaattgt

SEQ ID NO: 16374 - DNA, 2739 bp, Artificial Sequence
  derived and/or modified sequence
tgacgactcctgagttgcgcccatgctcttgtcagcttcgttttaggcgtacatggccaggcagaagaaaatggggcaaagcgtgctccgggcggtcttctttttagtcctggggcttttgggtcattctcacggaggattccccaacaccatcagcataggtggacttttcatgagaaacacagtgcaggagcacagcgctttccgctttgccgtgcagttatacaacaccaaccagaacaccaccgagaagcccttccatttgaattaccacgtagatcacttggattcctccaatagtttttccgtgacaaatgctttctgctcccagttctcgagaggggtgtatgccatctttggattctatgaccagatgtcaatgaacaccctgacctccttctgtggggccctgcacacatcctttgttacgcctagcttccccactgacgcagatgtgcagtttgtcatccagatgcgcccagccttgaagggcgctattctgagtcttctgggtcattacaagtgggagaagtttgtgtacctctatgacacagaacgaggattttccatcctccaagcgattatggaagcagcagtgcaaaacaactggcaagtaacagcaaggtctgtgggaaacataaaggacgtccaagaattcaggcgcatcattgaagaaatggacaggaggcaggaaaagcgatacttgattgactgcgaagtcgaaaggattaacacaattttggaacaggttgtgatcctagggaaacactcaagaggttatcactacatgctcgctaacctgggttttactgatattttactggaaagagtcatgcatgggggagccaacattacaggtttccagattgtcaacaatgaaaaccctatggttcagcagttcatacagcgctgggtgaggctggatgaaagggaattccctgaagccaagaatgcaccactaaagtatacatctgcattgacacacgacgcaatactggtcatagcagaagctttccgctacctgaggaggcagcgagtagatgtgtcccggagaggaagtgctggagactgcttagcaaatcctgctgtgccctggagtcaaggaattgatattgagagagctctgaaaatggtgcaagtacaaggaatgactggaaatattcaatttgacacttatggacgtaggacaaattataccatcgatgtgtatgaaatgaaagtcagtggctctcgaaaagctggctactggaatgagtatgaaaggtttgtgcctttctcagatcagcaaatcagcaatgacagtgcatcctcagagaatcggaccatagtagtgactaccattctggaatcaccatatgtaatgtacaagaagaaccatgagcaactggaaggaaatgaacgatatgaaggctattgtgtagacctagcctatgaaatagccaaacatgtaaggatcaaatacaaattgtccatcgttggtgacgggaaatatggtgcaagggatccagagactaaaatatggaacggcatggttggggaacttgtctatgggagagctgatatagctgttgctccactcactataacattggtccgtgaagaagtcatagatttttcaaagccattcatgagcctgggcatctccatcatgataaagaagcctcagaaatcaaaaccaggcgtattctcatttctggatcccctggcttatgaaatctggatgtgcattgtctttgcttacattggagtcagcgtagttcttttcctagtcagcaggttcagtccttatgaatggcacttggaagacaacaatgaagaacctcgtgacccacaaagtcctcctgatcctccaaatgaatttggaatatttaacagtctttggttttccttgggtgcctttatgcagcaaggatgtgatatttctccaagatcactctccgggcgcattgttggaggggtttggtggttcttcaccctgatcataatttcttcctatactgccaatctcgctgctttcctgactgtggagaggatggtttctcccatagagagtgctgaagacttagctaaacagactgaaattgcatatgggaccctggactccggttcaacaaaagaatttttcagaagatccaaaattgctgtgtacgagaaaatgtggtcttacatgaaatcagcggagccatctgtgtttaccaaaacaacagcagacggagtggcccgagtgcgaaagtccaagggaaagttcgccttcctgctggagtcaaccatgaatgagtacattgagcagagaaaaccatgtgatacgatgaaagttggtggaaatctggattccaaaggctatggtgtggcaacccctaaaggctcagcattaagaaatgctgttaacctggcagtattaaaactgaatgagcaaggcctcttggacaaattgaaaaacaaatggtggtacgacaaaggagagtgcggcagcgggggcggtgactccaaggacaagaccagcgctctgagcctgagcaatgtggcaggcgttttctatatacttgtcggaggtctggggctggccatgatggtggctttgatagaattctgttacaaatcacgggcagagtccaaacgcatgaaactcacaaagaacacccaaaactttaagcctgctcctgccaccaacactcagaattatgctacatacagagaaggctacaacgtgtatggaacagagagtgttaagatctaggg

SEQ ID NO: 16375 - DNA, 2169 bp, Artificial Sequence
  derived and/or modified sequence
agcaccggaggcgagcaggaggctgggatgctgcaagggggtgaagagtcgaggcttttcggctcgctgctctggactttgccatggcgtggacttttcatgagaaacacagtgcaggagcacagcgctttccgctttgccgtgcagttatacaacaccaaccagaacaccaccgagaagcccttccatttgaattaccacgtagatcacttggattcctccaatagtttttccgtgacaaatgctttctgctcccagttctcgagaggggtgtatgccatctttggattctatgaccagatgtcaatgaacaccctgacctccttctgtggggccctgcacacatcctttgttacgcctagcttccccactgacgcagatgtgcagtttgtcatccagatgcgcccagccttgaagggcgctattctgagtcttctgggtcattacaagtgggagaagtttgtgtacctctatgacacagaacgaggattttccatcctccaagcgattatggaagcagcagtgcaaaacaactggcaagtaacagcaaggtctgtgggaaacataaaggacgtccaagaattcaggcgcatcattgaagaaatggacaggaggcaggaaaagcgatacttgattgactgcgaagtcgaaaggattaacacaattttggaacaggttgtgatcctagggaaacactcaagaggttatcactacatgctcgctaacctgggttttactgatattttactggaaagagtcatgcatgggggagccaacattacaggtttccagattgtcaacaatgaaaaccctatggttcagcagttcatacagcgctgggtgaggctggatgaaagggaattccctgaagccaagaatgcaccactaaagtatacatctgcattgacacacgacgcaatactggtcatagcagaagctttccgctacctgaggaggcagcgagtagatgtgtcccggagaggaagtgctggagactgcttagcaaatcctgctgtgccctggagtcaaggaattgatattgagagagctctgaaaatggtgcaagtacaaggaatgactggaaatattcaatttgacacttatggacgtaggacaaattataccatcgatgtgtatgaaatgaaagtcagtggctctcgaaaagctggctactggaatgagtatgaaaggtttgtgcctttctcagatcagcaaatcagcaatgacagtgcatcctcagagaatcggaccatagtagtgactaccattctggaatcaccatatgtaatgtacaagaagaaccatgagcaactggaaggaaatgaacgatatgaaggctattgtgtagacctagcctatgaaatagccaaacatgtaaggatcaaatacaaattgtccatcgttggtgacgggaaatatggtgcaagggatccagagactaaaatatggaacggcatggttggggaacttgtctatgggagagctgatatagctgttgctccactcactataacattggtccgtgaagaagtcatagatttttcaaagccattcatgagcctgggcatctccatcatgataaagaagcctcagaaatcaaaaccaggcgtattctcatttctggatcccctggcttatgaaatctggatgtgcattgtctttgcttacattggagtcagcgtagttcttttcctagtcagcaggttcagtccttatgaatggcacttggaagacaacaatgaagaacctcgtgacccacaaagtcctcctgatcctccaaatgaatttggaatatttaacagtctttggttttccttgggtgcctttatgcagcaaggatgtgatatttctccaaggtttgtttttgtggcatactcaatgcctcattgcattttatggtcatactccattcatgtacatatggtattcatccatctcaactccagatttttttcatttaacattccatcaaatgacagattatcatcaagccattgtgtttgcttatgtccatgaagtgagtgtgtcattggtgttgctttgaatgtctttcatgcatttctatggtattgtatatacattaaaacaaacatttgaactctggataaaggcaacattgccactaatattaatattattcagataaagtaaatactaaatcttcatcag

SEQ ID NO: 16376 - DNA, 2990 bp, Artificial Sequence
  derived and/or modified sequence
agcggaggaggaggaggactagtgtggggtggaaaggaagagtgagcgagagcaagttaaggggagggggtgtaagagccagcgaattctttttctttttctattattattttgacgactcctgagttgcgcccatgctcttgtcagcttcgttttaggcgtacatggccaggcagaagaaaatggggcaaagcgtgctccgggcggtcttctttttagtcctggggcttttgggtcattctcacggaggattccccaacaccatcagcataggtggacttttcatgagaaacacagtgcaggagcacagcgctttccgctttgccgtgcagttatacaacaccaaccagaacaccaccgagaagcccttccatttgaattaccacgtagatcacttggattcctccaatagtttttccgtgacaaatgctttctgctcccagttctcgagaggggtgtatgccatctttggattctatgaccagatgtcaatgaacaccctgacctccttctgtggggccctgcacacatcctttgttacgcctagcttccccactgacgcagatgtgcagtttgtcatccagatgcgcccagccttgaagggcgctattctgagtcttctgggtcattacaagtgggagaagtttgtgtacctctatgacacagaacgaggattttccatcctccaagcgattatggaagcagcagtgcaaaacaactggcaagtaacagcaaggtctgtgggaaacataaaggacgtccaagaattcaggcgcatcattgaagaaatggacaggaggcaggaaaagcgatacttgattgactgcgaagtcgaaaggattaacacaattttggaacaggttgtgatcctagggaaacactcaagaggttatcactacatgctcgctaacctgggttttactgatattttactggaaagagtcatgcatgggggagccaacattacaggtttccagattgtcaacaatgaaaaccctatggttcagcagttcatacagcgctgggtgaggctggatgaaagggaattccctgaagccaagaatgcaccactaaagtatacatctgcattgacacacgacgcaatactggtcatagcagaagctttccgctacctgaggaggcagcgagtagatgtgtcccggagaggaagtgctggagactgcttagcaaatcctgctgtgccctggagtcaaggaattgatattgagagagctctgaaaatggtgcaagtacaaggaatgactggaaatattcaatttgacacttatggacgtaggacaaattataccatcgatgtgtatgaaatgaaagtcagtggctctcgaaaagctggctactggaatgagtatgaaaggtttgtgcctttctcagatcagcaaatcagcaatgacagtgcatcctcagagaatcggaccatagtagtgactaccattctggaatcaccatatgtaatgtacaagaagaaccatgagcaactggaaggaaatgaacgatatgaaggctattgtgtagacctagcctatgaaatagccaaacatgtaaggatcaaatacaaattgtccatcgttggtgacgggaaatatggtgcaagggatccagagactaaaatatggaacggcatggttggggaacttgtctatgggagagctgatatagctgttgctccactcactataacattggtccgtgaagaagtcatagatttttcaaagccattcatgagcctgggcatctccatcatgataaagaagcctcagaaatcaaaaccaggcgtattctcatttctggatcccctggcttatgaaatctggatgtgcattgtctttgcttacattggagtcagcgtagttcttttcctagtcagcaggttcagtccttatgaatggcacttggaagacaacaatgaagaacctcgtgacccacaaagtcctcctgatcctccaaatgaatttggaatatttaacagtctttggttttccttgggtgcctttatgcagcaaggatgtgatatttctccaagatcactctccgggcgcattgttggaggggtttggtggttcttcaccctgatcataatttcttcctatactgccaatctcgctgctttcctgactgtggagaggatggtttctcccatagagagtgctgaagacttagctaaacagactgaaattgcatatgggaccctggactccggttcaacaaaagaatttttcagaagatccaaaattgctgtgtacgagaaaatgtggtcttacatgaaatcagcggagccatctgtgtttaccaaaacaacagcagacggagtggcccgagtgcgaaagtccaagggaaagttcgccttcctgctggagtcaaccatgaatgagtacattgagcagagaaaaccatgtgatacgatgaaagttggtggaaatctggattccaaaggctatggtgtggcaacccctaaaggctcagcattaagaaatgctgttaacctggcagtattaaaactgaatgagcaaggcctcttggacaaattgaaaaacaaatggtggtacgacaaaggagagtgcggcagcgggggcggtgactccaagaacgcctgtaaaccttgcagtattgaaactcagtgaacaaggcatcttagacaagctgaaaaacaaatggtggtacgataagggggaatgtggagccaaggactccgggagtaaggacaagaccagcgctctgagcctgagcaatgtggcaggcgttttctatatacttgtcggaggtctggggctggccatgatggtggctttgatagaattctgttacaaatcacgggcagagtccaaacgcatgaaactcacaaagaacacccaaaactttaagcctgctcctgccaccaacactcagaattatgctacatacagagaaggctacaacgtgtatggaacagagagtgttaagatctagggatcccttcccactggaggcatgtg

SEQ ID NO: 16377 - DNA, 2685 bp, Artificial Sequence
  derived and/or modified sequence
atggcccggcagaagaagatgggccagagcgtgctgcgggctgtgttcttcctggtgctgggcctgctgggccacagccatggaggcttccccaacaccatcagcatcggcggcctcttcatgaggaacacagtgcaggagcacagcgccttccgctttgctgtgcagctgtacaacaccaaccagaacaccacagagaagcccttccacctgaactaccacgtggaccacctggacagcagcaacagcttctctgtgaccaatgccttctgcagccagttcagcagaggagtgtatgccatcttcggcttctatgaccagatgtccatgaacaccctgaccagcttctgtggggccctgcacaccagctttgtgacccccagcttccccacagatgctgatgtgcagtttgtgatccagatgaggcctgccctgaagggggccatcctgagcctgctgggccactacaagtgggagaagtttgtgtacctgtatgacacagagcggggcttcagcatcctgcaggccatcatggaggccgctgtgcagaacaactggcaggtgacagcccggtctgtgggcaacatcaaggatgtgcaggagttccgccgcatcatcgaggagatggaccggcggcaggagaagcgctacctgattgactgtgaggtggagcgcatcaacaccatcctggagcaggtggtgatcctgggcaagcacagccggggctaccactacatgctggccaacctgggcttcacagacatcctgctggagcgggtgatgcacggcggggccaacatcaccggcttccagatcgtgaacaatgaaaaccccatggtgcagcagttcatccagcgctgggtgcggctggatgagcgggagttccctgaggccaagaatgcccccctgaagtacaccagcgccctgacccatgatgccatcctggtgattgctgaggccttccgctacctgcggcggcagagggtggatgtgtccagaagaggcagcgctggggactgcctggccaacccagctgtgccctggagccagggcatcgacatcgagcgggccctgaagatggtgcaggtgcagggcatgactggaaacatccagtttgacacctatggaagaaggaccaactacaccattgatgtgtatgagatgaaggtgtctggcagcaggaaggccggctactggaatgaatatgaaagatttgtgcccttcagtgaccagcagatcagcaatgattctgccagcagtgaaaatagaaccatcgtggtgaccaccatcctggagagcccctacgtgatgtacaagaagaaccacgagcagctggagggcaatgaaagatatgagggctactgtgtggacctggcctatgagatcgccaagcacgtgcgcatcaagtacaagctgagcatcgtgggagatggcaagtacggggcccgggaccctgagaccaagatctggaatggcatggtgggggagctggtgtatggccgggctgacattgctgtggcccccctgaccatcaccctggtgcgggaggaggtgattgacttcagcaagcccttcatgagcctgggcatcagcatcatgatcaagaagccccagaagagcaagccaggagtcttctccttcctggaccccctggcctatgagatctggatgtgcatcgtgtttgcctacatcggcgtgtctgtggtgctcttcctggtgagccgcttcagcccctatgagtggcacctggaggacaacaatgaggagccccgggacccccagagccccccagaccccccaaatgaatttggcatcttcaacagcctgtggttcagcctgggcgccttcatgcagcagggctgtgacatcagccccaggagcctgagcggccgcatcgtgggcggcgtgtggtggttcttcaccctcatcatcatcagcagctacacagccaacctggccgccttcctgactgtggagaggatggtgagccccattgaatctgctgaggacctggccaagcagacagaaattgcctacggcaccctggacagcggcagcaccaaggagttcttccgccgcagcaagattgctgtgtatgagaagatgtggagctacatgaagtctgctgagcccagcgtcttcaccaagaccacagcagatggagtggcccgggtgaggaagagcaagggcaagtttgccttcctgctggagagcaccatgaatgagtacatcgagcagaggaagccctgtgacaccatgaaggtgggcggcaacctggacagcaagggctacggcgtggccacccccaagggcagcgccctgagaaatgctgtgaacctggccgtgctgaagctgaatgagcagggcctgctggacaagctgaagaacaagtggtggtatgacaagggggagtgtggcagcggcggcggggacagcaaggacaagaccagcgccctgagcctgagcaatgtggccggggtcttctacatcctggtgggcggcctgggcctggccatgatggtggccctgattgagttctgctacaagagcagagctgagagcaagaggatgaagctgaccaagaacacccagaacttcaagccagccccagccaccaacacccagaactatgccacctaccgggagggctacaacgtgtatggaacagaatctgtgaagatctag

SEQ ID NO: 16378 - DNA, 1989 bp, Artificial Sequence
  derived and/or modified sequence
atgctgcagggcggggaggagagccggctgtttggcagcctgctgtggaccctgccctggaggggcctcttcatgaggaacacagtgcaggagcacagcgccttccgctttgctgtgcagctgtacaacaccaaccagaacaccacagagaagcccttccacctgaactaccacgtggaccacctggacagcagcaacagcttctctgtgaccaatgccttctgcagccagttcagcagaggagtgtatgccatcttcggcttctatgaccagatgtccatgaacaccctgaccagcttctgtggggccctgcacaccagctttgtgacccccagcttccccacagatgctgatgtgcagtttgtgatccagatgaggcctgccctgaagggggccatcctgagcctgctgggccactacaagtgggagaagtttgtgtacctgtatgacacagagcggggcttcagcatcctgcaggccatcatggaggccgctgtgcagaacaactggcaggtgacagcccggtctgtgggcaacatcaaggatgtgcaggagttccgccgcatcatcgaggagatggaccggcggcaggagaagcgctacctgattgactgtgaggtggagcgcatcaacaccatcctggagcaggtggtgatcctgggcaagcacagccggggctaccactacatgctggccaacctgggcttcacagacatcctgctggagcgggtgatgcacggcggggccaacatcaccggcttccagatcgtgaacaatgaaaaccccatggtgcagcagttcatccagcgctgggtgcggctggatgagcgggagttccctgaggccaagaatgcccccctgaagtacaccagcgccctgacccatgatgccatcctggtgattgctgaggccttccgctacctgcggcggcagagggtggatgtgtccagaagaggcagcgctggggactgcctggccaacccagctgtgccctggagccagggcatcgacatcgagcgggccctgaagatggtgcaggtgcagggcatgactggaaacatccagtttgacacctatggaagaaggaccaactacaccattgatgtgtatgagatgaaggtgtctggcagcaggaaggccggctactggaatgaatatgaaagatttgtgcccttcagtgaccagcagatcagcaatgattctgccagcagtgaaaatagaaccatcgtggtgaccaccatcctggagagcccctacgtgatgtacaagaagaaccacgagcagctggagggcaatgaaagatatgagggctactgtgtggacctggcctatgagatcgccaagcacgtgcgcatcaagtacaagctgagcatcgtgggagatggcaagtacggggcccgggaccctgagaccaagatctggaatggcatggtgggggagctggtgtatggccgggctgacattgctgtggcccccctgaccatcaccctggtgcgggaggaggtgattgacttcagcaagcccttcatgagcctgggcatcagcatcatgatcaagaagccccagaagagcaagccaggagtcttctccttcctggaccccctggcctatgagatctggatgtgcatcgtgtttgcctacatcggcgtgtctgtggtgctcttcctggtgagccgcttcagcccctatgagtggcacctggaggacaacaatgaggagccccgggacccccagagccccccagaccccccaaatgaatttggcatcttcaacagcctgtggttcagcctgggcgccttcatgcagcagggctgtgacatcagccccaggtttgtgtttgtggcctacagcatgccccactgcatcctgtggagctacagcatccacgtgcacatggtgttcatccacctgaacagccgcttcttctccttcaacatccccagcaatgaccggctgagcagcagccactgtgtgtgcctgtgcccctag

SEQ ID NO: 16379 - DNA, 2475 bp, Artificial Sequence
  derived and/or modified sequence
atggcccggcagaagaagatgggccagagcgtgctgcgggctgtgttcttcctggtgctgggcctgctgggccacagccatggaggcttccccaacaccatcagcatcggcggcctcttcatgaggaacacagtgcaggagcacagcgccttccgctttgctgtgcagctgtacaacaccaaccagaacaccacagagaagcccttccacctgaactaccacgtggaccacctggacagcagcaacagcttctctgtgaccaatgccttctgcagccagttcagcagaggagtgtatgccatcttcggcttctatgaccagatgtccatgaacaccctgaccagcttctgtggggccctgcacaccagctttgtgacccccagcttccccacagatgctgatgtgcagtttgtgatccagatgaggcctgccctgaagggggccatcctgagcctgctgggccactacaagtgggagaagtttgtgtacctgtatgacacagagcggggcttcagcatcctgcaggccatcatggaggccgctgtgcagaacaactggcaggtgacagcccggtctgtgggcaacatcaaggatgtgcaggagttccgccgcatcatcgaggagatggaccggcggcaggagaagcgctacctgattgactgtgaggtggagcgcatcaacaccatcctggagcaggtggtgatcctgggcaagcacagccggggctaccactacatgctggccaacctgggcttcacagacatcctgctggagcgggtgatgcacggcggggccaacatcaccggcttccagatcgtgaacaatgaaaaccccatggtgcagcagttcatccagcgctgggtgcggctggatgagcgggagttccctgaggccaagaatgcccccctgaagtacaccagcgccctgacccatgatgccatcctggtgattgctgaggccttccgctacctgcggcggcagagggtggatgtgtccagaagaggcagcgctggggactgcctggccaacccagctgtgccctggagccagggcatcgacatcgagcgggccctgaagatggtgcaggtgcagggcatgactggaaacatccagtttgacacctatggaagaaggaccaactacaccattgatgtgtatgagatgaaggtgtctggcagcaggaaggccggctactggaatgaatatgaaagatttgtgcccttcagtgaccagcagatcagcaatgattctgccagcagtgaaaatagaaccatcgtggtgaccaccatcctggagagcccctacgtgatgtacaagaagaaccacgagcagctggagggcaatgaaagatatgagggctactgtgtggacctggcctatgagatcgccaagcacgtgcgcatcaagtacaagctgagcatcgtgggagatggcaagtacggggcccgggaccctgagaccaagatctggaatggcatggtgggggagctggtgtatggccgggctgacattgctgtggcccccctgaccatcaccctggtgcgggaggaggtgattgacttcagcaagcccttcatgagcctgggcatcagcatcatgatcaagaagccccagaagagcaagccaggagtcttctccttcctggaccccctggcctatgagatctggatgtgcatcgtgtttgcctacatcggcgtgtctgtggtgctcttcctggtgagccgcttcagcccctatgagtggcacctggaggacaacaatgaggagccccgggacccccagagccccccagaccccccaaatgaatttggcatcttcaacagcctgtggttcagcctgggcgccttcatgcagcagggctgtgacatcagccccaggagcctgagcggccgcatcgtgggcggcgtgtggtggttcttcaccctcatcatcatcagcagctacacagccaacctggccgccttcctgactgtggagaggatggtgagccccattgaatctgctgaggacctggccaagcagacagaaattgcctacggcaccctggacagcggcagcaccaaggagttcttccgccgcagcaagattgctgtgtatgagaagatgtggagctacatgaagtctgctgagcccagcgtcttcaccaagaccacagcagatggagtggcccgggtgaggaagagcaagggcaagtttgccttcctgctggagagcaccatgaatgagtacatcgagcagaggaagccctgtgacaccatgaaggtgggcggcaacctggacagcaagggctacggcgtggccacccccaagggcagcgccctgagaaatgctgtgaacctggccgtgctgaagctgaatgagcagggcctgctggacaagctgaagaacaagtggtggtatgacaagggggagtgtggcagcggcggcggggacagcaagaatgcctgcaagccctgcagcattgagacccagtag

SEQ ID NO: 16380 - DNA, 2685 bp, Artificial Sequence
  derived and/or modified sequence
atggcccggcagaagaagatgggccagagcgtgctgcgggccgtgttttttctggttctgggactgctaggccacagtcacggtggtttcccaaacacgatctcaattggaggcctttttatgaggaacaccgtacaggagcactctgcattcaggtttgcagtgcagctttacaatactaatcagaatactacggagaagcccttccatcttaattaccacgtggatcacctggattctagtaactcctttagcgttactaacgcattctgttctcagttctcccgaggagtatacgccatattcggtttttatgatcagatgtccatgaatacccttaccagcttctgcggggcactgcacacctcttttgtgacacctagcttcccaaccgatgcggacgtccagttcgtcatccagatgagacccgccctgaagggagcaatcctgtccctgctcggacactataagtgggaaaagtttgtgtatctgtatgataccgagcgaggtttttcaatactgcaggcaattatggaggccgcagttcagaacaactggcaggtaactgcgaggagtgtgggaaacatcaaagacgtgcaagagtttaggaggattatcgaggaaatggaccgtcggcaggagaagcgctatctgattgattgtgaagtggagagaatcaacaccatcctggagcaagtcgtaattctggggaagcactctcggggctatcattacatgttagccaacctgggcttcacagacattctcttggaacgtgttatgcatgggggagcgaatatcactggatttcagatcgtcaacaatgaaaatcccatggtgcagcagttcatccagaggtgggtgcgacttgacgaacgcgaattcccagaggccaaaaacgcacccttaaaatacacttccgcactcactcatgacgccatcctcgtgattgcggaggcatttagatacctgcgcaggcagcgagttgatgtgagcaggagggggagcgccggagactgcctggccaaccctgccgttccctggtctcagggtattgacatcgagagagctctgaagatggtgcaggtacagggaatgacaggcaacatccagttcgacacatacggacgcaggaccaactataccattgatgtgtatgagatgaaggtcagtggctcgcgtaaagcggggtactggaatgagtacgagcgatttgtgccattcagcgaccaacaaataagcaacgattctgcctcgtcagaaaatcgcacaatagtggttacgacaattcttgaatccccctacgtcatgtataaaaaaaaccacgagcagctggaggggaacgaacgctatgagggttactgtgttgacttagcatatgagatcgccaagcatgtgcggatcaaatacaaattatctatcgtgggcgatggtaagtacggcgctcgcgacccggaaaccaagatttggaacggaatggtgggcgaattggtctacggcagagcagatatagccgtggccccactgacgattactctggtcagggaggaagtgatcgattttagtaagccattcatgtcactgggcatcagtataatgataaaaaagcctcaaaagagcaagcctggggtcttttctttcctggacccactggcttatgagatatggatgtgcattgtctttgcgtacatcggcgtgagcgttgtgctgtttctggtttctcggttcagcccgtatgagtggcacctggaggataataacgaagagcctcgtgacccccaatcgccccccgatcctcccaacgagtttggcatcttcaattccttgtggttcagccttggggccttcatgcagcagggatgcgatatctccccccggagcctcagcggccgaatcgtaggaggcgtgtggtggttcttcacgttgatcatcatatccagctataccgcaaatctagcagcgtttttaacagttgagcggatggtgagccctatcgagagcgccgaggatctggctaagcaaaccgaaattgcatacgggactctggactccgggagtacgaaggagttttttcgacggtcaaagattgcagtctatgagaagatgtggtcctatatgaagtccgcggaaccgagcgttttcacgaagacaactgcagatggcgtggcgcgtgtgcgcaaatcaaaaggtaagtttgcatttcttctcgagagtacgatgaatgaatacatcgaacagcgtaaaccctgcgataccatgaaggtcggaggaaatctggacagtaaggggtacggtgtagccacccctaaaggctcagctctgcgtaatgccgtgaatctcgcagtactgaagctgaatgagcagggtcttctggacaagctgaagaataaatggtggtacgacaagggagagtgtggctccggtggcggcgacagtaaggataagaccagtgccctctcactgtcgaacgtggctggcgtattttacatcctggttggcggcctgggcctcgccatgatggtggctttgatcgagttttgctacaagtccagggctgagtctaaaagaatgaagcttactaagaacactcaaaactttaaacctgctccagctactaacacacagaactacgcaacgtaccgagaaggctacaatgtgtacggcacggagtccgttaaaatttag

SEQ ID NO: 16381 - DNA, 2685 bp, Artificial Sequence
  derived and/or modified sequence
atggcccggcagaagaagatgggccagagcgtgctgcgggccgtgttctttctggtactagggttgctgggacattcccacggtggcttcccgaacacgatctcgatcggtggcctcttcatgagaaacactgtgcaggaacacagcgcctttcggttcgccgtgcagctctataacaccaatcagaacaccactgagaaaccttttcatctgaactatcacgtagatcatttggattcttctaacagcttctcagtgactaacgctttctgtagccaattttccaggggggtgtacgctatcttcggcttctacgaccagatgtccatgaataccctaacaagcttctgtggcgcgctgcacacgtcgttcgtgaccccgagctttccaactgatgccgatgttcaatttgtgatacagatgcggccagccctgaaaggcgctattctgagtctcctgggccactacaagtgggagaaatttgtttatctctatgacacagaacgtggcttcagtattctgcaggccatcatggaagccgcagtacagaacaattggcaggtgacagcccgcagtgtcgggaatattaaagatgtgcaggaattccgccgtattattgaagagatggaccggagacaggagaagcgctacctcattgactgcgaagtggaacgaatcaacaccatactggagcaagtggtaattttaggcaagcacagccggggttaccactatatgttagctaatcttggtttcactgacatcctcttggaacgcgtgatgcacggcggcgccaatattactgggtttcagattgtgaataatgagaacccaatggtccaacaatttattcagcgctgggtccggctggacgagagggagttccctgaggccaaaaacgccccactaaaatatactagtgcacttacccacgacgccatcctggtgatagccgaggccttccgctatcttcgacggcagagagtcgacgtctctaggaggggatcggcaggagattgtctcgcaaatcctgctgtaccatggagccagggcattgatattgagcgcgctctaaagatggtccaggttcagggcatgaccggcaatattcagttcgatacgtacgggagaaggactaactatacaatcgacgtatatgagatgaaagtgtcagggtctcggaaagccggatattggaatgagtatgaacgctttgtgccattttctgaccaacagatctccaacgacagcgccagcagcgaaaataggacaatcgtggtgactacaatactcgagagcccttatgtgatgtacaaaaagaatcatgagcagctagagggcaatgagagatacgaaggctattgcgtcgacctggcatatgaaattgccaaacacgtgcggatcaaatacaagttgagcattgtgggagatggaaagtacggtgcccgcgaccctgagacgaagatctggaatggcatggtgggggagctcgtatacggcagagctgacatcgctgttgcccccctgaccattactctagtcagagaggaagtgattgacttttccaagccattcatgtctctcggaatctccatcatgataaagaaaccgcagaaatcaaagcccggcgtcttctccttcctcgatcctctcgcatatgaaatctggatgtgcattgtctttgcctatatcggggtgtccgtggtactgtttcttgtgtcaagattcagcccttacgagtggcacctggaggataataatgaagaaccaagagaccctcagagtcccccagaccccccaaatgagtttggtatctttaactcactgtggttctcgttaggcgccttcatgcagcagggctgtgacattagtccaaggtccctgagcggccggatagttggcggggtctggtggtttttcaccctgattatcatctcctcgtatacagctaacctagcggcttttctgactgtggaacggatggtaagcccaatcgaaagtgccgaggacctggctaagcagactgagattgcttacggcactttggatagcggctctactaaggaattttttcgccggagcaaaatcgccgtgtacgaaaaaatgtggtcatatatgaagagcgccgaaccttccgtatttacaaagactaccgctgatggtgtggctcgggttcggaaaagcaagggaaaatttgcgttcctgctggagtcaactatgaacgaatatatcgaacagaggaaaccatgcgataccatgaaagtaggagggaatttggattccaaggggtacggagtggccacccctaaaggatcagcactacgtaatgccgtgaatctggcagtgctgaagctcaatgaacagggactgctggacaagctgaaaaataaatggtggtacgacaaaggggaatgtgggtcgggggggggtgattctaaagataaaacctccgctctgagtctgtcgaatgtggcaggggtcttctatattctggtgggcggtctgggtttggccatgatggtcgccttgattgaattttgttacaaatctcgtgctgagtcgaagcggatgaagctgacaaaaaatactcagaacttcaaaccagcccctgcaactaacacgcagaactacgctacgtatagagaagggtacaacgtgtacggtaccgagtccgtgaagatatag

SEQ ID NO: 16382 - DNA, 1989 bp, Artificial Sequence
  derived and/or modified sequence
atgctgcagggcggcgaggagagccggctgttcggcagcctgctgtggaccctcccgtggcgcggcctcttcatgcgcaacactgttcaggagcactctgcctttagattcgctgttcagttgtacaatacgaaccaaaacactaccgaaaagccctttcacctgaattaccacgtcgatcatcttgattccagtaattcattttccgtaaccaatgcattctgctcccagttttccagaggggtgtacgctattttcggcttctatgatcagatgtctatgaatacattgacgtccttctgtggagcacttcacactagtttcgtgacacctagcttccctactgatgcagatgtccagttcgttatccagatgcgacctgccttaaagggagctattctgtctctgctgggccattacaaatgggaaaaattcgtctatctctacgacactgagcggggtttcagcatactgcaagccattatggaggctgccgtacaaaataattggcaggtgacagcccgctctgtcgggaacatcaaagacgttcaggaattccgaagaataatcgaagagatggacaggcgccaggagaagcgttatctgatcgattgcgaagtagagcggatcaatacaattcttgagcaggtggtgatactcgggaagcactccagggggtaccactatatgctggctaacctcgggttcacagacatcctcctggagagagttatgcacgggggggccaacataaccggttttcagatcgtgaataacgagaaccccatggtgcagcaatttatccaaagatgggtcaggttggatgagcgcgagtttccagaggccaagaacgcccctttgaaatatactagcgccctcacgcatgatgccatcctcgtcatagcggaggctttcaggtacctccgtaggcagagggtggacgtttccagaagaggaagtgccggggactgtctcgcaaacccagctgtcccatggtcccaaggaatagatattgagcgggccctgaagatggtgcaggtccagggcatgacgggtaatattcagttcgacacttacgggaggcgcacaaactacaccatcgatgtctacgagatgaaggtgagcggttctaggaaggctgggtactggaacgagtatgagagatttgtgcccttctctgaccagcaaataagtaatgacagcgcctctagtgagaacaggacgattgtagttaccaccattctagaatctccatacgtgatgtataagaagaaccacgagcagctcgaaggcaacgaaaggtacgagggttattgcgtggacctggcgtacgaaatcgcgaagcacgtcagaattaagtataaactgtccatcgtaggcgacggtaagtatggtgccagggatccagaaacaaagatttggaacggaatggttggggagctggtgtacggaagagctgacatcgctgtcgctcccctaactattaccttagtccgggaagaggtgatagatttcagtaagccctttatgtcacttgggatctcaatcatgattaaaaaaccccagaagtccaagcctggagttttctccttcctggatccgcttgcttatgagatatggatgtgcatcgtatttgcctatatcggcgtatctgtcgtcctatttttggtgagccggttttccccttacgagtggcatctcgaagacaacaacgaggaacctcgggaccctcagagtccccccgatccacctaatgaatttggtatatttaactccctttggttctccttgggcgcttttatgcagcaggggtgcgatattagtcctagattcgtgtttgtcgcctacagcatgccacattgtattctttggagttacagcattcatgtgcacatggtgttcatacacctgaattcaagatttttctcattcaacatcccctcaaatgatcgcttaagtagcagtcactgcgtgtgcctgtgcccctag

SEQ ID NO: 16383 - DNA, 2475 bp, Artificial Sequence
  derived and/or modified sequence
atggcccggcagaagaagatgggccagagcgtgctgcgggccgtgttcttcctcgtgctaggcttactcggacacagccatggagggtttcccaacactattagcattggcggcctattcatgcgtaacacagtgcaggagcacagtgctttccgattcgctgttcagctgtataacacaaaccagaataccaccgaaaaacccttccatctgaactaccatgttgatcacctggatagctccaattcgttttccgtgaccaatgcattttgttctcagttctccagaggcgtgtatgcgatttttggtttctatgaccaaatgagtatgaacacgctgacatcgttctgcggcgccctgcacacttctttcgtgacaccttcctttcccaccgacgccgacgtgcaattcgtcatccagatgcggcctgccttaaaaggagccatacttagccttctggggcactataagtgggagaagttcgtttatctgtacgacacagagcgcgggtttagtatcctgcaggccattatggaagccgctgtgcagaacaattggcaggtgactgcacggtcagtcggaaatattaaagacgtccaggaattcaggcgcataatcgaggaaatggacaggcgccaggaaaagaggtacttgatagattgcgaggtggagcgtattaacactatcctcgaacaggtagtgatcctcggtaagcattcaagagggtaccactacatgctcgccaacctggggtttaccgacattttgctggaaagagttatgcacggtggggccaacattacggggtttcagattgttaacaacgaaaatcctatggtccaacagttcattcagcgatgggtcagactggatgagcgggagttcccagaagcaaagaacgctccactgaagtacaccagcgcactcactcacgacgcgatactggttattgccgaggcctttcgttacctgcgccgacagagggtcgacgtatcaagacgagggtcggctggagattgcctcgcgaatcctgctgtgccatggtctcagggaatcgacatcgagcgagcactgaagatggtgcaggtccagggcatgaccggcaacattcaatttgatacctacggcagaaggaccaactacaccatcgacgtgtatgaaatgaaggtctcaggctctcgtaaggctgggtattggaacgaatatgagcgcttcgtgcccttttccgatcagcagatcagtaacgattctgccagcagtgagaacaggacaatcgtagttacaactattctggagtctccctacgttatgtacaaaaagaaccatgagcagctcgaaggcaacgagagatacgaggggtattgcgttgacttggcgtatgagatcgctaaacacgttcggataaaatacaaattgagcatcgtgggagatggtaagtacggcgcccgggaccccgagacaaagatctggaacggaatggtcggcgagctcgtatacggccgcgccgacatcgccgtggcacctcttacaatcacccttgttagggaggaagtcattgacttcagcaagccgtttatgtccctgggcataagcattatgataaagaagccccagaaatctaagcctggagttttttctttcttggaccctctggcctacgagatctggatgtgcatagtattcgcatacatcggcgtgtccgtggtgctgttcttagtctccagattctctccctacgaatggcacttagaagacaataatgaagagccgcgagaccctcagagtccccccgacccccctaatgaattcggcatctttaacagcctttggttctctctcggtgctttcatgcagcagggttgcgacatctctccacgttctcttagtgggagaatcgtgggcggagtgtggtggttctttacactaataataatctcaagttacacagctaatcttgcagcgttcctgacagtggaaaggatggtgtcaccgatcgaaagtgcagaggacttagccaaacagaccgaaatagcatatggcacacttgactccggaagcaccaaagagtttttccggaggagtaaaatcgccgtctacgaaaagatgtggtcctacatgaagtcagccgagccctcagtatttacaaagacaaccgctgatggcgtggcacgggtcagaaagagtaaggggaagtttgcgttcctcctcgagagcactatgaatgagtatatcgaacagaggaagccctgcgatacaatgaaggtgggcgggaatttagattctaagggctatggtgtcgcaacgcccaagggaagcgccctccgtaacgctgttaatctcgccgtgttaaagctgaacgaacaagggctgctagacaagttgaagaataaatggtggtatgataaaggtgaatgtggttccggcggcggcgactctaagaacgcttgtaagccatgttctattgagacccaatag

SEQ ID NO: 16384 - DNA, 2685 bp, Artificial Sequence
  derived and/or modified sequence
atggctaggcagaagaaaatgggccaatccgtactccgagccgttttttttctggtactggggctgctcggtcattctcacgggggttttccaaatactataagtattggaggtctgttcatgcggaacacggtgcaggaacatagtgcattccggtttgcagttcagctgtacaacactaaccagaacacgaccgaaaaacccttccacttgaattaccatgttgatcacttagacagctctaacagtttctcagtgacaaatgcgttctgcagtcagttctcacggggagtttacgccatttttgggttttatgatcaaatgtccatgaacaccttaaccagcttttgcggcgctctgcacacctcatttgtcacaccctcttttccgaccgacgccgacgtccagttcgtgatccagatgagacctgcactgaagggcgcaattttgtccctcctaggacattacaagtgggagaagttcgtctatctgtacgacacagagagaggattctccatcctgcaagctatcatggaagctgccgtacaaaataactggcaggtcacagcacgcagcgtgggcaatattaaggacgttcaggagttcaggcgcataatcgaggaaatggacaggcggcaggagaaacgctacctgatagactgtgaagttgagcgtattaatactattctcgagcaggttgtgatactcggtaaacacagccgagggtatcactacatgctagccaacctgggattcacggacatcctcctggaaagagtcatgcatgggggagcaaacatcacgggattccaaattgttaacaacgaaaaccctatggtgcagcagttcatccagcgatgggtgaggctggacgaaagagaatttccagaggctaaaaatgcccctttgaaatacactagtgccttgacacacgacgcaatcctggtcatcgcggaggccttcagatacttaaggcgccagcgggtggatgtttcacggaggggtagtgccggagactgcctggccaaccctgcagtgccttggagccagggaattgacatcgaaagagccttaaaaatggtacaagtccagggcatgaccgggaacatacagtttgatacctacggcagaagaacgaattatacaatagatgtctacgagatgaaagtgagcggaagtaggaaggccggatattggaatgagtacgagcgctttgttcccttttctgaccagcaaatctccaacgatagtgcttcctccgaaaacagaacaatcgttgtgactacaatcttagaaagtccatacgtaatgtacaagaagaatcacgagcaactggaggggaatgaaaggtatgagggctattgcgtcgaccttgcttacgagatcgctaagcatgtccgtatcaagtataagcttagtatcgtgggagacggaaagtacggagcacgcgatcctgagaccaagatttggaacgggatggtgggcgagctggtttacggcagagctgacatagctgtagctccactgaccataacattagtccgtgaggaggtcatcgactttagtaaaccattcatgagcctgggaatcagcattatgatcaaaaagcctcagaaatcgaaaccgggtgtgttttccttcctggaccctcttgcctacgagatttggatgtgtattgtgtttgcttacatcggagtgtcggtggtgctgttcctggtctcccggttctcaccatatgagtggcatctggaggacaataatgaggaacctcgagatccacagtcgccaccagaccccccaaacgaattcggtatttttaattcattatggttttccctgggcgcattcatgcagcagggttgcgatatctcacctcggagcctgtctggtcggatcgtcgggggagtctggtggttctttaccttaataattatcagctcctatacagctaatctggcagcattcctcaccgtggagaggatggtcagccctattgagtctgcggaagacctggctaagcaaaccgaaatcgcgtacgggacgctggatagcggcagtactaaagagttctttcgcagatctaaaattgccgtttacgagaagatgtggtcctatatgaagtcagctgaaccatccgtgttcactaagaccacggccgatggcgtggcgcgagttaggaaatctaaaggaaagttcgcattcttgctggaatctaccatgaatgagtatatagaacagagaaaaccatgcgatacaatgaaagtcggcggtaatctcgacagtaagggctacggggtggccacaccgaaagggtccgccctgagaaacgcggtgaatctagctgtcctgaagctgaatgagcagggcttgctggataaactgaaaaacaaatggtggtatgacaagggtgaatgcgggagcggaggaggagactctaaagataaaaccagtgcgctctcactcagtaacgtggctggcgtattttatattctggtgggagggcttggcttggccatgatggttgctttaatcgaattctgctacaagtcacgtgccgaatcaaagcggatgaaactgacgaaaaacacgcagaacttcaagcccgctcccgctactaacacacagaactacgccacttatcgagaggggtacaatgtgtatggcacagagtctgtgaagatctag

SEQ ID NO: 16385 - DNA, 2685 bp, Artificial Sequence
  derived and/or modified sequence
atggctcgccaaaagaagatggggcaatctgtgttgagggcagtcttctttttagtcctcgggctgctgggccactcgcatggtggcttccccaatacgatttccatcggaggcctgttcatgagaaataccgtgcaggaacactccgcgttcaggtttgctgtgcagttgtataacaccaatcagaatacaacagaaaagccttttcatctgaattatcacgtcgaccacctcgatagcagtaattccttctccgtcaccaacgccttctgtagtcagttctcaagaggggtttatgctatctttgggttctacgatcaaatgtcgatgaacactctcacctccttctgtggagctcttcatactagtttcgtgactccctcattccccacagacgccgacgtgcagttcgtgattcaaatgcgaccagccttaaagggagcaattctgagcctgctaggacattataagtgggagaagtttgtgtatctgtacgatacagaacgcggattttccatcctgcaggccatcatggaggctgccgtgcagaataattggcaggtgacggctcgatccgttggaaacatcaaggatgttcaggagttccggagaattatcgaagaaatggatagacgccaagagaagcgctatctcattgattgtgaggtggagcgcataaacacaattttggaacaggtggtgatcctcggcaagcacagtcgcggataccactatatgctagcaaatctgggctttacagacattctgctggaacgtgttatgcatggcggagccaatatcactggattccaaatagttaacaatgaaaaccctatggtgcagcagttcatccaacggtgggtgaggctggatgagagggaattccctgaggccaaaaatgcaccactgaaatatacttcggctttgactcatgacgcaattctcgtgattgctgaggcatttcggtacctccggcgacaacgggttgatgtatctaggcgcggaagcgcaggcgactgcttagccaatccagcggtgccatggtcccagggcattgacattgagagggccctaaagatggttcaggttcaagggatgacgggcaacattcagttcgatacctatggccgacggacaaactacacaattgatgtttacgaaatgaaggtctctggatctcgtaaagcaggatactggaatgagtatgagagatttgttccgttttcagatcagcagattagcaacgatagtgctagctccgagaaccggaccattgtggtgacaaccatcctcgaaagcccatacgtcatgtacaagaaaaatcatgagcagttagaggggaacgaaagatacgaaggttattgcgtagacctcgcttatgaaatagctaagcatgtgcgcattaaatacaagctctccatagttggcgatgggaaatacggagctcgcgatccggagacgaagatctggaacggcatggtcggcgagctggtctacggccgtgccgatatagccgtggctccactaactattactcttgtccgggaagaggtgatcgacttctctaagcctttcatgagtctcggcatcagtattatgataaagaagcctcagaagtctaaacctggcgtcttctccttcctcgacccactggcttatgagatctggatgtgcatagtgtttgcatatattggcgtcagtgtggtcctgttcctggtatctcggttctcaccatatgaatggcatttggaggataacaatgaagaaccaagagaccctcaaagtccaccggatcctcccaatgagtttggaattttcaattctctttggttttctctgggcgcttttatgcaacagggctgtgatatctccccacggagtttatccggacgaattgtaggtggggtttggtggttctttacgctgatcataatctcctcatataccgccaatctggccgcatttctgactgtggagcgtatggtgtcacccattgagagcgcagaggacctggccaagcagaccgagattgcctatgggacactggacagtggaagtaccaaggagttctttcgcaggagtaagatcgccgtgtacgagaaaatgtggtcatatatgaagagcgccgagcccagcgtgtttacaaaaacaactgcagatggagtggctagagtccgtaaaagcaaggggaagttcgccttcttactcgagtcgacaatgaatgagtacatcgaacagcgtaagccctgcgatactatgaaagttggcggaaacctggactccaagggatacggggtcgccactcccaaaggttcggcgctacggaatgcggtgaatctggccgtgttgaagctgaacgagcaaggattacttgataaattgaagaataagtggtggtacgacaagggggaatgcgggtctggtggtggggattctaaagacaagacaagtgcgctgtccttatccaatgtagcaggcgtgttctacatactggtagggggattggggctcgctatgatggtcgcccttattgagttttgttataagtcccgggcagaatccaagagaatgaaactgaccaaaaacacccagaactttaagcccgctcctgccactaatacacagaattacgcaacttaccgggagggatacaatgtctacggtacagagtccgtcaaaatatag

SEQ ID NO: 16386 - DNA, 1989 bp, Artificial Sequence
  derived and/or modified sequence
atgcttcagggaggggaagagagtcgactgtttgggtcactcttatggaccctcccatggcgtggtttattcatgcgcaataccgtacaggagcattctgcattcagatttgctgtccagctgtacaataccaatcagaatacaaccgagaagcctttccatttgaactatcacgtggatcacctggacagcagcaatagcttttccgtgacaaacgccttttgtagccagttctctagaggcgtgtacgcgatctttggattttatgatcagatgtctatgaatacacttacctcattctgtggtgccctccataccagtttcgtaacaccctctttccctaccgatgccgacgtgcagttcgtgatccagatgaggccagcgttgaagggcgctattttgtcgcttctgggccattacaaatgggagaagtttgtgtacctgtatgacaccgagcgaggcttttctatactgcaggctattatggaagccgctgtacagaataactggcaggttaccgctagatccgttggcaacataaaggatgtgcaggagtttcggaggataatcgaagaaatggatagaagacaggaaaagcggtacctaattgactgcgaggttgaaagaatcaatacaattcttgagcaggtggtcatcttaggaaagcacagccgtggataccactacatgctggcgaacttggggtttacagacatcctgctggagcgggtgatgcatggaggggctaatattactgggttccagatcgtcaataacgaaaacccgatggtgcagcagtttatccagaggtgggttaggctggacgaacgtgagttccccgaggcaaaaaacgcccctctcaagtacacgtctgctctaacccatgatgctatactggtgatcgccgaggcattccggtatttacgcagacaacgagtagatgtgtcacggaggggcagcgccggtgattgcttggcaaacccggcagtgccctggtcccagggcatcgacatcgaacgtgccctcaagatggttcaggtccaagggatgacaggaaatatacagttcgatacctatggacgacggaccaactatacgatcgacgtgtatgagatgaaggtatccggatcacgcaaggctggatactggaacgaatacgaaaggtttgtgcccttctccgaccagcagatctcaaacgatagcgcgagcagcgaaaacagaactattgtggttaccaccatcctggagtctccctatgttatgtataaaaagaaccatgagcagctggaagggaacgagaggtacgagggttactgtgtcgatctggcctacgagatagctaaacatgtacgcataaagtataagctctcaatcgttggcgatggaaagtatggtgctcgggatcccgagacaaaaatctggaatggcatggtcggcgaactggtctacggcagggccgatatcgcggtcgccccattaaccatcactcttgtccgcgaggaggtcattgacttcagtaagccttttatgagcctcgggatcagcatcatgatcaagaaacctcagaaatcaaagcctggcgttttctctttcctagaccctctcgcatacgagatatggatgtgcattgtgttcgcttatattggcgtctctgtggtgttgttcctggtatctaggttctcaccctacgaatggcacctggaggacaacaacgaagaacccagggacccccaatccccaccagatcctcctaacgaattcggtatttttaattcactttggttttcactcggagctttcatgcaacagggatgcgacatttctccccgtttcgtgttcgtcgcctactcaatgccgcattgcattctgtggtcatattctatacacgtgcatatggtgttcatacacctgaactcgcgatttttctcctttaacattccttcaaacgatcgcctgagcagtagccactgcgtctgcctgtgcccttag

SEQ ID NO: 16387 - DNA, 2475 bp, Artificial Sequence
  derived and/or modified sequence
atggcacgacagaaaaagatggggcagagcgtactgagagcagtttttttccttgttctgggcctgctggggcactctcatggtggttttccaaacaccattagtatcgggggattattcatgaggaataccgtgcaggagcactcagcttttagatttgccgtgcaactatataacactaatcagaacactaccgaaaaaccttttcatctgaattatcatgtcgaccatctagacagttctaattctttcagcgttactaatgctttctgcagtcaattttcgagaggcgtctacgcgatatttgggttttacgaccagatgagtatgaacacactgacgtcattttgtggtgctctccacacatcattcgtcacgcctagttttccgacagacgctgacgtccagttcgtcattcaaatgaggcctgctctgaaaggggcaattctttcgcttctgggtcactataaatgggagaagttcgtgtatctatatgataccgaacggggattctctattttgcaggctataatggaagcagccgtgcaaaacaactggcaggtcactgcacgtagcgtgggtaatataaaagatgttcaagagtttcgcaggattatcgaagagatggaccggagacaggagaaacgctacctcatagactgtgaagtggagcgaattaacacgatcctcgaacaagtggtgatcctagggaaacactcccggggttaccattatatgctggctaatctcggatttaccgacattctgctggaacgagtcatgcacggcggagctaacatcactggctttcagatcgtaaacaatgagaaccctatggtgcagcagttcatccaaaggtgggtgcggctggacgagcgcgaatttcctgaggccaaaaatgctccactgaagtacaccagcgctctaacccatgacgccattctcgtcatcgctgaggcattcagatatcttcggagacagagagtggacgtatccaggcgagggtccgcaggtgactgtctggcaaaccccgcagtaccctggagtcagggcatcgacatcgaaagagcacttaaaatggtgcaggtgcaaggcatgaccggcaacatccaattcgacacctatggcaggcgaaccaactacaccatcgacgtgtatgaaatgaaggtgagcgggagcagaaaggcagggtactggaacgaatacgaacggtttgttccattttccgaccagcaaattagtaacgattcagcctcatccgagaatcgaacaatagtcgttaccacaatcctcgaatcgccttatgttatgtacaagaagaatcatgagcagcttgaaggaaacgagcgctatgagggctattgtgtggatctggcttatgagatagccaaacacgtcaggatcaagtacaaactcagcatagtgggcgacgggaaatacggcgctcgggatcctgaaaccaagatctggaacgggatggtgggcgaactggtctatggacgggctgatatcgctgtggcccctctgaccatcactttggtacgggaggaagttatcgatttttctaagccattcatgtctttgggaatttcaatcatgattaaaaaaccccaaaagtccaaaccaggcgtgtttagtttcctggaccctctcgcgtacgagatctggatgtgtatcgtcttcgcttatatcggtgtatctgtcgtcctttttctcgtatcccgattctccccctatgagtggcacctggaagacaataatgaggaacccagggacccccagtctccccctgaccctcccaacgaattcgggatctttaactccctgtggttttccttaggcgctttcatgcagcaggggtgcgatatctccccccgtagtctgagtggcagaattgtgggaggggtgtggtggttcttcaccctgataattatttcttcatacacagccaatctggcagcattccttacagtggaacgcatggtcagtcccatcgagtctgctgaggatctggccaagcagactgaaatagcctacggcacgctcgatagtgggagcaccaaggagttttttagacggagcaaaatcgccgtgtacgaaaagatgtggtcatacatgaaaagtgccgaaccttctgtattcacaaaaaccacagcagacggggtggcgcgagtaaggaaaagcaaaggcaaatttgcattcctccttgagtccacaatgaacgaatatatcgagcagagaaagccgtgcgacactatgaaagtggggggtaaccttgatagcaagggttacggagttgccacgcctaagggatctgctctcagaaacgcagtgaacctggcggtgctcaagttaaatgagcaaggccttcttgacaagcttaaaaataaatggtggtacgacaagggcgaatgcggatctgggggtggcgattctaaaaacgcgtgtaaaccttgttctattgagacccaatag

SEQ ID NO: 16388 - DNA, 2685 bp, Artificial Sequence
  derived and/or modified sequence
atggccagacagaagaagatgggccagagcgtgctgagagccgtgttcttcctggtgctgggcctgctgggccacagccacggcggcttccccaacaccatcagcatcggcggcctgttcatgagaaacaccgtgcaggagcacagcgccttcagattcgccgtgcagctgtacaacaccaaccagaacaccaccgagaagcccttccacctgaactaccacgtggaccacctggacagcagcaacagcttcagcgtgaccaacgccttctgcagccagttcagcagaggcgtgtacgccatcttcggcttctacgaccagatgagcatgaacaccctgaccagcttctgcggcgccctgcacaccagcttcgtgacccccagcttccccaccgacgccgacgtgcagttcgtgatccagatgagacccgccctgaagggcgccatcctgagcctgctgggccactacaagtgggagaagttcgtgtacctgtacgacaccgagagaggcttcagcatcctgcaggccatcatggaggccgccgtgcagaacaactggcaggtgaccgccagaagcgtgggcaacatcaaggacgtgcaggagttcagaagaatcatcgaggagatggacagaagacaggagaagagatacctgatcgactgcgaggtggagagaatcaacaccatcctggagcaggtggtgatcctgggcaagcacagcagaggctaccactacatgctggccaacctgggcttcaccgacatcctgctggagagagtgatgcacggcggcgccaacatcaccggcttccagatcgtgaacaacgagaaccccatggtgcagcagttcatccagagatgggtgagactggacgagagagagttccccgaggccaagaacgcccccctgaagtacaccagcgccctgacccacgacgccatcctggtgatcgccgaggccttcagatacctgagaagacagagagtggacgtgagcagaagaggcagcgccggcgactgcctggccaaccccgccgtgccctggagccagggcatcgacatcgagagagccctgaagatggtgcaggtgcagggcatgaccggcaacatccagttcgacacctacggcagaagaaccaactacaccatcgacgtgtacgagatgaaggtgagcggcagcagaaaggccggctactggaacgagtacgagagattcgtgcccttcagcgaccagcagatcagcaacgacagcgccagcagcgagaacagaaccatcgtggtgaccaccatcctggagagcccctacgtgatgtacaagaagaaccacgagcagctggagggcaacgagagatacgagggctactgcgtggacctggcctacgagatcgccaagcacgtgagaatcaagtacaagctgagcatcgtgggcgacggcaagtacggcgccagagaccccgagaccaagatctggaacggcatggtgggcgagctggtgtacggcagagccgacatcgccgtggcccccctgaccatcaccctggtgagagaggaggtgatcgacttcagcaagcccttcatgagcctgggcatcagcatcatgatcaagaagccccagaagagcaagcccggcgtgttcagcttcctggaccccctggcctacgagatctggatgtgcatcgtgttcgcctacatcggcgtgagcgtggtgctgttcctggtgagcagattcagcccctacgagtggcacctggaggacaacaacgaggagcccagagacccccagagcccccccgacccccccaacgagttcggcatcttcaacagcctgtggttcagcctgggcgccttcatgcagcagggctgcgacatcagccccagaagcctgagcggcagaatcgtgggcggcgtgtggtggttcttcaccctgatcatcatcagcagctacaccgccaacctggccgccttcctgaccgtggagagaatggtgagccccatcgagagcgccgaggacctggccaagcagaccgagatcgcctacggcaccctggacagcggcagcaccaaggagttcttcagaagaagcaagatcgccgtgtacgagaagatgtggagctacatgaagagcgccgagcccagcgtgttcaccaagaccaccgccgacggcgtggccagagtgagaaagagcaagggcaagttcgccttcctgctggagagcaccatgaacgagtacatcgagcagagaaagccctgcgacaccatgaaggtgggcggcaacctggacagcaagggctacggcgtggccacccccaagggcagcgccctgagaaacgccgtgaacctggccgtgctgaagctgaacgagcagggcctgctggacaagctgaagaacaagtggtggtacgacaagggcgagtgcggcagcggcggcggcgacagcaaggacaagaccagcgccctgagcctgagcaacgtggccggcgtgttctacatcctggtgggcggcctgggcctggccatgatggtggccctgatcgagttctgctacaagagcagagccgagagcaagagaatgaagctgaccaagaacacccagaacttcaagcccgcccccgccaccaacacccagaactacgccacctacagagagggctacaacgtgtacggcaccgagagcgtgaagatctag

SEQ ID NO: 16389 - DNA, 1989 bp, Artificial Sequence
  derived and/or modified sequence
atgctgcagggcggcgaggagagcagactgttcggcagcctgctgtggaccctgccctggagaggcctgttcatgagaaacaccgtgcaggagcacagcgccttcagattcgccgtgcagctgtacaacaccaaccagaacaccaccgagaagcccttccacctgaactaccacgtggaccacctggacagcagcaacagcttcagcgtgaccaacgccttctgcagccagttcagcagaggcgtgtacgccatcttcggcttctacgaccagatgagcatgaacaccctgaccagcttctgcggcgccctgcacaccagcttcgtgacccccagcttccccaccgacgccgacgtgcagttcgtgatccagatgagacccgccctgaagggcgccatcctgagcctgctgggccactacaagtgggagaagttcgtgtacctgtacgacaccgagagaggcttcagcatcctgcaggccatcatggaggccgccgtgcagaacaactggcaggtgaccgccagaagcgtgggcaacatcaaggacgtgcaggagttcagaagaatcatcgaggagatggacagaagacaggagaagagatacctgatcgactgcgaggtggagagaatcaacaccatcctggagcaggtggtgatcctgggcaagcacagcagaggctaccactacatgctggccaacctgggcttcaccgacatcctgctggagagagtgatgcacggcggcgccaacatcaccggcttccagatcgtgaacaacgagaaccccatggtgcagcagttcatccagagatgggtgagactggacgagagagagttccccgaggccaagaacgcccccctgaagtacaccagcgccctgacccacgacgccatcctggtgatcgccgaggccttcagatacctgagaagacagagagtggacgtgagcagaagaggcagcgccggcgactgcctggccaaccccgccgtgccctggagccagggcatcgacatcgagagagccctgaagatggtgcaggtgcagggcatgaccggcaacatccagttcgacacctacggcagaagaaccaactacaccatcgacgtgtacgagatgaaggtgagcggcagcagaaaggccggctactggaacgagtacgagagattcgtgcccttcagcgaccagcagatcagcaacgacagcgccagcagcgagaacagaaccatcgtggtgaccaccatcctggagagcccctacgtgatgtacaagaagaaccacgagcagctggagggcaacgagagatacgagggctactgcgtggacctggcctacgagatcgccaagcacgtgagaatcaagtacaagctgagcatcgtgggcgacggcaagtacggcgccagagaccccgagaccaagatctggaacggcatggtgggcgagctggtgtacggcagagccgacatcgccgtggcccccctgaccatcaccctggtgagagaggaggtgatcgacttcagcaagcccttcatgagcctgggcatcagcatcatgatcaagaagccccagaagagcaagcccggcgtgttcagcttcctggaccccctggcctacgagatctggatgtgcatcgtgttcgcctacatcggcgtgagcgtggtgctgttcctggtgagcagattcagcccctacgagtggcacctggaggacaacaacgaggagcccagagacccccagagcccccccgacccccccaacgagttcggcatcttcaacagcctgtggttcagcctgggcgccttcatgcagcagggctgcgacatcagccccagattcgtgttcgtggcctacagcatgccccactgcatcctgtggagctacagcatccacgtgcacatggtgttcatccacctgaacagcagattcttcagcttcaacatccccagcaacgacagactgagcagcagccactgcgtgtgcctgtgcccctag

SEQ ID NO: 16390 - DNA, 2475 bp, Artificial Sequence
  derived and/or modified sequence
atggccagacagaagaagatgggccagagcgtgctgagagccgtgttcttcctggtgctgggcctgctgggccacagccacggcggcttccccaacaccatcagcatcggcggcctgttcatgagaaacaccgtgcaggagcacagcgccttcagattcgccgtgcagctgtacaacaccaaccagaacaccaccgagaagcccttccacctgaactaccacgtggaccacctggacagcagcaacagcttcagcgtgaccaacgccttctgcagccagttcagcagaggcgtgtacgccatcttcggcttctacgaccagatgagcatgaacaccctgaccagcttctgcggcgccctgcacaccagcttcgtgacccccagcttccccaccgacgccgacgtgcagttcgtgatccagatgagacccgccctgaagggcgccatcctgagcctgctgggccactacaagtgggagaagttcgtgtacctgtacgacaccgagagaggcttcagcatcctgcaggccatcatggaggccgccgtgcagaacaactggcaggtgaccgccagaagcgtgggcaacatcaaggacgtgcaggagttcagaagaatcatcgaggagatggacagaagacaggagaagagatacctgatcgactgcgaggtggagagaatcaacaccatcctggagcaggtggtgatcctgggcaagcacagcagaggctaccactacatgctggccaacctgggcttcaccgacatcctgctggagagagtgatgcacggcggcgccaacatcaccggcttccagatcgtgaacaacgagaaccccatggtgcagcagttcatccagagatgggtgagactggacgagagagagttccccgaggccaagaacgcccccctgaagtacaccagcgccctgacccacgacgccatcctggtgatcgccgaggccttcagatacctgagaagacagagagtggacgtgagcagaagaggcagcgccggcgactgcctggccaaccccgccgtgccctggagccagggcatcgacatcgagagagccctgaagatggtgcaggtgcagggcatgaccggcaacatccagttcgacacctacggcagaagaaccaactacaccatcgacgtgtacgagatgaaggtgagcggcagcagaaaggccggctactggaacgagtacgagagattcgtgcccttcagcgaccagcagatcagcaacgacagcgccagcagcgagaacagaaccatcgtggtgaccaccatcctggagagcccctacgtgatgtacaagaagaaccacgagcagctggagggcaacgagagatacgagggctactgcgtggacctggcctacgagatcgccaagcacgtgagaatcaagtacaagctgagcatcgtgggcgacggcaagtacggcgccagagaccccgagaccaagatctggaacggcatggtgggcgagctggtgtacggcagagccgacatcgccgtggcccccctgaccatcaccctggtgagagaggaggtgatcgacttcagcaagcccttcatgagcctgggcatcagcatcatgatcaagaagccccagaagagcaagcccggcgtgttcagcttcctggaccccctggcctacgagatctggatgtgcatcgtgttcgcctacatcggcgtgagcgtggtgctgttcctggtgagcagattcagcccctacgagtggcacctggaggacaacaacgaggagcccagagacccccagagcccccccgacccccccaacgagttcggcatcttcaacagcctgtggttcagcctgggcgccttcatgcagcagggctgcgacatcagccccagaagcctgagcggcagaatcgtgggcggcgtgtggtggttcttcaccctgatcatcatcagcagctacaccgccaacctggccgccttcctgaccgtggagagaatggtgagccccatcgagagcgccgaggacctggccaagcagaccgagatcgcctacggcaccctggacagcggcagcaccaaggagttcttcagaagaagcaagatcgccgtgtacgagaagatgtggagctacatgaagagcgccgagcccagcgtgttcaccaagaccaccgccgacggcgtggccagagtgagaaagagcaagggcaagttcgccttcctgctggagagcaccatgaacgagtacatcgagcagagaaagccctgcgacaccatgaaggtgggcggcaacctggacagcaagggctacggcgtggccacccccaagggcagcgccctgagaaacgccgtgaacctggccgtgctgaagctgaacgagcagggcctgctggacaagctgaagaacaagtggtggtacgacaagggcgagtgcggcagcggcggcggcgacagcaagaacgcctgcaagccctgcagcatcgagacccagtag

SEQ ID NO: 16391 - protein, 920 aa, Artificial Sequence
  derived and/or modified sequence
MEHGTLLAQPGLWTRDTSWALLYFLCYILPQTAPQVLRIGGIFETVENEPVNVEELAFKFAVTSINRNRTLMPNTTLTYDIQRINLFDSFEASRRACDQLALGVAALFGPSHSSSVSAVQSICNALEVPHIQTRWKHPSVDNKDLFYINLYPDYAAISRAILDLVLYYNWKTVTVVYEDSTGLIRLQELIKAPSRYNIKIKIRQLPSGNKDAKPLLKEMKKGKEFYVIFDCSHETAAEILKQILFMGMMTEYYHYFFTTLDLFALDLELYRYSGVNMTGFRLLNIDNPHVSSIIEKWSMERLQAPPRPETGLLDGMMTTEAALMYDAVYMVAIASHRASQLTVSSLQCHRHKPWRLGPRFMNLIKEATARWDGLTGHITFNKTNGLRKDFDLDIISLKEEGTEKAAGEVSKHLYKVWKKIGIWNSNSGLNMTDSNKDKSSNITDSLANRTLIVTTILEEPYVMYRKSDKPLYGNDRFEGYCLDLLKELSNILGFIYDVKLVPDGKYGAQNDKGEWNGMVKELIDHRADLAVAPLTITYVREKVIDFSKPFMTLGISILYRKPNGTNPGVFSFLNPLSPDIWMYVLLACLGVSCVLFVIARFTPYEWYNPHPCNPDSDVVENNFTLLNSFWFGVGALMQQGSELMPKALSTRIVGGIWWFFTLIIISSYTANLAAFLTVERMESPIDSADDLAKQTKIEYGAVRDGSTMTFFKKSKISTYEKMWAFMSSRQQTALVRNSDEGIQRVLTTDYALLMESTSIEYVTQRNCNLTQIGGLIDSKGYGVGTPIGSPYRDKITIAILQLQEEGKLHMMKEKWWRGNGCPEEDNKEASALGVENIGGIFIVLAAGLVLSVFVAIGEFIYKSRKNNDIEQAFCFFYGLQCKQTHPTNSTSGTTLSTDLECGKLIREERGIRKQSSVHTV

SEQ ID NO: 16392 - protein, 918 aa, Artificial Sequence
  derived and/or modified sequence
MEHGTLLAQPGLWTRDTSWALLYFLCYILPQTAPQVLRIGGIFETVENEPVNVEELAFKFAVTSINRNRTLMPNTTLTYDIQRINLFDSFEASRRACDQLALGVAALFGPSHSSSVSAVQSICNALEVPHIQTRWKHPSVDNKDLFYINLYPDYAAISRAILDLVLYYNWKTVTVVYEDSTGLIRLQELIKAPSRYNIKIKIRQLPSGNKDAKPLLKEMKKGKEFYVIFDCSHETAAEILKQILFMGMMTEYYHYFFTTLDLFALDLELYRYSGVNMTGFRLLNIDNPHVSSIIEKWSMERLQAPPRPETGLLDGMMTTEAALMYDAVYMVAIASHRASQLTVSSLQCHRHKPWRLGPRFMNLIKEARWDGLTGHITFNKTNGLRKDFDLDIISLKEEGTEKAAGEVSKHLYKVWKKIGIWNSNSGLNMTDSNKDKSSNITDSLANRTLIVTTILEEPYVMYRKSDKPLYGNDRFEGYCLDLLKELSNILGFIYDVKLVPDGKYGAQNDKGEWNGMVKELIDHRADLAVAPLTITYVREKVIDFSKPFMTLGISILYRKPNGTNPGVFSFLNPLSPDIWMYVLLACLGVSCVLFVIARFTPYEWYNPHPCNPDSDVVENNFTLLNSFWFGVGALMQQGSELMPKALSTRIVGGIWWFFTLIIISSYTANLAAFLTVERMESPIDSADDLAKQTKIEYGAVRDGSTMTFFKKSKISTYEKMWAFMSSRQQTALVRNSDEGIQRVLTTDYALLMESTSIEYVTQRNCNLTQIGGLIDSKGYGVGTPIGSPYRDKITIAILQLQEEGKLHMMKEKWWRGNGCPEEDNKEASALGVENIGGIFIVLAAGLVLSVFVAIGEFIYKSRKNNDIEQAFCFFYGLQCKQTHPTNSTSGTTLSTDLECGKLIREERGIRKQSSVHTV

SEQ ID NO: 16393 - DNA, 2763 bp, Artificial Sequence
  derived and/or modified sequence
atggagcacggtacgcttttggcccagcctgggctctggacgagggacacctcttgggctttgctgtacttcctgtgctacatcttacctcaaacggcccctcaagttctaagaatcggagggatctttgagacagtagaaaatgagcctgtaaacgtggaggaactagcattcaagttcgctgttacttctattaaccgaaaccgtacccttatgcctaatacaactcttacctacgatatccagcggatcaacctgttcgacagcttcgaggcgtccaggcgtgcttgcgaccagctcgcgctcggagtggcagccttattcggaccaagccatagctcctcggtgagcgccgtgcaatcaatttgtaatgcgcttgaagtaccccacatccagacccggtggaaacatcctagtgtagataataaggatctgttttatatcaatctgtatccggactacgctgcaatctcaagggccattttagatttggtgttatactataattggaagactgtgactgttgtgtacgaggactccaccggtttgattaggctgcaggaattgattaaagccccatcaagatacaatatcaaaataaagattaggcaacttccaagcggcaataaagacgcaaagccactcctaaaggaaatgaagaagggcaaagaattttacgtaattttcgactgcagccatgaaaccgccgctgaaatcttaaaacagattttgttcatgggaatgatgacagagtattaccactactttttcacaacactcgatctcttcgctctcgacctggagctgtatcggtactcaggagtgaatatgaccggctttcggttgttgaatatcgacaacccacacgtttcatcaattattgaaaaatggtcaatggaacgactgcaggccccaccacggcccgagaccgggctcctggacggaatgatgactacagaagcagcattaatgtatgatgctgtgtacatggtggctatcgctagccacagggcttctcagttgaccgtgtcatcactgcagtgtcatcggcataagccatggcgactgggccccagattcatgaacttaattaaggaagcgactgcacgctgggacggcctgactggtcatattacgttcaacaaaacgaatggacttagaaaggactttgacctggacataatttcgttgaaggaggaggggactgagaaggcagccggcgaggttagtaaacatctgtacaaagtgtggaagaaaatcggtatttggaacagtaattcgggactcaacatgaccgattccaataaggataagtcgtccaacatcactgattctttggcaaacagaacccttatcgttaccacaattctcgaggagccttatgtgatgtatagaaagagtgacaaacccttatatggcaatgacagattcgaaggttactgtttggatctgttgaaagaactttctaatatcctcgggtttatttacgacgtgaagctcgtgcccgacggaaagtacggcgcccagaacgataagggcgagtggaacgggatggtgaaggaactgatagatcacagagcggaccttgcagtagcccctctgaccatcacctacgtgcgggagaaggtgatcgatttttctaagcccttcatgacactcggcatttccatactgtaccgcaaaccaaatggcaccaatccgggagtgttctcattcctgaacccattgtctccagatatttggatgtatgtcctgctcgcctgtctgggggtgagctgcgtgctattcgtgatcgcccgctttaccccctacgagtggtacaatcctcatccctgtaacccagactctgacgttgtcgagaacaacttcaccctcctgaatagtttctggtttggcgtcggggcgttgatgcagcagggaagcgaactgatgcctaaggctctttcaacccggattgtgggtgggatttggtggtttttcactttgataatcatcagttcctatactgccaatctcgccgcgttcctcaccgttgaaaggatggagtcaccgatagactccgccgacgaccttgcgaaacaaacaaaaatcgaatacggggccgtgagggacggaagcacaatgacattttttaagaagtccaagattagtacctatgagaagatgtgggcatttatgagctccaggcagcagaccgctcttgtcaggaactccgacgagggtattcagcgagtgctcacgaccgactacgccctattgatggaatcaactagtatcgagtatgtgacccagcgaaactgcaatctaacccaaattggcgggcttattgacagcaaaggttacggcgtgggcacccctattgggagtccttaccgcgacaagattacaatcgcgattctccaactgcaggaggagggcaaactccatatgatgaaagaaaaatggtggcgggggaatggttgtcctgaggaggacaataaagaagcctcagcattaggcgtcgagaatattggcggcatcttcatcgttctcgctgctggcctggtgttgagcgtgtttgtcgccataggcgaattcatttataaaagtcgaaaaaataacgatattgagcaggcattctgcttcttctacggcttgcagtgtaagcagactcacccgactaattctacaagcggtaccacattgtccaccgacctggagtgcgggaagttgatacgtgaggaaagaggtattcgcaagcagtcctctgtgcacaccgtctag

SEQ ID NO: 16394 - DNA, 2616 bp, Artificial Sequence
  derived and/or modified sequence
atggagcacggcactttgctggcgcagcccggattatggactcgcgacacgtcttgggcgctcctgtacttcctttgctacatcctaccacaaaccgcaccacaggtactgaggatcggtggcatattcgagactgtcgaaaatgagccagtgaatgtcgaggaacttgccttcaagttcgctgtgacttctataaacagaaaccgaacactcatgccgaacactaccctcacctacgacatccagaggatcaacctgttcgatagttttgaagcgtcccgaagagcatgcgaccaactggccctcggcgtcgccgctttgttcggcccaagccatagctctagcgtatctgccgttcagtccatttgcaacgctttagaagtgccgcacattcagactcggtggaaacacccatcggtggataataaagatcttttctatataaatctgtaccccgattatgctgccatatcaagggcgatactggaccttgtgttgtactacaattggaagaccgtgactgtggtctacgaggattccactggcctgattagactccaggagctgattaaggctccttcacgctataacatcaaaatcaagatccgacagctgcctagtggtaacaaagacgctaagcctctcctcaaagagatgaaaaagggcaaggaattctatgtgatcttcgattgttctcatgaaacagcagccgaaatcctgaagcagatccttttcatgggtatgatgacagagtattaccattacttcttcaccacactggatctcttcgctctcgatctagagttataccggtattctggagtcaacatgaccgggttccgattgttgaacattgataaccctcacgtaagcagtatcatcgaaaagtggtccatggagcgcctccaggccccacctaggcccgaaactgggctgctggatggcatgatgactacagaagctgcacttatgtatgacgccgtgtacatggtcgccatcgcctcacatagagcaagccagctaactgtgtctagccttcagtgtcatcgacacaaaccatggaggctcggcccccggttcatgaacctcatcaaagaagcacgttgggatggactcacagggcatatcactttcaataagacaaatggcctccgtaaggattttgatttagacatcataagcctgaaggaggaaggtacagaaaaagccgctggcgaagtgtctaagcacttgtacaaggtctggaagaaaatcggaatttggaactctaactctggcctaaacatgacggacagtaataaggacaaatcctccaatattacagattccttagctaatcgaaccttaatcgtcacaactattttggaggagccttacgtcatgtatagaaaatccgacaagccgctgtacgggaacgataggttcgagggctattgcctggacttgcttaaggagctgagcaacatccttggcttcatctacgacgttaagctggtgccggacggcaagtatggagcacagaatgacaaaggtgaatggaatggaatggtgaaggaactcatcgatcatagagctgatctggccgtggcacccctaaccattacatacgtgcgagagaaagtcatcgattttagtaagccattcatgacactgggcatctccatcctgtatcgaaaacccaatggaactaaccctggcgttttctcgtttttgaatcccctcagcccagacatatggatgtatgtgctcctggcttgcctaggtgtctcttgtgtcctttttgttatcgcgcgcttcacaccctatgaatggtacaatccacacccttgtaaccctgacagtgatgtggtggaaaacaattttactcttctgaactccttttggttcggagtgggcgccctcatgcagcagggctccgaactgatgccaaaggctctgtccaccagaattgtcggaggaatttggtggttctttactctaataattatcagttcctacacagctaaccttgctgcatttctcactgtggaaagaatggaatctcctatcgactcagcagatgacttggcaaagcagacgaagatagagtacggggctgtgagggacggctcgaccatgaccttctttaaaaaaagcaagatctccacctacgagaagatgtgggcatttatgtcttcacgacagcagacagcactggttcgcaatagcgacgagggcattcaacgagtgctcaccacagattacgctctcctaatggaatcaacctccatcgagtatgtcacacagaggaactgtaatctaactcagatcggtggactgatcgatagtaaagggtatggtgttgggactcccatcggctctccttatcgtgataaaatcaccattgccatactgcagctgcaagaagaaggtaagttgcacatgatgaaggagaaatggtggcgaggcaacgggtgtcctgaggaagataacaaagaggcgtctgcattgggcgtggaaaatattggtggtattttcattgtgcttgctgccggtctggttctgtctgttttcgtggccatcggcgagttcatctacaagtctaggaagaataacgatattgagcagcactactag

SEQ ID NO: 16395 - DNA, 2757 bp, Artificial Sequence
  derived and/or modified sequence
atggaacatggcacactgctggcacagcctggactgtggaccagagatacgtcatgggctctgttatacttcttgtgttatatccttcctcagactgcccctcaggtattacggatcggcggaatcttcgaaacggtggaaaatgaaccagtcaatgtggaagagttagctttcaaattcgccgtgacaagcataaatcgtaatcgtactctgatgccgaatactacgctgacgtatgacatccaacggataaatctgttcgattccttcgaggcctcaagacgtgcctgcgatcagctggccctcggtgtagctgcgctcttcggccccagtcattcatcttccgtatcagctgtccagtctatctgcaacgccctggaggtgccacacatccaaacacgctggaagcatccctcagtcgataataaggaccttttctacattaatctctaccccgattacgccgcaataagccgggctatccttgatctggtcctttattataactggaagaccgtaacagtcgtgtacgaggattctaccggcctcatccgacttcaggaactgatcaaggccccttcccgctacaacatcaaaatcaagatcagacaactgccaagtggcaataaggatgctaaacctctgctgaaagagatgaagaagggaaaagagttttacgtgatctttgattgtagtcatgagaccgcagccgagatcttgaagcagatactgttcatgggcatgatgaccgaatattaccattactttttcacaaccctggacctattcgcactggatttggaattataccggtactctggagtaaacatgaccggctttcgactccttaatatcgataatccccatgtgtcatccattattgaaaaatggtccatggagagattgcaggctcccccacggccagagaccggacttctggacggcatgatgaccaccgaagcagcgctgatgtacgatgcggtttatatggttgcaatcgctagtcatagagcctcacagttaacagtgagctctctgcagtgccataggcacaagccatggagattgggaccaagattcatgaacctgataaaagaagcgcgatgggacggacttaccggccatatcacttttaataagactaacggtctgcgcaaagacttcgacctcgatataatctccctgaaagaagaggggacagaaaaagccgctggagaagtgtcaaagcacctctataaggtctggaaaaagatcggaatttggaacagtaactcgggactaaacatgactgattccaacaaggacaagagctccaatatcaccgactccctcgccaataggactctcatcgttactaccattctggaggagccctacgtcatgtataggaaatctgacaagcctctgtatggcaacgaccgctttgaaggatactgcctcgatctgctgaaggaattaagtaatatcctgggtttcatctacgatgtcaagcttgttccagacggaaagtatggtgctcaaaatgacaagggagaatggaacggaatggtgaaagaactgatagatcacagagcagacctcgcagtagccccacttactataacatatgtgagagaaaaagtgattgatttttcaaagccctttatgactcttggaatttcaattctctatcgaaagccaaacgggacaaacccaggcgtcttttcttttctgaatccactgtcccctgacatttggatgtacgtcctcctcgcgtgtttaggagtgtcatgcgttctgtttgtaatcgcccgatttaccccatacgaatggtataacccccacccctgtaatcctgattctgatgtggtggaaaataatttcaccctgctgaattcattctggttcggagtcggtgccctcatgcagcagggaagtgagttaatgcctaaggcactgagcacgcgcatcgtgggcggcatttggtggttcttcacactgattattatttcctcatacactgccaatttggcagcctttctgactgtggagcgtatggaatccccaatcgacagcgcagacgatcttgcaaaacagacaaagattgaatacggagccgtccgtgacggctccacgatgactttcttcaaaaagagcaaaatcagtacttacgaaaagatgtgggcattcatgagtagcagacagcaaactgcccttgtaaggaactccgatgaggggatccaacgggtcctcactaccgactatgccctactgatggagtcaacgtcgattgaatatgtgacccagcgcaattgcaatcttacccagatcgggggactcatagactctaagggctacggtgtgggcactccgataggttcaccctaccgcgacaaaataaccattgctatccttcagctgcaggaagaaggtaagttgcacatgatgaaagagaaatggtggcgaggcaatggatgccccgaagaggacaacaaggaggcaagtgctctcggcgtggaaaatattggcggaatatttattgtgctggctgccggactagtgctctctgtgtttgtggctatcggcgaatttatttataagagtcggaagaataatgacattgagcaggccttctgttttttttatggactgcagtgcaagcagactcacccaactaactctacatctggaacaaccctgtcgacagacctcgagtgcgggaagctgattcgggaagagcgaggcatcaggaaacagtcttccgttcatacagtttag

SEQ ID NO: 16396 - DNA, 2763 bp, Artificial Sequence
  derived and/or modified sequence
atggagcacggcacactcctcgcccagcccgggctctggaccagggacaccagctgggcactcctctatttcctctgctatatcctccctcagaccgccccgcaagtactcaggatcggagggatttttgaaacagtggaaaatgagcctgttaatgttgaagaattagctttcaagtttgcagtcaccagcattaacagaaaccgaaccctgatgcctaacaccacattaacctatgacatccagagaattaacctttttgatagttttgaagcctcgcggagagcatgtgaccagctggctcttggtgtggctgctctctttggcccttcccatagctcctccgtcagtgctgtgcagtctatttgcaatgctctcgaagttccacacatacagacccgctggaaacacccctcggtggacaacaaagatttgttttacatcaacctttacccagattatgcagctatcagcagggcgatcctggatctggtcctctattacaactggaaaacagtgacagtggtgtatgaagacagcacaggtctaattcgtctacaagagctcatcaaagctccctccagatataatattaaaatcaaaatccgccagctgccctctgggaataaagatgccaagcctttactcaaggagatgaagaaaggcaaggagttctatgtgatatttgattgttcacatgaaacagccgctgaaatccttaagcagattctgttcatgggcatgatgaccgagtactatcactactttttcacaaccctggacttatttgctttggatctggaactctataggtacagtggcgtaaacatgaccgggtttcggctgcttaacattgacaaccctcacgtgtcatccatcattgagaagtggtccatggagagactgcaggccccacccaggcccgagactggccttttggatggcatgatgacaactgaagcggctctgatgtacgatgctgtgtacatggtggccattgcctcgcaccgggcatcccagctgaccgtcagctccctgcagtgccatagacataagccatggcgcctcggacccagatttatgaacctgatcaaagaggcaactgcccggtgggatggcttgactgggcatatcacctttaataaaaccaatggcttgaggaaggattttgatctggacattattagtctcaaagaggaaggaactgaaaaggctgctggcgaagtgtctaaacacttgtataaagtgtggaagaagattgggatttggaattccaacagtgggcttaacatgacggacagcaacaaagacaagtccagcaatatcactgattcattggccaacagaacactcattgtcaccaccattctggaagaaccctatgttatgtacaggaaatctgataagcctctatatggaaatgacagatttgaaggatattgcctagacctgttgaaagaattgtcaaacatcctgggtttcatttatgatgttaaactagttcccgatggcaaatatggggcccagaatgacaaaggggagtggaacgggatggttaaagaactcatagatcacagggctgacctggcagtggctcctcttaccatcacctacgtgcgggagaaagtcattgacttctccaaacccttcatgaccctaggcatcagcattctctaccggaagcccaatggtaccaatccaggcgttttctccttcctcaaccccctgtctccagatatttggatgtatgtgctcttagcctgcttgggagtcagctgtgtactctttgtgattgcaaggtttacaccctacgagtggtataacccccacccatgcaaccctgactcagacgtggtggaaaacaattttactttactaaatagtttctggtttggagttggagctctcatgcagcaaggatcagagctgatgcccaaagctctatcgaccagaatagttggagggatatggtggtttttcaccctaatcatcatttcatcctacacggccaatctggctgccttcttgacagtagagagaatggaatcccccatagattcggcagatgatctggcaaagcaaaccaagatagaatatggggcggttagagatggatcaacaatgaccttcttcaagaaatcaaaaatctccacctatgagaagatgtgggctttcatgagcagcaggcagcagaccgccctggtaagaaacagtgatgaggggatccagagagtgctcaccacagactacgcgctgctgatggagtccaccagcattgagtatgtgacgcagagaaactgcaacctcactcagatcgggggcctcattgactccaaaggttacggagtgggaacacctattggttctccttaccgggataaaattactattgctattcttcaactccaagaagaagggaagctgcatatgatgaaagagaagtggtggcgtgggaatggctgccccgaggaagacaacaaagaagccagtgccctgggagtggaaaatattggaggcatcttcattgttctggctgccggactggtcctttctgtatttgtagctattggagaattcatatacaaatcacggaagaataatgatattgaacaggctttttgtttcttttatggactgcaatgtaagcaaacccatccaaccaactccacttctggaactactttatctacggatttagaatgtggtaaattaattcgagaggagagagggattcgaaaacagtcctcagttcatactgtgtaa

SEQ ID NO: 16397 - DNA, 2712 bp, Artificial Sequence
  derived and/or modified sequence
tgtatctcggcatgaattaagaagctaggaagatggagcacggcacactcctcgcccagcccgggctctggaccagggacaccagctgggcactcctctatttcctctgctatatcctccctcagaccgccccgcaagtactcaggatcggagggatttttgaaacagtggaaaatgagcctgttaatgttgaagaattagctttcaagtttgcagtcaccagcattaacagaaaccgaaccctgatgcctaacaccacattaacctatgacatccagagaattaacctttttgatagttttgaagcctcgcggagagcatgtgaccagctggctcttggtgtggctgctctctttggcccttcccatagctcctccgtcagtgctgtgcagtctatttgcaatgctctcgaagttccacacatacagacccgctggaaacacccctcggtggacaacaaagatttgttttacatcaacctttacccagattatgcagctatcagcagggcgatcctggatctggtcctctattacaactggaaaacagtgacagtggtgtatgaagacagcacaggtctaattcgtctacaagagctcatcaaagctccctccagatataatattaaaatcaaaatccgccagctgccctctgggaataaagatgccaagcctttactcaaggagatgaagaaaggcaaggagttctatgtgatatttgattgttcacatgaaacagccgctgaaatccttaagcagattctgttcatgggcatgatgaccgagtactatcactactttttcacaaccctggacttatttgctttggatctggaactctataggtacagtggcgtaaacatgaccgggtttcggctgcttaacattgacaaccctcacgtgtcatccatcattgagaagtggtccatggagagactgcaggccccacccaggcccgagactggccttttggatggcatgatgacaactgaagcggctctgatgtacgatgctgtgtacatggtggccattgcctcgcaccgggcatcccagctgaccgtcagctccctgcagtgccatagacataagccatggcgcctcggacccagatttatgaacctgatcaaagaggcccggtgggatggcttgactgggcatatcacctttaataaaaccaatggcttgaggaaggattttgatctggacattattagtctcaaagaggaaggaactgaaaaggctgctggcgaagtgtctaaacacttgtataaagtgtggaagaagattgggatttggaattccaacagtgggcttaacatgacggacagcaacaaagacaagtccagcaatatcactgattcattggccaacagaacactcattgtcaccaccattctggaagaaccctatgttatgtacaggaaatctgataagcctctatatggaaatgacagatttgaaggatattgcctagacctgttgaaagaattgtcaaacatcctgggtttcatttatgatgttaaactagttcccgatggcaaatatggggcccagaatgacaaaggggagtggaacgggatggttaaagaactcatagatcacagggctgacctggcagtggctcctcttaccatcacctacgtgcgggagaaagtcattgacttctccaaacccttcatgaccctaggcatcagcattctctaccggaagcccaatggtaccaatccaggcgttttctccttcctcaaccccctgtctccagatatttggatgtatgtgctcttagcctgcttgggagtcagctgtgtactctttgtgattgcaaggtttacaccctacgagtggtataacccccacccatgcaaccctgactcagacgtggtggaaaacaattttactttactaaatagtttctggtttggagttggagctctcatgcagcaaggatcagagctgatgcccaaagctctatcgaccagaatagttggagggatatggtggtttttcaccctaatcatcatttcatcctacacggccaatctggctgccttcttgacagtagagagaatggaatcccccatagattcggcagatgatctggcaaagcaaaccaagatagaatatggggcggttagagatggatcaacaatgaccttcttcaagaaatcaaaaatctccacctatgagaagatgtgggctttcatgagcagcaggcagcagaccgccctggtaagaaacagtgatgaggggatccagagagtgctcaccacagactacgcgctgctgatggagtccaccagcattgagtatgtgacgcagagaaactgcaacctcactcagatcgggggcctcattgactccaaaggttacggagtgggaacacctattggttctccttaccgggataaaattactattgctattcttcaactccaagaagaagggaagctgcatatgatgaaagagaagtggtggcgtgggaatggctgccccgaggaagacaacaaagaagccagtgccctgggagtggaaaatattggaggcatcttcattgttctggctgccggactggtcctttctgtatttgtagctattggagaattcatatacaaatcacggaagaataatgatattgaacagcattactgaagtgtccgtatgccttgataatcctatcaatgtttggatcatctcagtgggggaaatgacttaa

SEQ ID NO: 16398 - DNA, 3472 bp, Artificial Sequence
  derived and/or modified sequence
ctttcccccttttccctcctctgtctgtgcctatcccccgacttttgcatctgaccaaaggacgaatgagggagacgttcctgcagatcggggcagcaactttcctcagctggtctctgggctccgggagccagagagcgctgatcctccgcggtctgcggcccatggaagaggaggaggaggagccgtgatgggctagcgacagcactgaggagccccgagagagctcagccttgccagccagctccgcggtcccacgcgggttccctcgagctcgctccgtggggagcgcgcagcgtgcttggaaccggagcatccagagaggatgaggcggggacccggcccaagttgggtgcatctctcgggcgtccggcagcggctgtatctcggcatgaattaagaagctaggaagatggagcacggcacactcctcgcccagcccgggctctggaccagggacaccagctgggcactcctctatttcctctgctatatcctccctcagaccgccccgcaagtactcaggatcggagggatttttgaaacagtggaaaatgagcctgttaatgttgaagaattagctttcaagtttgcagtcaccagcattaacagaaaccgaaccctgatgcctaacaccacattaacctatgacatccagagaattaacctttttgatagttttgaagcctcgcggagagcatgtgaccagctggctcttggtgtggctgctctctttggcccttcccatagctcctccgtcagtgctgtgcagtctatttgcaatgctctcgaagttccacacatacagacccgctggaaacacccctcggtggacaacaaagatttgttttacatcaacctttacccagattatgcagctatcagcagggcgatcctggatctggtcctctattacaactggaaaacagtgacagtggtgtatgaagacagcacaggtctaattcgtctacaagagctcatcaaagctccctccagatataatattaaaatcaaaatccgccagctgccctctgggaataaagatgccaagcctttactcaaggagatgaagaaaggcaaggagttctatgtgatatttgattgttcacatgaaacagccgctgaaatccttaagcagattctgttcatgggcatgatgaccgagtactatcactactttttcacaaccctggacttatttgctttggatctggaactctataggtacagtggcgtaaacatgaccgggtttcggctgcttaacattgacaaccctcacgtgtcatccatcattgagaagtggtccatggagagactgcaggccccacccaggcccgagactggccttttggatggcatgatgacaactgaagcggctctgatgtacgatgctgtgtacatggtggccattgcctcgcaccgggcatcccagctgaccgtcagctccctgcagtgccatagacataagccatggcgcctcggacccagatttatgaacctgatcaaagaggcccggtgggatggcttgactgggcatatcacctttaataaaaccaatggcttgaggaaggattttgatctggacattattagtctcaaagaggaaggaactgaaaaggctgctggcgaagtgtctaaacacttgtataaagtgtggaagaagattgggatttggaattccaacagtgggcttaacatgacggacagcaacaaagacaagtccagcaatatcactgattcattggccaacagaacactcattgtcaccaccattctggaagaaccctatgttatgtacaggaaatctgataagcctctatatggaaatgacagatttgaaggatattgcctagacctgttgaaagaattgtcaaacatcctgggtttcatttatgatgttaaactagttcccgatggcaaatatggggcccagaatgacaaaggggagtggaacgggatggttaaagaactcatagatcacagggctgacctggcagtggctcctcttaccatcacctacgtgcgggagaaagtcattgacttctccaaacccttcatgaccctaggcatcagcattctctaccggaagcccaatggtaccaatccaggcgttttctccttcctcaaccccctgtctccagatatttggatgtatgtgctcttagcctgcttgggagtcagctgtgtactctttgtgattgcaaggtttacaccctacgagtggtataacccccacccatgcaaccctgactcagacgtggtggaaaacaattttactttactaaatagtttctggtttggagttggagctctcatgcagcaaggatcagagctgatgcccaaagctctatcgaccagaatagttggagggatatggtggtttttcaccctaatcatcatttcatcctacacggccaatctggctgccttcttgacagtagagagaatggaatcccccatagattcggcagatgatctggcaaagcaaaccaagatagaatatggggcggttagagatggatcaacaatgaccttcttcaagaaatcaaaaatctccacctatgagaagatgtgggctttcatgagcagcaggcagcagaccgccctggtaagaaacagtgatgaggggatccagagagtgctcaccacagactacgcgctgctgatggagtccaccagcattgagtatgtgacgcagagaaactgcaacctcactcagatcgggggcctcattgactccaaaggttacggagtgggaacacctattggttctccttaccgggataaaattactattgctattcttcaactccaagaagaagggaagctgcatatgatgaaagagaagtggtggcgtgggaatggctgccccgaggaagacaacaaagaagccagtgccctgggagtggaaaatattggaggcatcttcattgttctggctgccggactggtcctttctgtatttgtagctattggagaattcatatacaaatcacggaagaataatgatattgaacaggctttttgtttcttttatggactgcaatgtaagcaaacccatccaaccaactccacttctggaactactttatctacggatttagaatgtggtaaattaattcgagaggagagagggattcgaaaacagtcctcagttcatactgtgtaatcagtttaaaaaaaaaaaaaaagatgtgcccagtagaaaatgtttttgctaattggtgttgttgatatttgtatttgctaagcataaatagccacaattctctattcctttaggatagcaaaactcatgtattctagacattgaaatgaatacactggaaagatacttgcactgtatgttgaagcaggggcatattaggggtataaagacttctagaaatgtgtatttacaggaatcttctctgtcccactcatcatcttagttctatcttcatgcattaaaaataagtaactcttccttcat

SEQ ID NO: 16399 - DNA, 2763 bp, Artificial Sequence
  derived and/or modified sequence
atggagcacggcaccctgctggcccagcccggcctgtggacccgggacacctcctgggccctgctgtacttcctgtgctacatcctgccccagacagccccccaggtgctgagaattggaggcatctttgaaacagtggagaatgaacctgtgaatgtggaggagctggccttcaagtttgctgtgaccagcatcaacagaaacagaaccctgatgcccaacaccaccctgacctatgacatccagaggatcaacctgtttgacagctttgaggccagccggcgggcctgtgaccagctggccctgggcgtggccgccctgtttggccccagccacagcagctctgtgtctgctgtgcagagcatctgcaatgccctggaggtgccccacatccagacccgctggaagcaccccagcgtggacaacaaggacctcttctacatcaacctgtacccagactatgctgccatcagccgggccatcctggacctggtgctgtactacaactggaagacagtgacagtggtgtatgaggacagcacaggcctcatccggctgcaggagctgatcaaggcccccagccgctacaacatcaagatcaagatccggcagctgcccagcggcaacaaggatgccaagcccctgctgaaggagatgaagaagggcaaggagttctacgtgatctttgactgcagccatgaaacagctgctgagatcctgaagcagatcctcttcatgggcatgatgacagagtactaccactacttcttcaccaccctggacctgtttgccctggacctggagctgtaccgctacagcggcgtgaacatgacaggcttccggctgctgaacatcgacaacccccacgtgagcagcatcatcgagaagtggagcatggagcggctgcaggccccacccaggcctgagaccggcctgctggatggcatgatgaccacagaagctgccctgatgtatgatgctgtgtacatggtggccatcgccagccaccgggccagccagctgactgtgagcagcctgcagtgccaccgccacaagccctggaggctgggcccccgcttcatgaacctgatcaaggaggccacagcccgctgggatggcctgaccggccacatcaccttcaacaagaccaacggcctgaggaaggactttgacctggacatcatcagcctgaaggaggagggcacagagaaggccgccggggaggtgtccaagcacctgtacaaggtgtggaagaagattggcatctggaacagcaacagcggcctgaacatgacagacagcaacaaggacaagagcagcaacatcacagacagcctggccaacagaaccctcatcgtgaccaccatcctggaggagccctacgtgatgtacaggaagagtgacaagcccctgtatggaaatgacagatttgagggctactgcctggacctgctgaaggagctgagcaacatcctgggcttcatctatgatgtgaagctggtgcctgatggcaagtacggggcccagaatgacaagggggagtggaatggcatggtgaaggagctgattgaccacagagctgacctggccgtggcccccctgaccatcacctacgtgcgggagaaggtgattgacttcagcaagcccttcatgaccctgggcatcagcatcctgtacaggaagcccaacggcaccaaccctggggtcttctccttcctgaaccccctgagcccagacatctggatgtatgtgctgctggcctgcctgggcgtgtcctgtgtgctcttcgtcatcgcccgcttcaccccctatgagtggtacaacccccacccctgcaacccagacagtgatgtggtggagaacaacttcaccctgctgaacagcttctggtttggagtgggcgccctgatgcagcagggcagcgagctgatgcccaaggccctgagcacccgcatcgtgggcggcatctggtggttcttcaccctcatcatcatcagcagctacacagccaacctggccgccttcctgactgtggagaggatggagagccccattgattctgcagatgacctggccaagcagaccaagattgaatatggagctgtgagagatggcagcaccatgaccttcttcaagaagagcaagatcagcacctatgagaagatgtgggccttcatgagcagccggcagcagacagccctggtgaggaacagtgatgagggcatccagagggtgctgaccacagattatgccctgctgatggagagcaccagcattgaatatgtgacccagaggaactgcaacctgacccagatcggcggcctgattgacagcaagggctatggagtgggcacccccatcggcagcccctacagagacaagatcaccatcgccatcctgcagctgcaggaggagggcaagctgcacatgatgaaggagaagtggtggagaggaaatggctgcccagaggaggacaacaaggaggccagcgccctgggcgtggagaacattggaggcatcttcatcgtgctggccgccggcctggtgctgtctgtgtttgtggccatcggggagttcatctacaagagcaggaagaacaatgacatcgagcaggccttctgcttcttctacggcctgcagtgcaagcagacccaccccaccaacagcaccagcggcaccaccctgagcacagacctggagtgtgggaagctgatccgggaggagcggggcatcaggaagcagagctctgtgcacacagtgtag

SEQ ID NO: 16400 - DNA, 2616 bp, Artificial Sequence
  derived and/or modified sequence
atggagcacggcaccctgctggcccagcccggcctgtggacccgggacacctcctgggccctgctgtacttcctgtgctacatcctgccccagacagccccccaggtgctgagaattggaggcatctttgaaacagtggagaatgaacctgtgaatgtggaggagctggccttcaagtttgctgtgaccagcatcaacagaaacagaaccctgatgcccaacaccaccctgacctatgacatccagaggatcaacctgtttgacagctttgaggccagccggcgggcctgtgaccagctggccctgggcgtggccgccctgtttggccccagccacagcagctctgtgtctgctgtgcagagcatctgcaatgccctggaggtgccccacatccagacccgctggaagcaccccagcgtggacaacaaggacctcttctacatcaacctgtacccagactatgctgccatcagccgggccatcctggacctggtgctgtactacaactggaagacagtgacagtggtgtatgaggacagcacaggcctcatccggctgcaggagctgatcaaggcccccagccgctacaacatcaagatcaagatccggcagctgcccagcggcaacaaggatgccaagcccctgctgaaggagatgaagaagggcaaggagttctacgtgatctttgactgcagccatgaaacagctgctgagatcctgaagcagatcctcttcatgggcatgatgacagagtactaccactacttcttcaccaccctggacctgtttgccctggacctggagctgtaccgctacagcggcgtgaacatgacaggcttccggctgctgaacatcgacaacccccacgtgagcagcatcatcgagaagtggagcatggagcggctgcaggccccacccaggcctgagaccggcctgctggatggcatgatgaccacagaagctgccctgatgtatgatgctgtgtacatggtggccatcgccagccaccgggccagccagctgactgtgagcagcctgcagtgccaccgccacaagccctggaggctgggcccccgcttcatgaacctgatcaaggaggcccgctgggatggcctgaccggccacatcaccttcaacaagaccaacggcctgaggaaggactttgacctggacatcatcagcctgaaggaggagggcacagagaaggccgccggggaggtgtccaagcacctgtacaaggtgtggaagaagattggcatctggaacagcaacagcggcctgaacatgacagacagcaacaaggacaagagcagcaacatcacagacagcctggccaacagaaccctcatcgtgaccaccatcctggaggagccctacgtgatgtacaggaagagtgacaagcccctgtatggaaatgacagatttgagggctactgcctggacctgctgaaggagctgagcaacatcctgggcttcatctatgatgtgaagctggtgcctgatggcaagtacggggcccagaatgacaagggggagtggaatggcatggtgaaggagctgattgaccacagagctgacctggccgtggcccccctgaccatcacctacgtgcgggagaaggtgattgacttcagcaagcccttcatgaccctgggcatcagcatcctgtacaggaagcccaacggcaccaaccctggggtcttctccttcctgaaccccctgagcccagacatctggatgtatgtgctgctggcctgcctgggcgtgtcctgtgtgctcttcgtcatcgcccgcttcaccccctatgagtggtacaacccccacccctgcaacccagacagtgatgtggtggagaacaacttcaccctgctgaacagcttctggtttggagtgggcgccctgatgcagcagggcagcgagctgatgcccaaggccctgagcacccgcatcgtgggcggcatctggtggttcttcaccctcatcatcatcagcagctacacagccaacctggccgccttcctgactgtggagaggatggagagccccattgattctgcagatgacctggccaagcagaccaagattgaatatggagctgtgagagatggcagcaccatgaccttcttcaagaagagcaagatcagcacctatgagaagatgtgggccttcatgagcagccggcagcagacagccctggtgaggaacagtgatgagggcatccagagggtgctgaccacagattatgccctgctgatggagagcaccagcattgaatatgtgacccagaggaactgcaacctgacccagatcggcggcctgattgacagcaagggctatggagtgggcacccccatcggcagcccctacagagacaagatcaccatcgccatcctgcagctgcaggaggagggcaagctgcacatgatgaaggagaagtggtggagaggaaatggctgcccagaggaggacaacaaggaggccagcgccctgggcgtggagaacattggaggcatcttcatcgtgctggccgccggcctggtgctgtctgtgtttgtggccatcggggagttcatctacaagagcaggaagaacaatgacatcgagcagcactactag

SEQ ID NO: 16401 - DNA, 2757 bp, Artificial Sequence
  derived and/or modified sequence
atggagcacggcaccctgctggcccagcccggcctgtggacccgggacacctcctgggccctgctgtacttcctgtgctacatcctgccccagacagccccccaggtgctgagaattggaggcatctttgaaacagtggagaatgaacctgtgaatgtggaggagctggccttcaagtttgctgtgaccagcatcaacagaaacagaaccctgatgcccaacaccaccctgacctatgacatccagaggatcaacctgtttgacagctttgaggccagccggcgggcctgtgaccagctggccctgggcgtggccgccctgtttggccccagccacagcagctctgtgtctgctgtgcagagcatctgcaatgccctggaggtgccccacatccagacccgctggaagcaccccagcgtggacaacaaggacctcttctacatcaacctgtacccagactatgctgccatcagccgggccatcctggacctggtgctgtactacaactggaagacagtgacagtggtgtatgaggacagcacaggcctcatccggctgcaggagctgatcaaggcccccagccgctacaacatcaagatcaagatccggcagctgcccagcggcaacaaggatgccaagcccctgctgaaggagatgaagaagggcaaggagttctacgtgatctttgactgcagccatgaaacagctgctgagatcctgaagcagatcctcttcatgggcatgatgacagagtactaccactacttcttcaccaccctggacctgtttgccctggacctggagctgtaccgctacagcggcgtgaacatgacaggcttccggctgctgaacatcgacaacccccacgtgagcagcatcatcgagaagtggagcatggagcggctgcaggccccacccaggcctgagaccggcctgctggatggcatgatgaccacagaagctgccctgatgtatgatgctgtgtacatggtggccatcgccagccaccgggccagccagctgactgtgagcagcctgcagtgccaccgccacaagccctggaggctgggcccccgcttcatgaacctgatcaaggaggcccgctgggatggcctgaccggccacatcaccttcaacaagaccaacggcctgaggaaggactttgacctggacatcatcagcctgaaggaggagggcacagagaaggccgccggggaggtgtccaagcacctgtacaaggtgtggaagaagattggcatctggaacagcaacagcggcctgaacatgacagacagcaacaaggacaagagcagcaacatcacagacagcctggccaacagaaccctcatcgtgaccaccatcctggaggagccctacgtgatgtacaggaagagtgacaagcccctgtatggaaatgacagatttgagggctactgcctggacctgctgaaggagctgagcaacatcctgggcttcatctatgatgtgaagctggtgcctgatggcaagtacggggcccagaatgacaagggggagtggaatggcatggtgaaggagctgattgaccacagagctgacctggccgtggcccccctgaccatcacctacgtgcgggagaaggtgattgacttcagcaagcccttcatgaccctgggcatcagcatcctgtacaggaagcccaacggcaccaaccctggggtcttctccttcctgaaccccctgagcccagacatctggatgtatgtgctgctggcctgcctgggcgtgtcctgtgtgctcttcgtcatcgcccgcttcaccccctatgagtggtacaacccccacccctgcaacccagacagtgatgtggtggagaacaacttcaccctgctgaacagcttctggtttggagtgggcgccctgatgcagcagggcagcgagctgatgcccaaggccctgagcacccgcatcgtgggcggcatctggtggttcttcaccctcatcatcatcagcagctacacagccaacctggccgccttcctgactgtggagaggatggagagccccattgattctgcagatgacctggccaagcagaccaagattgaatatggagctgtgagagatggcagcaccatgaccttcttcaagaagagcaagatcagcacctatgagaagatgtgggccttcatgagcagccggcagcagacagccctggtgaggaacagtgatgagggcatccagagggtgctgaccacagattatgccctgctgatggagagcaccagcattgaatatgtgacccagaggaactgcaacctgacccagatcggcggcctgattgacagcaagggctatggagtgggcacccccatcggcagcccctacagagacaagatcaccatcgccatcctgcagctgcaggaggagggcaagctgcacatgatgaaggagaagtggtggagaggaaatggctgcccagaggaggacaacaaggaggccagcgccctgggcgtggagaacattggaggcatcttcatcgtgctggccgccggcctggtgctgtctgtgtttgtggccatcggggagttcatctacaagagcaggaagaacaatgacatcgagcaggccttctgcttcttctacggcctgcagtgcaagcagacccaccccaccaacagcaccagcggcaccaccctgagcacagacctggagtgtgggaagctgatccgggaggagcggggcatcaggaagcagagctctgtgcacacagtgtag

SEQ ID NO: 16402 - DNA, 2763 bp, Artificial Sequence
  derived and/or modified sequence
atggagcacggcaccctgctggcccagcccggcctgtggacccgggacacgtcatgggccctgctgtactttttgtgttacatacttccccagactgctccacaggtcttgaggatcggagggatctttgagacagtggagaatgaaccggtaaacgtggaggagctagctttcaaattcgccgttacttctatcaaccggaatcggaccttaatgcccaacacaactctaacctatgatatccagagaataaacttgtttgactcattcgaggcctccagaagagcctgcgatcagcttgcgctaggggtggccgccctgttcgggcccagccatagtagctcagtgtcagctgttcagtccatatgcaatgcccttgaagtgccccacattcagaccagatggaaacatccaagcgtggataacaaggacttattttatatcaatctgtacccggactatgccgccatttctagagcgattctggacctagttctgtattataactggaaaaccgttactgttgtctatgaggattcaacaggcctcatacgcctacaggagttgatcaaggcacccagtagatacaacattaagattaaaatccgacaactaccatccgggaataaagacgctaaacccctcctgaaagaaatgaaaaaggggaaagaattctatgtgattttcgactgcagccacgagaccgctgctgagatcttgaaacagatactgtttatgggaatgatgactgaatattaccactatttctttaccacactcgacttgttcgccctcgatctggaactgtatcggtattctggagtgaatatgacgggtttccggcttctcaatattgacaacccacatgtcagctctattattgagaagtggtcaatggaacgcttgcaggctcctccgagacctgagaccgggctgttagatggaatgatgacaacagaagcagctctgatgtacgatgcggtatatatggtggctattgctagccatcgtgcctctcaactaacagtgtcttccctccagtgccatagacacaaaccttggcgccttggcccccgcttcatgaatctgattaaagaggctacagcgcggtgggatggattgactggtcacatcactttcaacaaaaccaatggtctccggaaggatttcgacctggatattatcagtcttaaggaggaaggcacggagaaagccgccggcgaggtgagcaaacatctttacaaggtctggaagaagattggcatctggaactcaaattccgggcttaacatgacggacagcaacaaggataagtcatcaaatattaccgactccctggctaacagaactctcatagtgactaccatcctcgaagaaccctatgtgatgtaccgcaaatccgacaagccactgtatggcaacgataggtttgagggctattgcctcgacttgctcaaggagttgagtaacatcctgggattcatttacgacgtcaaactggttcctgacggtaaatatggggctcagaatgataaaggcgagtggaatggtatggtgaaggagctgatcgatcatagagctgatctggctgtggcaccactgacaataacatacgtcagggagaaggtgatcgacttttcaaagccatttatgacactgggaatctcaattctctatcggaagccaaatggaacaaatcccggcgtcttttcatttctcaacccattgagccccgacatctggatgtacgtcctcttagcctgcctcggcgtctcctgtgtgcttttcgtcattgcccgttttaccccatatgagtggtataatcctcacccgtgtaaccctgacagcgacgttgtggagaacaactttacgctactgaattccttctggttcggggtcggggccctgatgcagcagggctccgaacttatgccaaaagctctttctacacgtatcgtcggggggatttggtggttttttaccttgatcatcattagctcttatacggctaacctggccgcgttcttaaccgtggagcggatggaatctccgattgacagcgcagacgatctcgcaaagcagaccaagatcgagtatggtgccgtaagggatggcagtactatgaccttcttcaagaagtctaagatctccacgtatgagaagatgtgggcctttatgagctctcggcagcagactgcactggtcagaaactctgacgaggggatccaaagagtgcttacgactgactatgccctgctgatggagtccaccagcattgagtatgtaacccagcgcaattgcaatctgactcagattggaggactcatcgactctaaggggtacggtgtaggcaccccgatcggatctccttaccgtgacaagattactattgcaattctgcagttacaggaggaaggtaaactgcacatgatgaaagaaaagtggtggagaggcaatgggtgccctgaggaggacaataaagaagcctctgccctcggcgtggaaaatattggcggcatatttatcgtgctcgctgccggtctggtgctgtccgtgtttgtggcaatcggcgagttcatctataaatctcgaaagaacaacgacattgagcaagctttctgcttcttctatggcttgcagtgtaaacaaacgcaccctaccaactcaacgagcggcacaacgctgtccactgatttggagtgtggaaagctgatccgggaggaacgggggattagaaaacaatcatctgtacatacggtctag

SEQ ID NO: 16403 - DNA, 2616 bp, Artificial Sequence
  derived and/or modified sequence
atggagcacggcaccctgctggcccagcccggcctgtggacccgggatacgtcctgggctctgctgtattttctgtgctacatcttgccacagacagcaccacaagtgttgcgcattggaggaatctttgagacagtagaaaacgaaccagtcaatgtcgaagagctggcctttaaattcgcagtcacgagcatcaaccggaaccgaactttgatgccgaataccacgctgacttatgatatccagcggatcaacctgttcgatagttttgaggcctctcgacgagcctgtgatcagctcgcactgggtgtcgcagcactttttggccccagccactcgtcttcagtgtccgctgttcaatcaatctgcaacgcactggaagtcccccacattcaaacgcgatggaagcaccccagcgttgataacaaggatctgttttatatcaatttgtatccagactatgctgccatatcccgcgccatcctggaccttgttctctactacaattggaaaaccgtgacagtcgtatacgaagacagcaccggactcatcaggctgcaggagctcattaaagctcccagcagatataatataaaaattaaaatccgacagctgccctccggaaacaaggatgctaaaccactattaaaggaaatgaagaagggaaaggaattttacgtaattttcgattgttcacacgagactgctgccgagattctgaagcagatcctctttatgggtatgatgactgaatactaccactacttctttaccaccctggacctcttcgcacttgatcttgaactgtaccgatacagcggagtgaatatgactggatttagattactgaatatcgataacccgcacgtaagttcgatcattgaaaagtggtccatggagagactccaagctcctccccggcctgagacagggctgttagatggcatgatgacgacggaggcagcgctgatgtacgatgccgtctacatggtggccattgccagccaccgtgccagccaactgacagtgagcagcctgcagtgccatagacataagccgtggcgcctgggtccacggttcatgaacttgatcaaagaggctcggtgggacgggctgacgggccacattaccttcaataagaccaatggcctccgcaaagatttcgatctagacatcatttccctgaaggaggaagggacagaaaaagctgcgggtgaggtcagcaagcatttgtacaaggtgtggaaaaagatcgggatttggaatagtaattcggggttgaatatgacagactccaataaggataagtcctcaaatattacagattcgctcgccaataggactcttatagtaaccactattcttgaagaaccatatgtgatgtaccgcaaaagcgacaagcccctgtacgggaatgatagattcgaaggctactgcctcgatctgctgaaagagctttcgaacattctgggttttatctatgatgtgaagttggtgccagatggaaaatacggcgcccagaatgacaagggtgagtggaacgggatggtgaaagagctgattgatcaccgtgctgacctggcagtggcccccctgaccatcacctacgtgcgagagaaagtgatagatttttcgaaaccatttatgacactaggaatctctatcttgtacagaaaaccaaacggtactaaccctggcgtgtttagtttcctgaacccgctgtcccctgacatctggatgtacgtcctgctggcttgcctcggggtcagttgcgtccttttcgtgatcgcgcgcttcacaccatatgaatggtataacccacatccctgtaacccggatagcgatgtggtcgagaataatttcacactccttaatagtttttggttcggtgtgggcgctctcatgcagcaggggtccgagctaatgccaaaagccctttccacgaggatagttggcgggatctggtggttctttaccctgatcatcatctcaagctatactgccaacctggctgcttttctcacagtcgaacggatggagtcccctattgactctgccgatgacctggcaaagcagaccaagatagagtatggagctgtaagggacggcagcaccatgactttttttaaaaaatccaagatcagcacctacgagaagatgtgggcatttatgagtagccgacaacagacagccctggtccgcaattctgacgaaggtattcagcgtgtgctcaccactgactatgctctgttgatggaaagtacgtctattgagtatgtcacacagcgcaattgcaatctcacccagattggaggacttatcgattcgaagggctacggtgtgggaactcctattggcagtccttatcgggacaaaattactatcgcgattctccagctgcaggaggaggggaagttacatatgatgaaagaaaagtggtggcggggcaacggatgtccggaggaggataataaagaagcctcagccctgggtgtggaaaacattggcggtatttttattgtgctggccgctggtctggtgttatccgtatttgtcgccattggggagtttatctacaaatcccgaaagaacaatgatatcgaacagcactactag

SEQ ID NO: 16404 - DNA, 2757 bp, Artificial Sequence
  derived and/or modified sequence
atggagcacggcaccctgctggcccagcccggcctgtggacccgggacacatcatgggccttgctgtactttctctgctacatcctcccacagactgcaccccaggtactgcgcattggggggatattcgaaaccgtagaaaatgaaccagtcaacgtggaggaactggcatttaagtttgcggtcacttctattaatagaaacagaacacttatgccaaacactactcttacatacgatatacaacgcatcaatttattcgactctttcgaagcttctcgacgcgcttgcgaccagctcgccttgggcgttgcagcattgttcggaccatcgcactctagctccgtgtcagcggtgcaaagcatctgtaatgctctggaagttcctcatatccaaacacgctggaaacacccctcagtcgacaataaagatcttttctacatcaacttgtatcctgactacgccgctatttccagggccattctggatcttgtgctgtattataattggaagaccgtgaccgtggtgtacgaggatagtacagggcttatcagactgcaggagctgatcaaggccccatcgcgatacaatatcaagatcaagatccgtcagctgccaagcgggaataaggacgccaaaccgttgttgaaggagatgaaaaaaggtaaagagttctatgtgatctttgattgctcacatgagacagccgccgagattctgaaacagattctgttcatgggcatgatgacagagtattatcactacttttttacaactctggacctgttcgccctggatttggaactgtaccgatactctggagtaaacatgacaggattccgtcttctaaacatcgataatccacacgtgagttccattatagagaaatggagcatggaacgactgcaggcccctcctcgccctgaaaccggcctgctcgatgggatgatgactaccgaagcggcattaatgtacgatgccgtgtacatggtcgccatagcttctcacagagcaagccagctcacggttagctctcttcaatgtcaccgtcacaaaccctggcggctgggcccccgcttcatgaacctgataaaagaagcccggtgggacggactgactggccatatcacctttaacaagacaaatggtttgcgaaaggattttgatctggacatcatctctctgaaggaagaggggaccgagaaagcagcaggcgaggtcagcaagcacctgtacaaggtatggaaaaaaatcgggatatggaacagtaattccggactgaacatgaccgattctaataaggataagtcaagcaatatcaccgattcactcgcaaacagaacattaattgttactacaatattagaagagccgtatgtgatgtaccgcaagtctgataagccactgtacggcaacgacaggtttgagggatactgtctggaccttcttaaagaacttagtaacatcctggggtttatttacgacgtgaagcttgtgcccgatggaaaatatggtgcccaaaatgataaaggcgaatggaacggcatggtgaaggaactcatagaccatcgcgccgatctggcagtcgccccactgactataacatacgtgcgtgaaaaggtcattgactttagcaagcctttcatgacactgggcatatcgatactttatagaaaacctaatggtaccaatcccggggtgttctccttcctcaaccctttgagcccagacatatggatgtatgtgctacttgcctgccttggcgtcagttgtgtgctctttgtgattgctcgatttaccccatatgaatggtataatcctcacccttgtaacccggattccgatgtagtagaaaacaatttcactttattgaacagtttctggtttggagtaggcgccctcatgcagcaaggaagcgaactgatgccaaaagccctgtcgacacgcatcgtagggggcatctggtggtttttcaccctcatcataatcagcagttacacagcgaacctggcggcgttccttacagttgagcggatggaaagtccaatagactctgctgatgaccttgccaagcagactaagatagagtatggcgcagtgagagatggtagcacgatgacattctttaaaaagagtaagatctccacatatgagaaaatgtgggcctttatgtctagccggcagcagaccgcactggtgagaaacagcgatgaggggattcagcgggtgctgactaccgactacgcccttctgatggaaagcacgagcatcgagtatgtcacccagcgaaattgcaacctgacgcagattggaggcctgattgattcaaaagggtacggagtcgggacacccattggatccccttacagagacaagattaccatcgccatcctacagcttcaagaagagggtaaactgcatatgatgaaagaaaaatggtggaggggcaatggctgccctgaggaggacaacaaagaggcctctgccctgggagtggagaatattggggggattttcatagtattggctgcgggacttgtgctgtcagtcttcgttgccatcggtgaattcatctataaaagcaggaagaacaacgacattgagcaagctttctgcttcttctacggcctccagtgcaagcagacacaccccactaacagtacttccggcactacacttagtactgatctggagtgtggcaaactgattcgcgaggaacgaggaattcgcaagcagtcaagtgttcataccgtttag

SEQ ID NO: 16405 - DNA, 2763 bp, Artificial Sequence
  derived and/or modified sequence
atggagcatggaaccctgcttgcccagcccggattgtggaccagagacacttcatgggcgttgctttactttttgtgctacatcttgccccagactgccccacaagtgcttcggatcggcggaatctttgagaccgtggaaaacgaacctgtcaatgtggaagaactagcgttcaagttcgccgtgaccagcatcaacagaaatcggacgcttatgccaaacaccacactaacatacgacatccaaaggattaatctgtttgacagcttcgaggccagccgccgagcgtgcgaccagttagctttgggcgtagccgcactgtttggcccaagccactcttcctccgtgagcgccgttcagtcaatttgtaatgctttagaagtcccgcacattcagacacggtggaaacaccccagtgtcgacaacaaagacctgttttacattaacctgtacccagactatgctgcaatatctcgcgctatattggatctggtgttgtactacaactggaaaaccgtcactgtcgtttatgaagattcaacaggattgatacgcctgcaggaacttattaaggctcccagccgatataacatcaagatcaaaattcgccagctgccatccggcaacaaggacgcgaagcctttgttaaaggagatgaagaagggcaaagagttttacgtcatttttgactgtagtcacgagacagcagcagagatactcaagcagatactgtttatgggcatgatgacagagtattaccattatttcttcaccacccttgacctctttgctctggatctcgagctgtacagatactctggcgttaatatgaccggttttcggctacttaatatcgacaacccacacgtaagcagcattattgaaaagtggagcatggaacggctccaggcccctcctagacctgagactggcctgctggacgggatgatgacaacggaggctgccctgatgtatgacgctgtatatatggtagctattgcctctcatcgcgcatcccaattgacggtttcctcattgcaatgccaccggcacaaaccctggaggctgggtcctcgtttcatgaatttgatcaaagaggctaccgcccgatgggacggcctcactgggcacattacttttaataaaaccaatggcctgaggaaagacttcgacctggacatcataagtctgaaggaagaaggcacggaaaaggccgcaggcgaggtgtcgaagcacctctacaaggtctggaaaaagatcggcatttggaattctaactccggcctgaatatgactgacagcaacaaagacaaatcctcaaacatcaccgattccctggcaaaccggacactgatagtgaccactatccttgaggagccatatgtgatgtatcgcaagagtgacaaaccactgtacggcaacgatcgctttgaaggctattgtttggacctgcttaaggagctctcaaatatactgggatttatttacgatgtgaagctggtgccagatggaaagtacggtgctcagaacgataagggggagtggaacggcatggtaaaggaattgattgaccatcgagctgatctggctgtggcccctctgactattacatacgtccgcgagaaagtgatagacttcagcaagccttttatgacgttagggatttctatattgtatcgcaagcctaacggcactaatcccggtgtgtttagctttttaaaccccctgtcccccgatatctggatgtacgtcctgctggcttgcttgggcgtgagctgtgtgttatttgtcattgcccgattcacaccctatgagtggtacaatccacacccgtgtaacccggacagcgatgtcgtcgaaaacaatttcacactcctcaattcattctggttcggcgtgggagccctaatgcagcagggctccgagctgatgcccaaggctctgtcaactagaatagtggggggaatttggtggttttttactcttatcatcattagcagctatactgctaatctggctgcttttttgacagtggaaagaatggaatctccgattgacagtgcggatgatttggccaagcagaccaagattgagtacggtgctgtcagggacggaagtacaatgacattcttcaagaaatcaaagatctccacatacgaaaaaatgtgggccttcatgagttcccgacaacagactgcgttggtccgaaactccgatgaaggtattcagagagtgcttaccactgactatgccttactaatggaatcaacttccattgagtacgtgacacagcggaactgcaacttaacacagattggagggcttattgattccaagggctatggtgttggtacacctataggcagcccctatcgagacaaaatcactatagctatactgcagctgcaggaggagggcaagctgcacatgatgaaggagaagtggtggcggggtaatggatgtccggaagaagacaacaaggaagcgtctgccctgggggtggaaaacattggaggcatcttcatcgtgctcgcagccggtctggttttaagcgtatttgtcgctatcggcgaatttatttacaaaagcagaaaaaataatgacattgaacaagcattctgctttttctatggtctgcagtgcaaacagacacaccccactaatagtacttcaggtaccactctgagcacggacctcgaatgtgggaagctgattcgggaggagagagggattaggaagcagagttctgtgcacaccgtttag

SEQ ID NO: 16406 - DNA, 2616 bp, Artificial Sequence
  derived and/or modified sequence
atggagcacggcacattgctggcccagcccggtctttggacacgcgatactagctgggcccttctctacttcctgtgctatattctgcctcagacggccccacaggtgctcaggatcggcggaatatttgaaactgtggagaatgagcctgtgaacgtggaggagctggccttcaaatttgccgtgacgtctataaatcggaatcgcacactgatgcctaatacgacacttacatacgatatacaacgcatcaatctctttgacagcttcgaagcaagtcgaagagcatgcgatcaactagccttgggtgtggcagccctgtttggaccaagccactcctcctccgtgagtgcagtgcagtccatctgcaatgccttagaggttccccacattcagacccgctggaagcacccctccgtagacaataaggacctcttttatattaacctgtaccccgactacgccgcaatttctcgagcaatcttggacctcgtgctgtattacaactggaagactgtgaccgttgtctacgaagattccaccggcctgatccgactgcaggagctgatcaaagccccttctcgttacaacattaagatcaagatccgccagctgcccagcggaaacaaggacgcaaagccactcctaaaggagatgaagaaaggtaaagaattttatgtgatcttcgattgctcacacgaaaccgctgcggaaatcttgaaacagattctgtttatggggatgatgacggagtattatcattacttttttacaacgctggacttatttgcactagacctcgagttgtatagatattccggagttaacatgacagggtttaggctccttaatatagacaatccacatgttagcagcataatcgaaaagtggtcaatggagcgtctccaggcgccacccagacctgaaaccggactgttggacggaatgatgacaacggaagccgcactgatgtacgatgctgtctacatggtggctatcgccagccaccgggctagccagctcaccgtctcttcactccagtgccacaggcataaaccttggcgccttggaccccgattcatgaacctgattaaggaggccagatgggatggcctgacgggtcacatcaccttcaacaaaacaaacggattgagaaaggactttgatctggatataatcagccttaaagaagagggaactgagaaagcagcaggcgaagtttccaaacatttatacaaggtgtggaagaagatcgggatttggaactccaacagcggtctgaacatgacagatagcaacaaggacaagagttcaaacattaccgactcactggccaacagaactctgatcgttacaaccattctcgaagagccctacgttatgtatcgcaaatcagataagcccctgtacggcaatgaccgcttcgagggttattgtctggatctccttaaggaactgtctaatattctgggtttcatttacgacgttaaactggtgcctgacgggaagtacggggctcagaacgacaaaggtgaatggaatgggatggtgaaagaattgattgatcacagagctgatttggcagtcgcacccctgactattacatatgtgagagagaaagtcatcgacttcagcaagccatttatgaccttggggatatcgattctgtataggaaacccaatggtacaaaccccggtgttttctcgttcctcaatcctctgagtcctgatatctggatgtatgtacttttggcatgtctcggcgtgtcgtgcgtgctgttcgtaattgccaggtttacaccatacgagtggtataatcctcacccctgcaatccagatagtgatgtggtcgagaacaacttcaccctgctaaattcattctggttcggtgtgggagctcttatgcagcagggctccgagcttatgcctaaggcgttatccactcgcattgtcggcggaatctggtggttctttaccctgattattatttctagctataccgccaatctagccgcattcctgacagttgagaggatggaaagtccaatagactctgcagatgatctggccaaacaaaccaagatcgaatatggggctgttagagatgggagtacaatgaccttttttaagaaatcgaaaattagtacatacgaaaagatgtgggcttttatgtcgagcagacagcagaccgcgttagtgaggaatagcgatgaagggatccagcgagttctgactacagattacgcgcttctcatggagtccacgtccattgaatacgtcactcagcgcaattgtaacctaactcagattggcggactgatcgactctaaggggtatggtgtagggacccctattggctctccttacagggataagattacaattgcaattctgcagctgcaggaagaagggaagctgcacatgatgaaggagaagtggtggcgagggaacggctgcccagaggaggataacaaggaggccagcgccctgggcgttgagaacattgggggaatatttattgtgttggcagccggattggtgttgtctgtgttcgtggctatcggcgagttcatctacaaaagccgaaagaacaacgacattgagcagcattactag

SEQ ID NO: 16407 - DNA, 2757 bp, Artificial Sequence
  derived and/or modified sequence
atggagcacggtacgctgctcgcccagccagggttgtggaccagggatacgagctgggccttgctgtactttttgtgttacatcctcccacagacagctcctcaggtgctgagaatcggcggaattttcgaaacagtagagaacgaacctgtcaacgtggaagagctggcatttaaatttgccgtgaccagcatcaaccgcaacaggaccctcatgcctaacacaacgctgacttatgacatacagaggattaatctgtttgacagcttcgaggctagccgcagagcctgtgatcagcttgccttgggagtcgccgcactgtttggcccttcacactcatcatcagtgtcggcggtccagtcgatctgtaatgccctggaggtcccccatattcaaacaagatggaagcacccgagcgtcgacaataaggacctgttttatatcaacctgtatccagactatgccgctatcagtcgcgctatactcgacttggtgctctactacaattggaaaaccgtcacagtagtctatgaggattctaccggcctcattaggctgcaggaactcattaaggctccttctcgatacaatattaaaataaagattagacaacttccttcgggcaataaggatgccaagcctttattgaaggagatgaagaaaggcaaagaattttacgtgatttttgactgcagccacgagacagccgctgagatcctgaaacaaatcctctttatgggcatgatgacagagtattatcactatttttttacaacgctagacctttttgccctggatctcgaactgtaccggtacagcggggttaatatgaccgggtttagacttttaaatattgataatcctcatgtgtctagcatcatcgagaagtggtcgatggagaggctgcaagcacctccccgtcccgagactggcctcctcgacggcatgatgacaacagaagcggcactgatgtacgatgcggtttacatggtcgcaatcgcttctcaccgtgcctctcaactcacagtttcctccttgcagtgtcatcgccacaaaccatggcgactggggcctagatttatgaatttaattaaggaagcccgatgggacggactaactggtcacattacattcaataaaactaatggtttgaggaaagacttcgatctggacattataagccttaaagaggagggcacagagaaagctgccggagaagtctctaagcacctgtataaagtttggaaaaaaataggaatttggaactcaaattcaggattgaatatgaccgattcaaacaaagacaagagctcaaacattactgactctctggctaatcgcacgttaatcgtgacaaccattctggaggaaccctacgtaatgtataggaagagcgacaagccactttatgggaatgaccggtttgaggggtactgtcttgacctcctgaaagaactgtctaacatcctgggttttatctacgacgttaagctcgttcccgacggcaagtacggcgcacagaatgacaagggagagtggaatggaatggtgaaggaattaatcgatcaccgggcagacttggccgtggccccactgacaatcacttacgtcagggaaaaagtcattgatttctctaagccgtttatgaccctggggatttccattctttacaggaagcccaacggcaccaaccccggtgtattttcttttctgaatccactgagtcccgacatctggatgtacgtgttgcttgcctgtctgggagtgtcttgtgtgctgttcgtaatagctcgattcacgccctacgagtggtataacccacacccttgcaacccagactctgatgttgtagagaacaacttcaccctgttaaattctttctggttcggcgtcggagctctcatgcagcagggctccgaactaatgccaaaagctttgagcactcgcattgtggggggtatttggtggttttttacacttatcatcatttcttcttacactgcaaatttagccgctttcctcaccgtagagaggatggaatcaccgatagacagtgctgatgatttggccaagcagactaagatcgagtacggcgctgtacgggacggaagcactatgactttcttcaaaaagtcgaaaatctcaacctatgaaaaaatgtgggcttttatgtcctcacggcaacagacagcccttgtgcggaatagcgacgaagggattcagcgggtccttaccactgattatgcactgctcatggaatcgacatccatcgaatacgtcacccaacgtaactgtaatctgacacagatcggaggtcttatcgacagcaagggttacggagtcggtacgccaattggctcaccctatagagacaaaattaccatagctatcctgcagcttcaggaggagggaaagctccacatgatgaaggaaaagtggtggagaggtaacggttgccctgaagaggacaataaggaggccagtgccctcggagtggaaaacattggcggaatctttatcgtattggcagcaggtctggtcctgtcggtgttcgtcgccattggcgagttcatctataaaagccggaagaataatgacattgagcaggcattctgtttcttttacggcttacagtgtaaacagacacatcccaccaactctaccagtgggacaactctctccaccgacctcgagtgcggaaaactgatcagagaggaaagagggattcgcaagcagagtagtgttcataccgtgtag

SEQ ID NO: 16408 - DNA, 2763 bp, Artificial Sequence
  derived and/or modified sequence
atggagcacggcaccctgctggcccagcccggcctgtggaccagagacaccagctgggccctgctgtacttcctgtgctacatcctgccccagaccgccccccaggtgctgagaatcggcggcatcttcgagaccgtggagaacgagcccgtgaacgtggaggagctggccttcaagttcgccgtgaccagcatcaacagaaacagaaccctgatgcccaacaccaccctgacctacgacatccagagaatcaacctgttcgacagcttcgaggccagcagaagagcctgcgaccagctggccctgggcgtggccgccctgttcggccccagccacagcagcagcgtgagcgccgtgcagagcatctgcaacgccctggaggtgccccacatccagaccagatggaagcaccccagcgtggacaacaaggacctgttctacatcaacctgtaccccgactacgccgccatcagcagagccatcctggacctggtgctgtactacaactggaagaccgtgaccgtggtgtacgaggacagcaccggcctgatcagactgcaggagctgatcaaggcccccagcagatacaacatcaagatcaagatcagacagctgcccagcggcaacaaggacgccaagcccctgctgaaggagatgaagaagggcaaggagttctacgtgatcttcgactgcagccacgagaccgccgccgagatcctgaagcagatcctgttcatgggcatgatgaccgagtactaccactacttcttcaccaccctggacctgttcgccctggacctggagctgtacagatacagcggcgtgaacatgaccggcttcagactgctgaacatcgacaacccccacgtgagcagcatcatcgagaagtggagcatggagagactgcaggccccccccagacccgagaccggcctgctggacggcatgatgaccaccgaggccgccctgatgtacgacgccgtgtacatggtggccatcgccagccacagagccagccagctgaccgtgagcagcctgcagtgccacagacacaagccctggagactgggccccagattcatgaacctgatcaaggaggccaccgccagatgggacggcctgaccggccacatcaccttcaacaagaccaacggcctgagaaaggacttcgacctggacatcatcagcctgaaggaggagggcaccgagaaggccgccggcgaggtgagcaagcacctgtacaaggtgtggaagaagatcggcatctggaacagcaacagcggcctgaacatgaccgacagcaacaaggacaagagcagcaacatcaccgacagcctggccaacagaaccctgatcgtgaccaccatcctggaggagccctacgtgatgtacagaaagagcgacaagcccctgtacggcaacgacagattcgagggctactgcctggacctgctgaaggagctgagcaacatcctgggcttcatctacgacgtgaagctggtgcccgacggcaagtacggcgcccagaacgacaagggcgagtggaacggcatggtgaaggagctgatcgaccacagagccgacctggccgtggcccccctgaccatcacctacgtgagagagaaggtgatcgacttcagcaagcccttcatgaccctgggcatcagcatcctgtacagaaagcccaacggcaccaaccccggcgtgttcagcttcctgaaccccctgagccccgacatctggatgtacgtgctgctggcctgcctgggcgtgagctgcgtgctgttcgtgatcgccagattcaccccctacgagtggtacaacccccacccctgcaaccccgacagcgacgtggtggagaacaacttcaccctgctgaacagcttctggttcggcgtgggcgccctgatgcagcagggcagcgagctgatgcccaaggccctgagcaccagaatcgtgggcggcatctggtggttcttcaccctgatcatcatcagcagctacaccgccaacctggccgccttcctgaccgtggagagaatggagagccccatcgacagcgccgacgacctggccaagcagaccaagatcgagtacggcgccgtgagagacggcagcaccatgaccttcttcaagaagagcaagatcagcacctacgagaagatgtgggccttcatgagcagcagacagcagaccgccctggtgagaaacagcgacgagggcatccagagagtgctgaccaccgactacgccctgctgatggagagcaccagcatcgagtacgtgacccagagaaactgcaacctgacccagatcggcggcctgatcgacagcaagggctacggcgtgggcacccccatcggcagcccctacagagacaagatcaccatcgccatcctgcagctgcaggaggagggcaagctgcacatgatgaaggagaagtggtggagaggcaacggctgccccgaggaggacaacaaggaggccagcgccctgggcgtggagaacatcggcggcatcttcatcgtgctggccgccggcctggtgctgagcgtgttcgtggccatcggcgagttcatctacaagagcagaaagaacaacgacatcgagcaggccttctgcttcttctacggcctgcagtgcaagcagacccaccccaccaacagcaccagcggcaccaccctgagcaccgacctggagtgcggcaagctgatcagagaggagagaggcatcagaaagcagagcagcgtgcacaccgtgtag

SEQ ID NO: 16409 - DNA, 2616 bp, Artificial Sequence
  derived and/or modified sequence
atggagcacggcaccctgctggcccagcccggcctgtggaccagagacaccagctgggccctgctgtacttcctgtgctacatcctgccccagaccgccccccaggtgctgagaatcggcggcatcttcgagaccgtggagaacgagcccgtgaacgtggaggagctggccttcaagttcgccgtgaccagcatcaacagaaacagaaccctgatgcccaacaccaccctgacctacgacatccagagaatcaacctgttcgacagcttcgaggccagcagaagagcctgcgaccagctggccctgggcgtggccgccctgttcggccccagccacagcagcagcgtgagcgccgtgcagagcatctgcaacgccctggaggtgccccacatccagaccagatggaagcaccccagcgtggacaacaaggacctgttctacatcaacctgtaccccgactacgccgccatcagcagagccatcctggacctggtgctgtactacaactggaagaccgtgaccgtggtgtacgaggacagcaccggcctgatcagactgcaggagctgatcaaggcccccagcagatacaacatcaagatcaagatcagacagctgcccagcggcaacaaggacgccaagcccctgctgaaggagatgaagaagggcaaggagttctacgtgatcttcgactgcagccacgagaccgccgccgagatcctgaagcagatcctgttcatgggcatgatgaccgagtactaccactacttcttcaccaccctggacctgttcgccctggacctggagctgtacagatacagcggcgtgaacatgaccggcttcagactgctgaacatcgacaacccccacgtgagcagcatcatcgagaagtggagcatggagagactgcaggccccccccagacccgagaccggcctgctggacggcatgatgaccaccgaggccgccctgatgtacgacgccgtgtacatggtggccatcgccagccacagagccagccagctgaccgtgagcagcctgcagtgccacagacacaagccctggagactgggccccagattcatgaacctgatcaaggaggccagatgggacggcctgaccggccacatcaccttcaacaagaccaacggcctgagaaaggacttcgacctggacatcatcagcctgaaggaggagggcaccgagaaggccgccggcgaggtgagcaagcacctgtacaaggtgtggaagaagatcggcatctggaacagcaacagcggcctgaacatgaccgacagcaacaaggacaagagcagcaacatcaccgacagcctggccaacagaaccctgatcgtgaccaccatcctggaggagccctacgtgatgtacagaaagagcgacaagcccctgtacggcaacgacagattcgagggctactgcctggacctgctgaaggagctgagcaacatcctgggcttcatctacgacgtgaagctggtgcccgacggcaagtacggcgcccagaacgacaagggcgagtggaacggcatggtgaaggagctgatcgaccacagagccgacctggccgtggcccccctgaccatcacctacgtgagagagaaggtgatcgacttcagcaagcccttcatgaccctgggcatcagcatcctgtacagaaagcccaacggcaccaaccccggcgtgttcagcttcctgaaccccctgagccccgacatctggatgtacgtgctgctggcctgcctgggcgtgagctgcgtgctgttcgtgatcgccagattcaccccctacgagtggtacaacccccacccctgcaaccccgacagcgacgtggtggagaacaacttcaccctgctgaacagcttctggttcggcgtgggcgccctgatgcagcagggcagcgagctgatgcccaaggccctgagcaccagaatcgtgggcggcatctggtggttcttcaccctgatcatcatcagcagctacaccgccaacctggccgccttcctgaccgtggagagaatggagagccccatcgacagcgccgacgacctggccaagcagaccaagatcgagtacggcgccgtgagagacggcagcaccatgaccttcttcaagaagagcaagatcagcacctacgagaagatgtgggccttcatgagcagcagacagcagaccgccctggtgagaaacagcgacgagggcatccagagagtgctgaccaccgactacgccctgctgatggagagcaccagcatcgagtacgtgacccagagaaactgcaacctgacccagatcggcggcctgatcgacagcaagggctacggcgtgggcacccccatcggcagcccctacagagacaagatcaccatcgccatcctgcagctgcaggaggagggcaagctgcacatgatgaaggagaagtggtggagaggcaacggctgccccgaggaggacaacaaggaggccagcgccctgggcgtggagaacatcggcggcatcttcatcgtgctggccgccggcctggtgctgagcgtgttcgtggccatcggcgagttcatctacaagagcagaaagaacaacgacatcgagcagcactactag

SEQ ID NO: 16410 - DNA, 2757 bp, Artificial Sequence
  derived and/or modified sequence
atggagcacggcaccctgctggcccagcccggcctgtggaccagagacaccagctgggccctgctgtacttcctgtgctacatcctgccccagaccgccccccaggtgctgagaatcggcggcatcttcgagaccgtggagaacgagcccgtgaacgtggaggagctggccttcaagttcgccgtgaccagcatcaacagaaacagaaccctgatgcccaacaccaccctgacctacgacatccagagaatcaacctgttcgacagcttcgaggccagcagaagagcctgcgaccagctggccctgggcgtggccgccctgttcggccccagccacagcagcagcgtgagcgccgtgcagagcatctgcaacgccctggaggtgccccacatccagaccagatggaagcaccccagcgtggacaacaaggacctgttctacatcaacctgtaccccgactacgccgccatcagcagagccatcctggacctggtgctgtactacaactggaagaccgtgaccgtggtgtacgaggacagcaccggcctgatcagactgcaggagctgatcaaggcccccagcagatacaacatcaagatcaagatcagacagctgcccagcggcaacaaggacgccaagcccctgctgaaggagatgaagaagggcaaggagttctacgtgatcttcgactgcagccacgagaccgccgccgagatcctgaagcagatcctgttcatgggcatgatgaccgagtactaccactacttcttcaccaccctggacctgttcgccctggacctggagctgtacagatacagcggcgtgaacatgaccggcttcagactgctgaacatcgacaacccccacgtgagcagcatcatcgagaagtggagcatggagagactgcaggccccccccagacccgagaccggcctgctggacggcatgatgaccaccgaggccgccctgatgtacgacgccgtgtacatggtggccatcgccagccacagagccagccagctgaccgtgagcagcctgcagtgccacagacacaagccctggagactgggccccagattcatgaacctgatcaaggaggccagatgggacggcctgaccggccacatcaccttcaacaagaccaacggcctgagaaaggacttcgacctggacatcatcagcctgaaggaggagggcaccgagaaggccgccggcgaggtgagcaagcacctgtacaaggtgtggaagaagatcggcatctggaacagcaacagcggcctgaacatgaccgacagcaacaaggacaagagcagcaacatcaccgacagcctggccaacagaaccctgatcgtgaccaccatcctggaggagccctacgtgatgtacagaaagagcgacaagcccctgtacggcaacgacagattcgagggctactgcctggacctgctgaaggagctgagcaacatcctgggcttcatctacgacgtgaagctggtgcccgacggcaagtacggcgcccagaacgacaagggcgagtggaacggcatggtgaaggagctgatcgaccacagagccgacctggccgtggcccccctgaccatcacctacgtgagagagaaggtgatcgacttcagcaagcccttcatgaccctgggcatcagcatcctgtacagaaagcccaacggcaccaaccccggcgtgttcagcttcctgaaccccctgagccccgacatctggatgtacgtgctgctggcctgcctgggcgtgagctgcgtgctgttcgtgatcgccagattcaccccctacgagtggtacaacccccacccctgcaaccccgacagcgacgtggtggagaacaacttcaccctgctgaacagcttctggttcggcgtgggcgccctgatgcagcagggcagcgagctgatgcccaaggccctgagcaccagaatcgtgggcggcatctggtggttcttcaccctgatcatcatcagcagctacaccgccaacctggccgccttcctgaccgtggagagaatggagagccccatcgacagcgccgacgacctggccaagcagaccaagatcgagtacggcgccgtgagagacggcagcaccatgaccttcttcaagaagagcaagatcagcacctacgagaagatgtgggccttcatgagcagcagacagcagaccgccctggtgagaaacagcgacgagggcatccagagagtgctgaccaccgactacgccctgctgatggagagcaccagcatcgagtacgtgacccagagaaactgcaacctgacccagatcggcggcctgatcgacagcaagggctacggcgtgggcacccccatcggcagcccctacagagacaagatcaccatcgccatcctgcagctgcaggaggagggcaagctgcacatgatgaaggagaagtggtggagaggcaacggctgccccgaggaggacaacaaggaggccagcgccctgggcgtggagaacatcggcggcatcttcatcgtgctggccgccggcctggtgctgagcgtgttcgtggccatcggcgagttcatctacaagagcagaaagaacaacgacatcgagcaggccttctgcttcttctacggcctgcagtgcaagcagacccaccccaccaacagcaccagcggcaccaccctgagcaccgacctggagtgcggcaagctgatcagagaggagagaggcatcagaaagcagagcagcgtgcacaccgtgtag

SEQ ID NO: 16411 - protein, 885 aa, Artificial Sequence
  derived and/or modified sequence
MSTMRLLTLALLFSCSVARAACDPKIVNIGAVLSTRKHEQMFREAVNQANKRHGSWKIQLNATSVTHKPNAIQMALSVCEDLISSQVYAILVSHPPTPNDHFTPTPVSYTAGFYRIPVLGLTTRMSIYSDKSIHLSFLRTVPPYSHQSSVWFEMMRVYSWNHIILLVSDDHEGRAAQKRLETLLEERESKAEKVLQFDPGTKNVTALLMEAKELEARVIILSASEDDAATVYRAAAMLNMTGSGYVWLVGEREISGNALRYAPDGILGLQLINGKNESAHISDAVGVVAQAVHELLEKENITDPPRGCVGNTNIWKTGPLFKRVLMSSKYADGVTGRVEFNEDGDRKFANYSIMNLQNRKLVQVGIYNGTHVIPNDRKIIWPGGETEKPRGYQMSTRLKIVTIHQEPFVYVKPTLSDGTCKEEFTVNGDPVKKVICTGPNDTSPGSPRHTVPQCCYGFCIDLLIKLARTMNFTYEVHLVADGKFGTQERVNNSNKKEWNGMMGELLSGQADMIVAPLTINNERAQYIEFSKPFKYQGLTILVKKEIPRSTLDSFMQPFQSTLWLLVGLSVHVVAVMLYLLDRFSPFGRFKVNSEEEEEDALTLSSAMWFSWGVLLNSGIGEGAPRSFSARILGMVWAGFAMIIVASYTANLAAFLVLDRPEERITGINDPRLRNPSDKFIYATVKQSSVDIYFRRQVELSTMYRHMEKHNYESAAEAIQAVRDNKLHAFIWDSAVLEFEASQKCDLVTTGELFFRSGFGIGMRKDSPWKQNVSLSILKSHENGFMEDLDKTWVRYQECDSRSNAPATLTFENMAGVFMLVAGGIVAGIFLIFIEIAYKRHKDARRKQMQLAFAAVNVWRKNLQQYHPTDITGPLNLSDPSVSTVV

SEQ ID NO: 16412 - DNA, 2658 bp, Artificial Sequence
  derived and/or modified sequence
atgagcacaatgagacttctgacactggcgctcctgtttagttgtagtgtggccagagccgcttgtgatccaaagatcgttaacattggtgcggtcttgagcacacgaaagcatgaacagatgttccgggaggctgtgaaccaggccaataaacgccacggcagttggaagattcagctcaatgctacctctgtaacccataagcccaatgcaattcagatggctttatccgtctgcgaagatctcattagttcacaagtgtatgcgattctagtgagccatcctcccactccgaatgaccattttacccctactcccgtgagttacacagccggattctaccgcatcccagtactcggactgacaacccggatgtctatctattccgacaagtccattcacttatccttcctgcgaacggtccccccgtacagtcaccagtcttctgtatggtttgagatgatgagagtgtattcttggaatcacattattttgcttgtgagcgacgatcatgaaggtagagcagcccaaaaacgcctcgagactctgctcgaggaacgtgagtcgaaggccgaaaaggttcttcagttcgaccctgggacgaagaacgtgacagcgctcctgatggaagccaaagaacttgaggcacgcgtgatcatcctgtcggcctccgaggacgatgccgccactgtctacagagctgctgcaatgctcaacatgaccggcagcggctacgtgtggttggtcggcgagagggaaatttcagggaatgcattacgttacgcacccgatggtatccttggattgcaacttatcaacggcaaaaatgaaagtgcacatatttctgacgcagtgggcgtggtcgcccaggctgtccatgagctgttggaaaaagagaatattaccgacccaccccgggggtgcgtcgggaataccaatatttggaagactggaccgctgtttaaaagagtgctgatgagctcaaaatatgctgacggcgtgaccgggcgcgtggaattcaatgaagacggcgaccgcaagtttgctaactattccattatgaacctacagaaccgcaagcttgtccaagtcgggatctataacggcacccacgttatcccgaacgaccgcaagatcatttggcccggaggagagaccgagaagcccaggggttatcagatgtccaccagactcaagatagtgactatccatcaggaacccttcgtgtacgtgaaaccgacactttccgacggtacctgcaaggaggaatttactgtgaacggcgatccggttaagaaggtcatctgcactgggccgaatgatacaagccccggatccccacgtcatactgtccctcagtgttgttacggcttttgcattgatttgcttatcaagttggcaagaacaatgaattttacatatgaagtacatctggtcgccgatggaaagtttggcacacaggaacgggtgaataattccaacaagaaggaatggaacggaatgatgggagagttactttccggacaggcagatatgatcgtagctccattgaccataaacaatgagagggcccaatatatcgaattttccaaacctttcaagtaccaagggctgaccatattggtgaagaaggagatcccccgctccactttagacagctttatgcagcccttccagtccactctctggcttctcgtgggcctgagcgtgcatgtggttgcagtgatgctgtatctgttggaccgatttagtcccttcggaagattcaaggtgaattccgaagaggaggaggaagatgcactaactctaagcagcgcaatgtggttttcgtggggcgtactccttaacagtggtatcggggagggtgccccaagatctttcagcgcaaggattctgggaatggtgtgggcaggatttgctatgattatcgtggcctcttacacagcaaacctggcggcgtttctggtgctggatcggccagaggagagaatcacgggaatcaacgacccacgattaaggaacccctccgataagttcatctacgctactgttaagcagtcttcagttgatatttatttccgccgacaggtcgagctatcaacgatgtaccgtcatatggagaaacataactacgagtcagccgccgaagctatacaagctgtgagagataacaagctccatgctttcatctgggactccgcagtgctggagttcgaagcgagtcagaaatgtgacctggtgaccacaggtgagctgttctttagaagtggatttggcataggcatgcgtaaggatagcccatggaaacagaatgttagcctctccatcctcaagtctcacgagaacggctttatggaagacctcgacaagacctgggttaggtaccaggagtgcgacagtcggtccaacgctccagctacattgacatttgaaaacatggctggggtcttcatgttggtggctgggggaatcgtggccggaatcttcttgatatttattgaaatcgcatataaacggcacaaagatgctcggcggaaacagatgcagcttgctttcgccgccgttaatgtgtggaggaaaaacttacagcagtaccacccgaccgatatcaccgggcccctgaacttaagtgatccctccgtttccacagtggtgtag

SEQ ID NO: 16413 - DNA, 3577 bp, Artificial Sequence
  derived and/or modified sequence
gagcccatgagcaccatgcgcctgctgacgctcgccctgctgttctcctgctccgtcgcccgtgccgcgtgcgaccccaagatcgtcaacattggcgcggtgctgagcacgcggaagcacgagcagatgttccgcgaggccgtgaaccaggccaacaagcggcacggctcctggaagattcagctcaatgccacctccgtcacgcacaagcccaacgccatccagatggctctgtcggtgtgcgaggacctcatctccagccaggtctacgccatcctagttagccatccacctacccccaacgaccacttcactcccacccctgtctcctacacagccggcttctaccgcatacccgtgctggggctgaccacccgcatgtccatctactcggacaagagcatccacctgagcttcctgcgcaccgtgccgccctactcccaccagtccagcgtgtggtttgagatgatgcgtgtctacagctggaaccacatcatcctgctggtcagcgacgaccacgagggccgggcggctcagaaacgcctggagacgctgctggaggagcgtgagtccaaggcagagaaggtgctgcagtttgacccagggaccaagaacgtgacggccctgctgatggaggcgaaagagctggaggcccgggtcatcatcctttctgccagcgaggacgatgctgccactgtataccgcgcagccgcgatgctgaacatgacgggctccgggtacgtgtggctggtcggcgagcgcgagatctcggggaacgccctgcgctacgccccagacggcatcctcgggctgcagctcatcaacggcaagaacgagtcggcccacatcagcgacgccgtgggcgtggtggcccaggccgtgcacgagctcctcgagaaggagaacatcaccgacccgccgcggggctgcgtgggcaacaccaacatctggaagaccgggccgctcttcaagagagtgctgatgtcttccaagtatgcggatggggtgactggtcgcgtggagttcaatgaggatggggaccggaagttcgccaactacagcatcatgaacctgcagaaccgcaagctggtgcaagtgggcatctacaatggcacccacgtcatccctaatgacaggaagatcatctggccaggcggagagacagagaagcctcgagggtaccagatgtccaccagactgaagattgtgacgatccaccaggagcccttcgtgtacgtcaagcccacgctgagtgatgggacatgcaaggaggagttcacagtcaacggcgacccagtcaagaaggtgatctgcaccgggcccaacgacacgtcgccgggcagcccccgccacacggtgcctcagtgttgctacggcttttgcatcgacctgctcatcaagctggcacggaccatgaacttcacctacgaggtgcacctggtggcagatggcaagttcggcacacaggagcgggtgaacaacagcaacaagaaggagtggaatgggatgatgggcgagctgctcagcgggcaggcagacatgatcgtggcgccgctaaccataaacaacgagcgcgcgcagtacatcgagttttccaagcccttcaagtaccagggcctgactattctggtcaagaaggagattccccggagcacgctggactcgttcatgcagccgttccagagcacactgtggctgctggtggggctgtcggtgcacgtggtggccgtgatgctgtacctgctggaccgcttcagccccttcggccggttcaaggtgaacagcgaggaggaggaggaggacgcactgaccctgtcctcggccatgtggttctcctggggcgtcctgctcaactccggcatcggggaaggcgcccccagaagcttctcagcgcgcatcctgggcatggtgtgggccggctttgccatgatcatcgtggcctcctacaccgccaacctggcggccttcctggtgctggaccggccggaggagcgcatcacgggcatcaacgaccctcggctgaggaacccctcggacaagtttatctacgccacggtgaagcagagctccgtggatatctacttccggcgccaggtggagctgagcaccatgtaccggcatatggagaagcacaactacgagagtgcggcggaggccatccaggccgtgagagacaacaagctgcatgccttcatctgggactcggcggtgctggagttcgaggcctcgcagaagtgcgacctggtgacgactggagagctgtttttccgctcgggcttcggcataggcatgcgcaaagacagcccctggaagcagaacgtctccctgtccatcctcaagtcccacgagaatggcttcatggaagacctggacaagacgtgggttcggtatcaggaatgtgactcgcgcagcaacgcccctgcgacccttacttttgagaacatggccggggtcttcatgctggtagctgggggcatcgtggccgggatcttcctgattttcatcgagattgcctacaagcggcacaaggatgctcgccggaagcagatgcagctggcctttgccgccgttaacgtgtggcggaagaacctgcagcagtaccatcccactgatatcacgggcccgctcaacctctcagatccctcggtcagcaccgtggtgtgaggcccccggaggcgcccacctgcccagttagcccggccaaggacactgatgggtcctgctgctcgggaaggcctgagggaagcccacccgccccagagactgcccaccctgggcctcccgtccgtccgcccgcccaccccgctgcctggcgggcagcccctgctggaccaaggtgcggaccggagcggctgaggacggggcagagctgagtcggctgggcagggccgcagggcgctccggcagaggcagggccctggggtctctgagcagtggggagcgggggctaactggccccaggcggaggggcttggagcagagacggcagccccatccttcccgcagcaccagcctgagccacagtggggcccatggccccagctggctgggtcgcccctcctcgggcgcctgcgctcctctgcagcctgagctccaccctcccctcttcttgcggcaccgcccacccacaccccgtctgccccttgaccccacacgccggggctggccctgccctcccccacggccgtccctgacttcccagctggcagcgcctcccgccgcctcgggccgcctcctccagactcgagagggctgagcccctcctctcctcgtccggcctgcagcccagaacgggcctccccgggggtccccggacgctggctcgggactgtcttcaaccctgccctgcaccttgggcacgggagagcgccacccgcccgcccccgccctcgctccgggtgcgtgaccggcccgccaccttgtacagaaccagcactcccagggcccgagcgcgtgccttccccgtgcggcccgtgcgcagccgcgctctgcccctccgtccccagggtgcaggcgcgcaccgcccaacccccacctcccggtgtatgcagtggtgatgcctaaaggaatgtcacgc

SEQ ID NO: 16414 - DNA, 2658 bp, Artificial Sequence
  derived and/or modified sequence
atgagcaccatgaggctgctgaccctggccctgctcttcagctgcagcgtggcccgggccgcctgtgaccccaagatcgtgaacattggagctgtgctgagcaccaggaagcatgagcagatgttccgggaggccgtgaaccaggccaacaagagacatggctcctggaagatccagctgaatgccacctctgtgacccacaagcccaatgccatccagatggccctgtctgtgtgtgaggacctgatcagcagccaggtgtatgccatcctggtgagccacccccccaccccaaatgaccacttcacccccacccctgtgtcctacacagctggcttctaccgcatccctgtgctgggcctgaccaccaggatgagcatctacagcgacaagagcatccacctgtccttcctgaggacagtgcccccctacagccaccagagctctgtgtggtttgagatgatgagggtgtacagctggaaccacatcatcctgctggtgtctgatgaccacgagggccgggccgcccagaagaggctggagaccctgctggaggagcgggagagcaaggccgagaaggtgctgcagtttgatcctggcaccaagaatgtgacagccctgctgatggaggccaaggagctggaggcccgggtcatcatcctgagcgcctctgaagatgatgctgccaccgtgtacagagctgctgccatgctgaacatgactggaagtggctacgtgtggctggtgggggagcgggagatctctggaaatgccctgcgctatgccccagatggcatcctgggcctgcagctgatcaatggcaagaatgaaagtgcccacatcagtgatgctgtgggcgtggtggcccaggccgtgcatgagctgctggagaaggagaacatcacagaccccccccggggctgtgtgggcaacaccaacatctggaagacaggccccctcttcaagagggtgctgatgagcagcaaatatgcagatggagtgacaggccgggtggagttcaatgaagatggagacaggaagtttgccaactacagcatcatgaacctgcagaacaggaagctggtgcaggtgggcatctacaacggcacccacgtgatccccaatgacaggaagatcatctggccaggaggagaaacagagaagccccggggctaccagatgagcacccggctgaagatcgtgaccatccaccaggagccctttgtgtatgtgaagcccaccctgagtgatggcacctgcaaggaggagttcaccgtgaatggagaccctgtgaagaaggtgatctgcaccggccccaatgacaccagccctggcagccccaggcacacagtgccccagtgctgctacggcttctgcatcgacctgctgatcaagctggcccggaccatgaacttcacctatgaggtgcacctggtggctgatggcaagtttggcacccaggagcgggtgaacaacagcaacaagaaggagtggaatggcatgatgggagagctgctgagcggccaggccgacatgattgtggcccccctgaccatcaacaatgaaagagcccagtacatcgagttcagcaagcccttcaagtaccagggcctgaccatcctggtgaagaaggagatccccaggagcaccctggacagcttcatgcagcccttccagagcaccctgtggctgctggtgggcctgtctgtgcacgtggtggccgtgatgctgtacctgctggaccgcttcagccccttcggccgcttcaaggtgaacagcgaggaggaggaggaggatgccctgaccctgagcagcgccatgtggttctcctggggcgtgctgctgaacagcggcattggagagggcgcccccaggagcttcagcgcccgcatcctgggcatggtgtgggccggctttgccatgatcatcgtggccagctacacagccaacctggccgccttcctggtgctggacaggcctgaggagcgcatcaccggcatcaatgacccccggctgaggaaccccagcgacaagttcatctatgccaccgtgaagcagagctctgtggacatctacttccggcggcaggtggagctgagcaccatgtaccgccacatggagaagcacaactatgaatctgctgctgaggccatccaggccgtgcgggacaacaagctgcacgccttcatctgggacagcgctgtgctggagtttgaggccagccagaagtgtgacctggtgaccactggagagctgttcttccgcagcggcttcggcatcggcatgaggaaggacagcccctggaagcagaatgtgtccctgagcatcctgaagagccatgaaaatggcttcatggaggacctggacaagacctgggtgcgctaccaggagtgtgacagccgcagcaatgccccagccaccctgacctttgagaacatggccggggtcttcatgctggtggccggcggcatcgtggccggcatcttcctgatcttcattgaaattgcctacaagaggcacaaggatgcccggaggaagcagatgcagctggcctttgctgctgtgaatgtgtggaggaagaacctgcagcagtaccaccccacagacatcaccggccccctgaacctgagtgaccccagcgtgtccacagtggtgtag

SEQ ID NO: 16415 - DNA, 2658 bp, Artificial Sequence
  derived and/or modified sequence
atgagcaccatgcggctgctgaccctggccctgctgttcagctgcagcgttgcccgggcggcctgcgaccccaaaatagtgaacattggagctgtacttagcactagaaaacacgagcagatgtttcgcgaagccgtcaaccaggcaaacaagcgccacggctcctggaaaattcaactgaacgccaccagtgtgacacataagcccaatgcaattcagatggcactgtcggtgtgcgaagatttgatctcttctcaagtttacgccatcctggtatcccatccacccacacccaacgatcactttactcccacccctgtgtcttacacagccggtttttataggatccctgttcttggattgaccacccgcatgtctatttacagtgataaatcaatacatctgagcttcctacgcacggtgccaccgtactcacaccagtcttccgtctggttcgaaatgatgagggtgtattcctggaatcatatcatcttgttggtgtccgacgaccacgaaggtagagccgctcagaagcgcctcgagactttgctcgaggaacgggagtctaaggccgagaaagttttgcagttcgaccctgggaccaagaacgtgaccgcgctgttgatggaggcgaaagaacttgaagctagggtcataattctgtctgctagtgaagacgacgcagcaacggtttacagagcggctgccatgctgaacatgactgggtctggctacgtatggctagtgggtgagcgcgaaatttctggaaatgctctgagatacgctcccgacggcattctgggtttgcagttgattaacggaaaaaatgaaagcgcccacatcagcgacgccgtgggagtggtggcccaagcagtgcatgaactgctcgaaaaagagaatatcacagatcctcctcgcggttgcgtgggaaacaccaatatctggaaaactggtccgctgtttaaacgggtgctgatgagcagtaaatacgctgacggagtgaccggacgtgtggagttcaacgaggacggagaccggaagttcgctaactacagcatcatgaatcttcagaacaggaaacttgttcaagtgggcatctataatggaacccatgttatcccgaacgatagaaaaattatctggccgggaggcgaaaccgaaaagccgcgggggtaccagatgagcactagactgaaaatcgttacgatccatcaggaaccctttgtgtatgtcaagccgaccctcagtgatggcacctgtaaggaggagtttacagttaacggagaccccgtgaagaaagtgatctgtacagggccgaacgatacaagccccgggagccctcgccacaccgtcccccagtgctgctatggcttttgcatagacttactgattaagttagcccggacaatgaattttacctatgaggtgcatttggtcgcagacggaaagttcggcacgcaggaacgggtaaacaacagcaacaagaaggagtggaatggcatgatgggtgagcttctgtccggtcaggccgatatgattgttgctccattgacgattaacaacgaacgagcccagtacatagagtttagcaaaccctttaaatatcagggcctgactatcttggtgaagaaggagatccctcgttctacccttgacagttttatgcagccttttcaatccacattatggcttctcgtcggtctctcggtgcacgtcgtcgccgttatgctctatctgctcgacaggtttagcccctttgggagattcaaggtcaatagcgaagaagaggaagaagacgcgctgaccctgagctccgcaatgtggtttagttggggcgtgctgctaaatagtgggatcggcgaaggcgcccctagaagcttctctgctaggatccttggcatggtctgggcgggattcgccatgattattgtggcttcttacaccgcgaatctggcagctttcctggtgctcgatcgaccagaggagagaataacaggcattaatgaccctcgccttcgcaaccctagcgataagttcatctacgcaactgtgaagcagagcagcgtggatatttatttccggagacaggtcgagctcagcaccatgtatcgccatatggaaaaacacaattatgagtcggccgctgaggcaatccaggctgtgagggacaataaattgcatgcgtttatctgggattctgcggttctcgagttcgaagcatcacaaaagtgcgatctcgtgaccactggcgagctgttctttcggtccggcttcgggatcgggatgcggaaagactctccttggaagcagaacgtttctctgtcgatcctgaagtcacacgaaaacggctttatggaagacctggacaaaacttgggtgcgatatcaagagtgcgacagcagatcaaacgcacccgccactcttacattcgagaatatggccggcgtctttatgcttgtcgctggcggaattgtagcaggaatattccttatctttatcgagattgcgtacaaacgacacaaagatgctcggaggaagcaaatgcagctcgcatttgcagctgtaaacgtctggagaaagaatctgcaacagtaccatcccactgatattacgggacctctgaatttgagtgaccctagtgtttccacagttgtgtag

SEQ ID NO: 16416 - DNA, 2658 bp, Artificial Sequence
  derived and/or modified sequence
atgtctacaatgcgtctgcttacccttgcactgttattcagctgctctgtggcacgagcggcttgcgatcccaaaattgtgaacatcggggctgtactttcaacacgcaagcacgagcagatgttcagagaggcggtgaaccaagctaacaaacgccatggaagttggaagatccagctgaatgcaacttccgtgacccacaagcccaacgctattcagatggcgctgtccgtgtgcgaggaccttattagttctcaagtttacgccattttagtgagtcatcctcccacccccaacgatcacttcacccctacccccgtaagctacaccgctgggttctatcgtatcccggtgctcggcctgaccacaaggatgagcatttattccgacaagtctatccacctgtccttcctaaggaccgtgccaccgtattcacaccagtcttctgtttggtttgagatgatgagggtatactcatggaaccatattattttgttggtgagtgacgatcacgaagggagagcagcgcagaaaagattggagaccctgctcgaagagcgagagagtaaggcagaaaaggtgctacagttcgatcctggtacaaagaatgtaactgcccttttaatggaagccaaggaactggaggcacgtgtgattatactcagcgctagcgaggacgacgctgcgaccgtgtaccgcgcagccgcaatgctcaacatgaccggcagcggatatgtatggctagtgggcgaacgagagatttcaggcaacgccctgaggtatgcccctgatgggattctcggcttacagttgatcaatgggaagaatgaatctgctcacatcagtgacgccgtcggcgttgtggcgcaggcagtccacgaactgttggaaaaggagaacataacggatccacccaggggatgtgtgggaaacacaaacatttggaagaccggtcctttattcaaaagggtgctgatgtccagtaaatatgctgatggcgtcacaggcagggtagagttcaacgaagacggggatcggaagttcgctaattactcaataatgaatctacagaatcggaaactagtgcaggtgggaatctacaacgggacccacgtaatccctaacgaccggaaaatcatttggcccggaggtgagacagaaaagccacgcggatatcaaatgtctacaaggctgaagattgttacgatccaccaggagccatttgtatatgttaagcccacgctttctgacggcacctgcaaagaggagttcacagtgaatggagatcctgtcaagaaggttatttgtaccggccctaatgacacttcgcccggaagcccgagacacaccgtgcctcagtgttgttatgggttctgcattgacctgctaattaaactggccagaacgatgaatttcacctacgaagtgcacctggtggctgacggcaaatttggcactcaggagagggtcaacaacagcaacaaaaaagagtggaacggcatgatgggtgagttattaagtgggcaggccgatatgattgtggcacctctaacgatcaacaacgagagggcacagtatatagagtttagcaagccattcaagtaccagggcctcacaatattggtcaagaaggaaattcctcgcagcactctcgatagcttcatgcagcctttccagagcaccctgtggcttttagtgggcctgagcgtccatgtggtggcagtgatgctgtacctcctggaccgtttctctccatttggaaggtttaaggtcaattcagaagaggaggaagaggatgctctgacactctcctccgccatgtggttctcatggggtgttcttctcaatagcgggattggcgaaggggctcccaggagcttcagtgcaagaatcctgggcatggtgtgggccggtttcgccatgataattgtggcaagttatacagccaatctggctgcgtttctggtcctggaccggccagaggaaaggattactggcattaacgatcccagacttaggaacccgagcgacaagttcatctacgcaacagtgaagcagtcttctgttgacatatacttccgaagacaggtggagctttcgaccatgtacagacacatggaaaaacacaattatgaaagcgctgctgaggccatacaagccgtcagagacaacaaacttcatgcgtttatttgggatagtgctgtcctggaattcgaggcctcacagaaatgtgacttggtgactacaggcgagttatttttccggagcggttttgggatcgggatgaggaaggacagcccctggaagcagaatgtaagtctgagcatcctgaaaagtcacgagaatggatttatggaagatctggacaagacttgggtgagataccaggagtgcgatagtcgaagtaacgctccggctaccctgacgttcgaaaacatggctggcgtctttatgcttgttgccggaggcatagtcgctgggatctttctcattttcatagagattgcctacaagcgtcacaaggacgcaagacgcaaacaaatgcaacttgcgttcgccgctgtgaatgtgtggcgcaagaacctgcagcagtaccatccaactgacatcacaggtcccttaaatttgtctgacccatccgttagtactgtggtttag

SEQ ID NO: 16417 - DNA, 2658 bp, Artificial Sequence
  derived and/or modified sequence
atgagcaccatgagactgctgaccctggccctgctgttcagctgcagcgtggccagagccgcctgcgaccccaagatcgtgaacatcggcgccgtgctgagcaccagaaagcacgagcagatgttcagagaggccgtgaaccaggccaacaagagacacggcagctggaagatccagctgaacgccaccagcgtgacccacaagcccaacgccatccagatggccctgagcgtgtgcgaggacctgatcagcagccaggtgtacgccatcctggtgagccacccccccacccccaacgaccacttcacccccacccccgtgagctacaccgccggcttctacagaatccccgtgctgggcctgaccaccagaatgagcatctacagcgacaagagcatccacctgagcttcctgagaaccgtgcccccctacagccaccagagcagcgtgtggttcgagatgatgagagtgtacagctggaaccacatcatcctgctggtgagcgacgaccacgagggcagagccgcccagaagagactggagaccctgctggaggagagagagagcaaggccgagaaggtgctgcagttcgaccccggcaccaagaacgtgaccgccctgctgatggaggccaaggagctggaggccagagtgatcatcctgagcgccagcgaggacgacgccgccaccgtgtacagagccgccgccatgctgaacatgaccggcagcggctacgtgtggctggtgggcgagagagagatcagcggcaacgccctgagatacgcccccgacggcatcctgggcctgcagctgatcaacggcaagaacgagagcgcccacatcagcgacgccgtgggcgtggtggcccaggccgtgcacgagctgctggagaaggagaacatcaccgacccccccagaggctgcgtgggcaacaccaacatctggaagaccggccccctgttcaagagagtgctgatgagcagcaagtacgccgacggcgtgaccggcagagtggagttcaacgaggacggcgacagaaagttcgccaactacagcatcatgaacctgcagaacagaaagctggtgcaggtgggcatctacaacggcacccacgtgatccccaacgacagaaagatcatctggcccggcggcgagaccgagaagcccagaggctaccagatgagcaccagactgaagatcgtgaccatccaccaggagcccttcgtgtacgtgaagcccaccctgagcgacggcacctgcaaggaggagttcaccgtgaacggcgaccccgtgaagaaggtgatctgcaccggccccaacgacaccagccccggcagccccagacacaccgtgccccagtgctgctacggcttctgcatcgacctgctgatcaagctggccagaaccatgaacttcacctacgaggtgcacctggtggccgacggcaagttcggcacccaggagagagtgaacaacagcaacaagaaggagtggaacggcatgatgggcgagctgctgagcggccaggccgacatgatcgtggcccccctgaccatcaacaacgagagagcccagtacatcgagttcagcaagcccttcaagtaccagggcctgaccatcctggtgaagaaggagatccccagaagcaccctggacagcttcatgcagcccttccagagcaccctgtggctgctggtgggcctgagcgtgcacgtggtggccgtgatgctgtacctgctggacagattcagccccttcggcagattcaaggtgaacagcgaggaggaggaggaggacgccctgaccctgagcagcgccatgtggttcagctggggcgtgctgctgaacagcggcatcggcgagggcgcccccagaagcttcagcgccagaatcctgggcatggtgtgggccggcttcgccatgatcatcgtggccagctacaccgccaacctggccgccttcctggtgctggacagacccgaggagagaatcaccggcatcaacgaccccagactgagaaaccccagcgacaagttcatctacgccaccgtgaagcagagcagcgtggacatctacttcagaagacaggtggagctgagcaccatgtacagacacatggagaagcacaactacgagagcgccgccgaggccatccaggccgtgagagacaacaagctgcacgccttcatctgggacagcgccgtgctggagttcgaggccagccagaagtgcgacctggtgaccaccggcgagctgttcttcagaagcggcttcggcatcggcatgagaaaggacagcccctggaagcagaacgtgagcctgagcatcctgaagagccacgagaacggcttcatggaggacctggacaagacctgggtgagataccaggagtgcgacagcagaagcaacgcccccgccaccctgaccttcgagaacatggccggcgtgttcatgctggtggccggcggcatcgtggccggcatcttcctgatcttcatcgagatcgcctacaagagacacaaggacgccagaagaaagcagatgcagctggccttcgccgccgtgaacgtgtggagaaagaacctgcagcagtaccaccccaccgacatcaccggccccctgaacctgagcgaccccagcgtgagcaccgtggtgtag

SEQ ID NO: 16418 - protein, 1464 aa, Artificial Sequence [sequence omitted]

SEQ ID NO: 16419 - DNA, 4395 bp, Artificial Sequence
  derived and/or modified sequence
atgggtagagtagggtattggaccctgctcgttctgcccgcactgctggtgtggaggggtcccgcacccagtgccgccgcggagaaggggcctcctgctttgaacattgccgtaatgctgggccactcccatgatgtcaccgagagagagctgcgaaccctgtgggggcccgagcaggcagccgggctgcctctcgatgtcaatgtagtcgcgttacttatgaacagaacagatcctaagtctttaatcacccacgtctgcgatttgatgagcggtgcccgaatccacgggctggtatttggtgatgacaccgatcaagaagcggtggcccagatgttggatttcatttcaagccacactttcgtgcctatcttgggaattcatggaggtgcatccatgattatggccgataaggaccccacatcaacattctttcagttcggggcaagcattcagcagcaggctacggttatgttgaagatcatgcaggattacgattggcacgtgttcagccttgtcacaacgatattccccggctacagagaatttatttcatttgtgaaaacaactgtcgacaatagtttcgtaggctgggatatgcaaaatgtgatcacccttgacactagcttcgaggatgccaagacgcaggtgcagctaaagaagatccactcaagcgtgattcttctgtactgcagcaaagatgaagcggttttgatactctcagaagctcgttccctgggcctgaccggctatgactttttttggatagttccaagcctggtgagtggcaatacagagctgatcccaaaggagtttccatcaggactcatttccgtgagctacgacgattgggactacagtctcgaggcccgggtcagagatggtatcgggatcttgaccactgccgcttccagcatgctcgagaaattttcttacatccctgaggccaaagccagttgctacgggcagatggaaaggcccgaggtccctatgcacactttacaccctttcatggtcaacgtgacatgggacggcaaagatctctccttcacggaagagggataccaggtccaccccaggctcgtagtgattgtgctgaacaaagatagagagtgggaaaaggtggggaaatgggagaaccatactctgtctctgcgccatgccgtttggccaagatataaaagcttcagcgactgtgaaccggacgataatcacttgtcgattgtcacactcgaggaagccccgttcgtcatagttgaagacatagatccacttacagagacgtgcgtacgaaataccgtgccttgtcggaaattcgtcaaaatcaataacagtacaaatgaaggtatgaatgtgaagaaatgctgtaagggcttctgtatcgatatcttgaagaagctgagccgcactgttaagtttacatacgacttgtatcttgtgacaaatggcaagcacggcaagaaggtgaataacgtctggaatgggatgatcggagaggtggtgtatcagcgggcagtcatggccgtggggagcctgaccataaacgaagaaaggtctgaggttgtagacttctcggtgccattcgttgagactgggatctctgtaatggtttcacggagtaatggcacagtctcccccagcgcgtttctcgaaccttttagcgcctccgtttgggtcatgatgtttgtgatgctactgatagtgtccgcgattgccgtctttgtcttcgaatacttttctcctgtcggctataaccgaaacctcgctaaaggtaaagcaccacacggacccagtttcactatcggaaaggccatctggctcctgtggggcttagtgttcaacaactccgtacctgtgcagaaccctaaggggactacaagcaaaattatggttagtgtctgggcattctttgccgttattttcctcgcatcatacacagcaaatctggccgcctttatgatacaagaagagtttgtggatcaggtgaccgggctgtctgacaagaaatttcaaagaccacacgattacagtcctcctttccgttttggaactgttcccaacggcagcactgaaagaaacatccgcaataattacccctatatgcaccagtacatgacaaaattcaatcaaaaaggggtagaagatgcattggtcagtctgaagaccggcaaactggatgccttcatatatgacgcagcggtgctaaactataaggcggggcgggacgagggctgtaagctcgtgacaatcggctctggatacatttttgccacgactggctatggaattgcccttcagaaagggagcccttggaagagacagattgacctggcattgctccagttcgttggcgatggcgagatggaggaacttgagacactgtggctaacaggtatctgtcataatgagaagaacgaagtaatgtcgagccaactggacatcgacaacatggccggagttttttatatgttggctgcggctatggcgctgtccctgattaccttcatttgggagcatcttttttactggaaactgagattctgtttcacaggcgtgtgcagtgaccgaccagggttactattcagtatcagtcggggcatctacagctgtatccatggagtgcacatcgaggaaaagaaaaaatcgccagattttaacctaaccgggtcccaaagcaacatgctgaagttgctgcgcagtgcgaaaaatataagtagtatgtcaaacatgaatagtagtaggatggatagccccaagcgagccgccgattttattcagcgtggctccctgataatggatatggtctctgacaaaggcaatttaatgtactccgataaccgcagcttccaggggaaggagagcattttcggcgataatatgaacgagttacagacttttgttgctaataggcagaaggataacttgaacaattatgtcttccagggccagcatccgttgaccctgaacgagagcaatcccaatacggtcgaggtggctgtcagtaccgagtctaaagctaactcaaggcctcgccagctgtggaaaaaatctgtggacagtatcaggcaggacagcctgagtcagaacccagtgtctcagagagatgaggcgaccgctgaaaacaggacccatagcttgaaatcaccccggtacctccccgaagagatggcacactcagatatttcggagacatccaatcgggcaacctgtcatcgggagccagataattccaagaatcacaagaccaaagataacttcaagcgttcagtcgctagcaaatatccaaaagactgctcagaggtcgagcggacatacctgaagaccaagtcatccagtccgcgtgataagatttacaccatcgatggtgaaaaggaaccgggcttccacctcgacccaccacagttcgtggaaaacgtcactctgcccgagaatgttgatttcccagacccgtatcaggatccatccgaaaacttcaggaaaggggattccacactgcccatgaataggaatccgctccataacgaggagggactttcgaataacgatcaatacaagctgtacagtaagcattttaccctcaaagataaaggatccccccactcagaaacatccgagcgatatcgtcaaaattctacccattgtaggagctgcctgtccaacatgcccacatacagcggccattttacaatgagatctcccttcaagtgtgacgcttgccttagaatgggcaacctgtatgacattgatgaggaccagatgctgcaggagacagggaatccggctactggggaacaggtgtaccaacaggactgggcacagaataatgccctccaactacaaaagaacaagttgagaatcagccgccaacattcttacgacaatattgtggacaagcctcgagagttggaccttagtagacccagcaggtcaatctctctgaaggaccgggaacggctgctcgaagggaatttttacggatccttgttctcagttcctagctctaaactgtctggcaaaaaatcatctctgttccctcaaggattggaggacagcaagaggagcaagagtcttcttccagatcacacgtccgacaatccttttctgcacagtcatagggatgaccagcgcctggttattggcaggtgcccctcagatccctacaagcattccctcccctcccaagcggtgaatgacagctatctgcgctctagtctcagaagtaccgcctcatactgctcccgagatagcaggggccataacgacgtttacatttcagagcatgtgatgccttacgcagccaacaagaacaatatgtactcaaccccacgcgtactcaacagctgttctaacagacgagtatacaagaagatgccatctatagaatctgatgtctag

SEQ ID NO: 16420 - DNA, 4395 bp, Artificial Sequence
  derived and/or modified sequence
atggggcgtgtcggatactggaccctgctggtgctgcccgcgctcctggtttggcgaggtccggctccaagcgcggccgctgaaaagggaccaccggcactgaacatcgccgtcatgctgggccactcacacgacgtgacggaacgcgagttgagaacattgtggggccccgagcaggccgctggattacctctggatgtgaatgtggtggccttgttgatgaatcgcacagaccccaaatccctcataacacatgtttgtgacctgatgagcggagctcggattcacgggctggtttttggcgatgataccgaccaggaggctgtcgcccagatgctagattttatttcatcacacactttcgtgccgattctcggcattcacggcggagctagcatgatcatggctgacaaggatcccacttcaactttctttcagttcggagccagcattcagcagcaggcaacagtcatgcttaaaatcatgcaggattacgactggcatgttttcagtctggtcactacaatcttccccggttaccgggaatttatctcttttgtcaagaccaccgtagataacagctttgtgggctgggatatgcagaacgttattactctggacactagcttcgaggacgctaaaacacaagtgcagctgaaaaaaatccattcatccgtcatacttctgtactgtagcaaggacgaggccgtcttgatattaagcgaggctagatccctagggctgacgggttatgatttcttttggatcgtgccatctctggtgtccggtaatactgagttgatccccaaagagtttccttccggacttatctccgtgtcttacgatgactgggattatagtcttgaggcacgagtgcgtgacggaatcgggatactgacaaccgcagcctcctccatgctggaaaaattctcctatatccccgaggctaaggccagttgctacggccaaatggagaggccagaggtgcctatgcatactctccatccttttatggtgaacgtgacctgggatggaaaggatctatctttcacagaagagggataccaagtgcacccaagactcgtggtaattgtgctcaataaggacagggagtgggaaaaagtgggcaagtgggaaaatcatacactcagtctgagacatgccgtgtggccacgctataagtctttctctgattgcgaaccagacgacaaccatttaagtatcgtcaccctggaggaggccccctttgtgatcgttgaggacattgacccgctgaccgagacctgtgttcgaaatactgtgccatgccggaagttcgtgaaaatcaataattcaactaacgagggcatgaacgtaaaaaaatgttgcaaaggattctgcatcgacattctgaaaaagctcagccgaactgtaaaattcacttacgacctttatctcgttactaatggaaagcatggtaaaaaggtaaataacgtgtggaacgggatgatcggagaggtggtgtatcaacgggcggtcatggccgtgggaagcttgactataaacgaagagcggtccgaagttgtggactttagtgtgcccttcgtggagaccggcatctcggtgatggtgtctagatccaacggaacagtttccccctccgcttttctggagcccttttccgccagtgtgtgggtgatgatgtttgtcatgttacttatcgtatccgctattgccgtttttgtgtttgaatatttcagccccgtgggatacaatcggaacctagccaaagggaaggctccacatggaccctcattcaccataggtaaggctatctggctgctgtggggcttagtctttaataattctgtgccggtgcagaaccctaaaggcaccacaagcaagatcatggtgtcagtgtgggcctttttcgctgtcatttttctggccagctatacagcaaaccttgccgctttcatgatccaagaggaattcgtggatcaggtcaccggcctcagcgacaagaaatttcagcggccgcacgattattcccctccattcagattcggcacagtgccgaacggatcaacggagcggaacattaggaataactatccttatatgcaccagtacatgacaaaattcaaccaaaaaggagtggaagatgctctagtcagcttgaaaactgggaaattagacgccttcatctatgatgccgccgttctgaattacaaagccggccgcgatgagggatgcaaactcgtcaccatcgggtctggttacatattcgctactaccggctacgggattgctctacagaaaggcagtccctggaagcggcagatagacttagccctcctgcagttcgtcggtgacggtgagatggaagagcttgaaacactgtggctgactggcatctgtcataacgaaaagaacgaagttatgagttctcagttggatatagataacatggccggcgtgttttacatgctcgccgcggcaatggctttgtcactgatcaccttcatttgggaacatctattctactggaagcttcggttttgtttcacaggcgtctgttctgataggcctggcctgctcttttccattagcaggggaatctactcgtgcatccacggggtacacatcgaggaaaaaaagaagagcccagacttcaacctcacaggatcacagagcaacatgctgaagctgctccgatctgccaagaatatcagctccatgagtaacatgaatagcagtaggatggactcccccaaaagggccgccgattttattcagagaggctcgttgatcatggatatggtaagcgacaaaggcaatctcatgtacagtgacaacagatctttccagggcaaggagtcaatattcggtgacaacatgaatgaactgcagacctttgtggcgaaccggcaaaaagataatttgaacaactacgtgttccaggggcagcatcctctcactcttaacgagtctaatcctaacacagtggaggttgctgtgtctacggagtcaaaagctaatagccggccgcgacaactctggaagaagtcagtggattctatcaggcaagattccctgtcccagaatcctgtgtcccagcgggatgaggccacggccgagaatcggactcactcccttaagtctcctaggtatctcccagaagaaatggctcattctgacatctctgaaactagtaatcgcgcgacgtgtcatagagaacccgataacagcaaaaatcataaaaccaaagacaacttcaagcgatcagtggccagcaagtatcccaaggactgcagcgaggtggagcggacgtacctgaagactaagtcgtcttcaccccgagacaaaatctatacaatcgacggtgaaaaagaaccagggttccacttggatcctccccaattcgtcgaaaacgtgaccctaccggaaaatgtggactttcccgacccgtatcaggaccccagcgagaatttccgcaagggcgactcgaccctacccatgaatagaaaccctctgcacaatgaggaagggctctcaaacaacgatcagtacaagttgtactcaaagcactttaccctcaaagataaggggtctccccactccgaaacatccgagcggtacaggcagaatagcacccactgtcgcagttgtctaagtaacatgccaacatactcaggccatttcacaatgcgctcgcctttcaaatgcgacgcatgtcttagaatgggcaacctctacgacatcgatgaggaccagatgcttcaagagaccggtaaccccgccaccggggagcaggtctaccagcaggactgggctcagaacaatgcattacagctgcagaaaaataagctcaggatctccagacagcacagctatgataatatcgtggataaaccccgggaactggacctgagcagaccttctagaagcatttccctgaaggatcgggaacgcctgcttgaagggaatttctatggctctcttttttctgtgcccagctccaagctgagcggaaaaaagagttcgctctttccccaggggctggaggatagcaagaggagtaagtccctgctcccagatcacactagcgataatccctttcttcactctcaccgggatgatcagcgcttggtcattgggcgctgtccttctgacccctacaagcatagtctgccatctcaagccgtgaatgatagctatctccgctcttcgctcagatcaactgcttcatactgctcacgggacagtcgcggccacaacgatgtgtatatttcggagcatgttatgccatacgctgcgaataaaaataatatgtatagtacccctcgtgtgcttaattcatgttccaatcgaagggtgtacaagaagatgccatcaatcgagtcagatgtttag

SEQ ID NO: 16421 - DNA, 4395 bp, Artificial Sequence
  derived and/or modified sequence
atgggccgggttggatactggaccctacttgtgctccccgctctgttggtttggagaggtcccgcccccagtgctgccgccgagaagggccctccggcattaaacatcgccgtgatgctgggtcactcccacgatgttacagaaagggagcttcgtacactgtgggggcccgaacaagccgcaggattaccattggacgtaaatgtggtcgctctcttaatgaaccgtaccgaccctaagagccttataactcatgtatgcgatctgatgtctggagccaggattcatggactcgtctttggtgacgatactgaccaagaagccgtggctcagatgctggatttcatctccagccatacctttgtgcccattctcggcatccacggcggggcctccatgataatggccgacaaggacccaacgtccacattttttcagtttggcgcttcaattcaacagcaagctacagttatgttgaagataatgcaggactatgactggcacgtctttagcttagtgaccaccatattccctggttaccgggagttcatctctttcgtgaagacgactgtggacaattcttttgtgggatgggacatgcagaatgtcattacgcttgacacaagcttcgaagatgcaaagacccaggtgcaactgaagaaaattcacagcagcgtaattctgttgtactgctccaaagacgaggccgtgttaatactctctgaagcaaggtcactggggctgactggctacgactttttttggatcgtgccaagcttggtgtctggtaatacagagttgattcccaaggaatttcccagcggactaatcagcgtctcttacgacgactgggattacagcctggaagccagagtccgggatggtattggaatacttaccaccgctgccagcagcatgttggagaagttctcgtacattccggaagctaaggccagctgctatggtcagatggagcgacccgaggtcccaatgcatacattgcacccttttatggtaaatgtgacatgggatggaaaagacctttctttcacggaggaaggctatcaggtgcacccacgactggtcgtgattgtgctcaacaaggaccgcgagtgggaaaaggttggtaaatgggaaaaccataccttaagcctaaggcatgctgtgtggcctaggtataagtcgttttccgattgtgaaccagatgacaatcacctgtccatagtcacactggaggaagccccatttgtcattgtcgaggacattgatcccttaactgaaacctgtgtgaggaacactgtgccttgtcgaaaatttgtgaaaattaacaattctaccaacgaaggcatgaacgtcaagaagtgttgtaagggcttttgtattgatatcctaaagaagttgtcccggaccgtgaaatttacctacgacctgtatctcgttacaaacggcaagcacggtaagaaggtgaacaatgtctggaacggcatgattggtgaagtggtgtatcagagagcagtgatggctgtggggtctctgacaatcaacgaagagcggtctgaggttgtggatttttccgtgccttttgtcgagacagggatttctgtgatggtgagccgatccaatggcaccgtgtcacccagcgcttttcttgagccattttcagcttcagtgtgggtgatgatgtttgtaatgcttttaatagtctctgcaatcgccgtgtttgtgttcgaatatttctcaccggtcggttataacaggaacttggctaaagggaaagctccacacggtcccagttttactattggcaaggctatatggctcctctggggattggtcttcaataattctgtaccagtccagaatccaaagggtaccaccagcaagattatggtgtccgtctgggcattttttgcagtcattttcctcgcttcctacactgccaatctggcagctttcatgattcaggaagagtttgtggaccaggtgacgggactgtcggacaagaagttccagaggccccacgactactcacctccgtttcggtttggtactgtgccaaacgggtcaactgagagaaatattcgcaataactatccatacatgcatcagtatatgacaaagttcaaccaaaaaggggtggaggacgctctcgtctccctgaaaactggtaagctcgatgcttttatatatgatgctgccgttctgaattacaaggccgggagggacgaaggctgtaaactcgtgacaatagggagcggatacatctttgctacaaccgggtatggcatcgcccttcaaaaaggcagcccttggaagagacagatcgatctggccctgctgcagttcgtgggagatggtgagatggaagagctggagactctgtggctcacaggcatatgtcacaacgaaaagaatgaggttatgagctctcagctggacatcgataatatggctggcgtattctacatgttggctgcagctatggcactctccttgattacatttatttgggagcacctgttctactggaaactgcgcttttgtttcactggggtgtgctcagataggcctggcctgctgttcagcataagtcgcggaatctatagttgtatccatggagtgcacatcgaggaaaagaaaaaatctccggacttcaacctcaccggctcacagtcaaatatgctcaagctattgaggtccgccaagaacattagctcaatgagtaacatgaatagttccaggatggacagtccaaagcgcgcagcagactttatacaaaggggctcgttaatcatggatatggtttcagacaaaggaaatcttatgtacagcgacaatcggtcctttcagggcaaagagtccatttttggtgacaacatgaatgaattacagacgttcgtggctaacaggcagaaggataacttaaataactacgtgtttcaaggccagcacccgttgaccctgaacgaatcaaatccgaacaccgtggaggtcgcagttagcaccgagagcaaggccaacagcagaccgaggcaattgtggaagaagagcgtagacagtatcaggcaggactctctgtcccagaatccagtttctcagcgggacgaggcgaccgcagaaaatcggacgcactcactgaaaagcccccgatacctgccggaagaaatggcccacagcgacatctccgaaacatcaaatcgagccacctgccatcgtgagcccgacaactctaagaaccataagacgaaagacaactttaaaaggagcgtcgccagcaagtatcccaaggactgttcagaagtggagaggacctatctaaaaaccaagtcatcaagccctagagataagatctatacaatcgatggcgaaaaagagcctggatttcacctcgaccccccgcagttcgtagagaacgtgaccttgcctgagaatgtagacttcccagacccataccaggaccccagcgaaaattttaggaaaggcgactcaacactgccgatgaataggaatcccctgcacaacgaagaggggctctccaataatgatcaatataagctgtactctaaacacttcaccctcaaggacaagggctcccctcattccgaaacatcagaacgttacagacagaactcaacccattgtagatcctgtttatccaacatgcctacttattcagggcactttacgatgcgaagtccttttaagtgcgacgcttgcctgagaatggggaatctttatgatatcgacgaagatcagatgctgcaagagaccggtaacccagcaacaggtgagcaggtctaccaacaggactgggcccagaataacgctctacagctacaaaaaaataaattacggattagccgccaacatagttacgataatatcgtggacaagcctcgagagctggacctttcgcggccctccagatcgatctcactgaaggatagggaaaggctgctggagggcaacttttacggatcccttttctccgttccttcaagcaagctgtcggggaagaaatcgagcctgtttcctcagggtttagaggacagcaagaggagcaagtcactgctcccagatcatacatccgacaacccgttcttacactcccaccgcgacgatcaacgtttggttattggtaggtgcccaagcgatccatacaaacacagcctgccatctcaggctgtgaacgactcatacttgagatcatctctcaggagcactgccagttactgttcccgggattcccgtggccataatgatgtgtatattagcgaacatgtgatgccttatgcagcaaacaagaacaatatgtactcaaccccaagggtcctgaattcatgtagtaacagaagagtttacaaaaaaatgccgtctatcgaaagtgacgtctag

SEQ ID NO: 16422 - DNA, 5031 bp, Artificial Sequence
  derived and/or modified sequence
cgctcagcagctcccggtcgcacaactcccagcagccggcgctggggaggtggtagggggtgcgggtggaggtgcccagttagcttctcgtgggtggccaacctggggctcccattctcctgtgcaccctggagtggagctcccgctatcagccacaggggctgaggatccgcactgggggcgtcgtgggcatcgggcttcagcttcccccctcttgtctagcccccctgggcgcataggggggcttgtgagcactgcagactgcagccttcccctcaaccctccctcccctcgttggtgggctgaccctgcctctccttctctcctccgccccgttagagccctgctgcagagcctccggctgggatagccgccccccgtgggggcgatgcggacagcgcgggacagccaggggagcgcgctggggccgcagcatgcgggaacccgctaaacccggtggctgctgaggcggccgagatgctcgtgcgcgcagcgcgccccactgcatcctcgaccttctcgggctacagggaccgtcagtggcgactatgggcagagtgggctattggaccctgctggtgctgccggcccttctggtctggcgcggtccggcgccgagcgcggcggcggagaagggtccccccgcgctaaatattgcggtgatgctgggtcacagccacgacgtgacagagcgcgaacttcgaacactgtggggccccgagcaggcggcggggctgcccctggacgtgaacgtggtagctctgctgatgaaccgcaccgaccccaagagcctcatcacgcacgtgtgcgacctcatgtccggggcacgcatccacggcctcgtgtttggggacgacacggaccaggaggccgtagcccagatgctggattttatctcctcccacaccttcgtccccatcttgggcattcatgggggcgcatctatgatcatggctgacaaggatccgacgtctaccttcttccagtttggagcgtccatccagcagcaagccacggtcatgctgaagatcatgcaggattatgactggcatgtcttctccctggtgaccactatcttccctggctacagggaattcatcagcttcgtcaagaccacagtggacaacagctttgtgggctgggacatgcagaatgtgatcacactggacacttcctttgaggatgcaaagacacaagtccagctgaagaagatccactcttctgtcatcttgctctactgttccaaagacgaggctgttctcattctgagtgaggcccgctcccttggcctcaccgggtatgatttcttctggattgtccccagcttggtctctgggaacacggagctcatcccaaaagagtttccatcgggactcatttctgtctcctacgatgactgggactacagcctggaggcgagagtgagggacggcattggcatcctaaccaccgctgcatcttctatgctggagaagttctcctacatccccgaggccaaggccagctgctacgggcagatggagaggccagaggtcccgatgcacaccttgcacccatttatggtcaatgttacatgggatggcaaagacttatccttcactgaggaaggctaccaggtgcaccccaggctggtggtgattgtgctgaacaaagaccgggaatgggaaaaggtgggcaagtgggagaaccatacgctgagcctgaggcacgccgtgtggcccaggtacaagtccttctccgactgtgagccggatgacaaccatctcagcatcgtcaccctggaggaggccccattcgtcatcgtggaagacatagaccccctgaccgagacgtgtgtgaggaacaccgtgccatgtcggaagttcgtcaaaatcaacaattcaaccaatgaggggatgaatgtgaagaaatgctgcaaggggttctgcattgatattctgaagaagctttccagaactgtgaagtttacttacgacctctatctggtgaccaatgggaagcatggcaagaaagttaacaatgtgtggaatggaatgatcggtgaagtggtctatcaacgggcagtcatggcagttggctcgctcaccatcaatgaggaacgttctgaagtggtggacttctctgtgccctttgtggaaacgggaatcagtgtcatggtttcaagaagtaatggcaccgtctcaccttctgcttttctagaaccattcagcgcctctgtctgggtgatgatgtttgtgatgctgctcattgtttctgccatagctgtttttgtctttgaatacttcagccctgttggatacaacagaaacttagccaaagggaaagcaccccatgggccttcttttacaattggaaaagctatatggcttctttggggcctggtgttcaataactccgtgcctgtccagaatcctaaagggaccaccagcaagatcatggtatctgtatgggccttcttcgctgtcatattcctggctagctacacagccaatctggctgccttcatgatccaagaggaatttgtggaccaagtgaccggcctcagtgacaaaaagtttcagagacctcatgactattccccaccttttcgatttgggacagtgcctaatggaagcacggagagaaacattcggaataactatccctacatgcatcagtacatgaccaaatttaatcagaaaggagtagaggacgccttggtcagcctgaaaacggggaagctggacgctttcatctacgatgccgcagtcttgaattacaaggctgggagggatgaaggctgcaagctggtgaccatcgggagtgggtacatctttgccaccaccggttatggaattgcccttcagaaaggctctccttggaagaggcagatcgacctggccttgcttcagtttgtgggtgatggtgagatggaggagctggagaccctgtggctcactgggatctgccacaacgagaagaacgaggtgatgagcagccagctggacattgacaacatggcgggcgtattctacatgctggctgccgccatggcccttagcctcatcaccttcatctgggagcacctcttctactggaagctgcgcttctgtttcacgggcgtgtgctccgaccggcctgggttgctcttctccatcagcaggggcatctacagctgcattcatggagtgcacattgaagaaaagaagaagtctccagacttcaatctgacgggatcccagagcaacatgttaaaactcctccggtcagccaaaaacatttccagcatgtccaacatgaactcctcaagaatggactcacccaaaagagctgctgacttcatccaaagaggttccctcatcatggacatggtttcagataaggggaatttgatgtactcagacaacaggtcctttcaggggaaagagagcatttttggagacaacatgaacgaactccaaacatttgtggccaaccggcagaaggataacctcaataactatgtattccagggacaacatcctcttactctcaatgagtccaaccctaacacggtggaggtggccgtgagcacagaatccaaagcgaactctagaccccggcagctgtggaagaaatccgtggattccatacgccaggattcactatcccagaatccagtctcccagagggatgaggcaacagcagagaataggacccactccctaaagagccctaggtatcttccagaagagatggcccactctgacatttcagaaacgtcaaatcgggccacgtgccacagggaacctgacaacagtaagaaccacaaaaccaaggacaactttaaaaggtcagtggcctccaaataccccaaggactgtagtgaggtcgagcgcacctacctgaaaaccaaatcaagctcccctagagacaagatctacactatagatggtgagaaggagcctggtttccacttagatccaccccagtttgttgaaaatgtgaccctgcccgagaacgtggacttcccggacccctaccaggatcccagtgaaaacttccgcaagggggactccacgctgccaatgaaccggaaccccttgcataatgaagaggggctttccaacaacgaccagtataaactctactccaagcacttcaccttgaaagacaagggttccccgcacagtgagaccagcgagcgataccggcagaactccacgcactgcagaagctgcctttccaacatgcccacctattcaggccacttcaccatgaggtcccccttcaagtgcgatgcctgcctgcggatggggaacctctatgacatcgatgaagaccagatgcttcaggagacaggtaacccagccaccggggagcaggtctaccagcaggactgggcacagaacaatgcccttcaattacaaaagaacaagctaaggattagccgtcagcattcctacgataacattgtcgacaaacctagggagctagaccttagcaggccctcccggagcataagcctcaaggacagggaacggcttctggagggaaatttttacggcagcctgtttagtgtcccctcaagcaaactctcggggaaaaaaagctcccttttcccccaaggtctggaggacagcaagaggagcaagtctctcttgccagaccacacctccgataaccctttcctccactcccacagggatgaccaacgcttggttattgggagatgcccctcggacccttacaaacactcgttgccatcccaggcggtgaatgacagctatcttcggtcgtccttgaggtcaacggcatcgtactgttccagggacagtcggggccacaatgatgtgtatatttcggagcatgttatgccttatgctgcaaataagaataatatgtactctacccccagggttttaaattcctgcagcaatagacgcgtgtacaagaaaatgcctagtatcgaatctgatgtttaaaaatcttccattaatgttttatctatagggaaatatacgtaatggccaatgttctggagggtaaatgttggatgtccaatagtgccct

SEQ ID NO: 16423 - DNA, 14450 bp, Artificial Sequence
  derived and/or modified sequence
atcatgggaccgggtgagcgctgagaatcgcggccgcagccatcagccctggagatgaccaggagcggccactgctgagaactatgtggagagaggctgcgagccctgctgcagagcctccggctgggatagccgccccccgtgggggcgatgcggacagcgcgggacagccaggggagcgcgctggggccgcagcatgcgggaacccgctaaacccggtggctgctgaggcggccgagatgctcgtgcgcgcagcgcgccccactgcatcctcgaccttctcgggctacagggaccgtcagtggcgactatgggcagagtgggctattggaccctgctggtgctgccggcccttctggtctggcgcggtccggcgccgagcgcggcggcggagaagggtccccccgcgctaaatattgcggtgatgctgggtcacagccacgacgtgacagagcgcgaacttcgaacactgtggggccccgagcaggcggcggggctgcccctggacgtgaacgtggtagctctgctgatgaaccgcaccgaccccaagagcctcatcacgcacgtgtgcgacctcatgtccggggcacgcatccacggcctcgtgtttggggacgacacggaccaggaggccgtagcccagatgctggattttatctcctcccacaccttcgtccccatcttgggcattcatgggggcgcatctatgatcatggctgacaaggatccgacgtctaccttcttccagtttggagcgtccatccagcagcaagccacggtcatgctgaagatcatgcaggattatgactggcatgtcttctccctggtgaccactatcttccctggctacagggaattcatcagcttcgtcaagaccacagtggacaacagctttgtgggctgggacatgcagaatgtgatcacactggacacttcctttgaggatgcaaagacacaagtccagctgaagaagatccactcttctgtcatcttgctctactgttccaaagacgaggctgttctcattctgagtgaggcccgctcccttggcctcaccgggtatgatttcttctggattgtccccagcttggtctctgggaacacggagctcatcccaaaagagtttccatcgggactcatttctgtctcctacgatgactgggactacagcctggaggcgagagtgagggacggcattggcatcctaaccaccgctgcatcttctatgctggagaagttctcctacatccccgaggccaaggccagctgctacgggcagatggagaggccagaggtcccgatgcacaccttgcacccatttatggtcaatgttacatgggatggcaaagacttatccttcactgaggaaggctaccaggtgcaccccaggctggtggtgattgtgctgaacaaagaccgggaatgggaaaaggtgggcaagtgggagaaccatacgctgagcctgaggcacgccgtgtggcccaggtacaagtccttctccgactgtgagccggatgacaaccatctcagcatcgtcaccctggaggaggccccattcgtcatcgtggaagacatagaccccctgaccgagacgtgtgtgaggaacaccgtgccatgtcggaagttcgtcaaaatcaacaattcaaccaatgaggggatgaatgtgaagaaatgctgcaaggggttctgcattgatattctgaagaagctttccagaactgtgaagtttacttacgacctctatctggtgaccaatgggaagcatggcaagaaagttaacaatgtgtggaatggaatgatcggtgaagtggtctatcaacgggcagtcatggcagttggctcgctcaccatcaatgaggaacgttctgaagtggtggacttctctgtgccctttgtggaaacgggaatcagtgtcatggtttcaagaagtaatggcaccgtctcaccttctgcttttctagaaccattcagcgcctctgtctgggtgatgatgtttgtgatgctgctcattgtttctgccatagctgtttttgtctttgaatacttcagccctgttggatacaacagaaacttagccaaagggaaagcaccccatgggccttcttttacaattggaaaagctatatggcttctttggggcctggtgttcaataactccgtgcctgtccagaatcctaaagggaccaccagcaagatcatggtatctgtatgggccttcttcgctgtcatattcctggctagctacacagccaatctggctgccttcatgatccaagaggaatttgtggaccaagtgaccggcctcagtgacaaaaagtttcagagacctcatgactattccccaccttttcgatttgggacagtgcctaatggaagcacggagagaaacattcggaataactatccctacatgcatcagtacatgaccaaatttaatcagaaaggagtagaggacgccttggtcagcctgaaaacggggaagctggacgctttcatctacgatgccgcagtcttgaattacaaggctgggagggatgaaggctgcaagctggtgaccatcgggagtgggtacatctttgccaccaccggttatggaattgcccttcagaaaggctctccttggaagaggcagatcgacctggccttgcttcagtttgtgggtgatggtgagatggaggagctggagaccctgtggctcactgggatctgccacaacgagaagaacgaggtgatgagcagccagctggacattgacaacatggcgggcgtattctacatgctggctgccgccatggcccttagcctcatcaccttcatctgggagcacctcttctactggaagctgcgcttctgtttcacgggcgtgtgctccgaccggcctgggttgctcttctccatcagcaggggcatctacagctgcattcatggagtgcacattgaagaaaagaagaagtctccagacttcaatctgacgggatcccagagcaacatgttaaaactcctccggtcagccaaaaacatttccagcatgtccaacatgaactcctcaagaatggactcacccaaaagagctgctgacttcatccaaagaggttccctcatcatggacatggtttcagataaggggaatttgatgtactcagacaacaggtcctttcaggggaaagagagcatttttggagacaacatgaacgaactccaaacatttgtggccaaccggcagaaggataacctcaataactatgtattccagggacaacatcctcttactctcaatgagtccaaccctaacacggtggaggtggccgtgagcacagaatccaaagcgaactctagaccccggcagctgtggaagaaatccgtggattccatacgccaggattcactatcccagaatccagtctcccagagggatgaggcaacagcagagaataggacccactccctaaagagccctaggtatcttccagaagagatggcccactctgacatttcagaaacgtcaaatcgggccacgtgccacagggaacctgacaacagtaagaaccacaaaaccaaggacaactttaaaaggtcagtggcctccaaataccccaaggactgtagtgaggtcgagcgcacctacctgaaaaccaaatcaagctcccctagagacaagatctacactatagatggtgagaaggagcctggtttccacttagatccaccccagtttgttgaaaatgtgaccctgcccgagaacgtggacttcccggacccctaccaggatcccagtgaaaacttccgcaagggggactccacgctgccaatgaaccggaaccccttgcataatgaagaggggctttccaacaacgaccagtataaactctactccaagcacttcaccttgaaagacaagggttccccgcacagtgagaccagcgagcgataccggcagaactccacgcactgcagaagctgcctttccaacatgcccacctattcaggccacttcaccatgaggtcccccttcaagtgcgatgcctgcctgcggatggggaacctctatgacatcgatgaagaccagatgcttcaggagacaggtaacccagccaccggggagcaggtctaccagcaggactgggcacagaacaatgcccttcaattacaaaagaacaagctaaggattagccgtcagcattcctacgataacattgtcgacaaacctagggagctagaccttagcaggccctcccggagcataagcctcaaggacagggaacggcttctggagggaaatttttacggcagcctgtttagtgtcccctcaagcaaactctcggggaaaaaaagctcccttttcccccaaggtctggaggacagcaagaggagcaagtctctcttgccagaccacacctccgataaccctttcctccactcccacagggatgaccaacgcttggttattgggagatgcccctcggacccttacaaacactcgttgccatcccaggcggtgaatgacagctatcttcggtcgtccttgaggtcaacggcatcgtactgttccagggacagtcggggccacaatgatgtgtatatttcggagcatgttatgccttatgctgcaaataagaataatatgtactctacccccagggttttaaattcctgcagcaatagacgcgtgtacaagaaaatgcctagtatcgaatctgatgtttaaaaatcttccattaatgttttatctatagggaaatatacgtaatggccaatgttctggagggtaaatgttggatgtccaatagtgccctgctaagaggaagaagatgtagggaggtattttgttgttgttgttgttggctcttttgcacacggcttcatgccataatcttccactcaaggaatcttgtgaggtgtgtgctgagcatggcagacaccagataggtgagtccttaaccaaaaataactaactacataagggcaagtctccgggacatgcctactgggtatgttggcaataatgatgcattggatgccaatggtgatgttatgatttcctatattccaaattccattaaggtcagcccaccatgtaattttctcatcagaaatgcctaatggtttctctaatacagaataagcaatatggtgtgcatgtaaacctgacacagacaaaataaaaacagttaagaatgcatctgcactgtagtgcgattgacatgtgcaagagattaggaagtttggctcgtaacagtttcagctttcttgttatgccttccatcacagcccaggctcaccccaagaactccaggctcccctaaagaatagcaaatcagtgtgttcgtgatgactgtgctaccttcattatagttcatttccaagacacatctggagccaaaggcccgagggaccctcaggtggggagagctacaggaatctctttggatgttgatgtgtgtttctctcaccctcggcttcgatggtcttgttcagagctgcataaactaacacatttatgtctccgagatctaagtgtggatcttctgtctgtgacacagtggccattgtagtttatcccgaagacgcctatgtacgtaagtttgcatttcctcccttctggtgatgactcagggttgtatagtatctgttaccccttccctcccagagtaaccataactcgttccgtttccaaacagccatggtggtgtccaattagctgtgtatcgctcttcccagagttgttaatgtggtgacatgcaccaacagccgtatgtgtactgtgatctgtaagaagtacaatgccatctgtctgccgaaggctagcatggttttaggtttatcttccttcacatccagaaattctgttggacactcacttccaccccaaactcctcaaatcaaaagccttcaaaacacgaggcactcttggatctaccctgagtatcctccaaactgtggatacagtttagtgagacaagcaatttctcccttctgagttattctctctgttggtggcaaaccacttcatagcaccaacagagatgtaggaaaaattcctcaaagtatttgtcatttctgagtcgcctgcattatcccattcttattctcctcaaacctgtgcatatatgacatgaaatgatatccattttttttttaagttagagacagagaggggaatacttatgcatggggagcctgttagcacagtgcctgccacaaaaacaagtgcccccgacaagatagttgctatgttatgacactttctcagatcaggattttctagtttaaaaattaaatatcataaaaccagcaaataatattaactaaaccttttatatagttctactctgttaattagtgtatttcatgtacatgaatatttttgaagtatttgggataactagccatcagtgtttgcagaagacctcagtctgttttgggccattacggaaacactaagctaatgtagactcgcctggccatttcctggtttcctcctgcattctgctttacattcttgaagaaagggataaagtggcaggttgaaaaattatcccatttcttctcctcatggtgtgcgttctgttttgtaagtattattttcttgcatgtgggcaagtgtcagggatgattcccttaaagctcaaggatgcatggaatagctccatctttgggaaagtacacctgacctacagtgttcctataatgaaaagtggttgcaataaatttcagggtcaatcatagggagacagagggaggcagtgggtgagaggagcttcctttcatttttgaaaggcagaaggggctgactaggtgctggggatgcatgtgcttgaaaatgacattttatttcccggatgctgtacctctgctgccccaagacccagccatggagaagcctggatcgaagggcccagaatagtcaccccaacatctgatcctaaatctgaatctccatgactgtgtagccttttagccctttctaccttctgcccttccagtgcattccagaccttaatccaccccagcaaggatcgcctccatttcctcatgagtctgggatgttttgacatgaatgaattaaaaagtcttcccagaatacagaagagtgatttgtcgtcaagccaaagaggctttctgtcttcctctggtgtcctctaaacccagggggctgccaaatgccacagagacctccagggagagtgagagttatacttggactgacttcatcggtcagaaagccttcccctaacagcagcattatttctgctattaaccccatacatctctggataaagaaactgaaaacgtggcctttggaagaatcaacagtaatgttgtgaaaaaaatatatattcttttcactgaccgaagtgttttttcaaataaataatcagaaatgttatgctacacaaagtttatggtatcccttctctactaattcaatgactcttcaatgtgatgatcccaagcaaaaaaaaaaaaaaaaaaaaaaaatcaactactgatcagatggtcaatttctaaggaaaagatgtagagttattcaaaggtcatctaagtcagttcagtctttgcaaaaagaatatcaggaatgtaacgtccagtggtaaatggaacccacagtatgagaagtaacaagaattaaataggaagcctggaagcctgagactatagatctatcacagaagattcccgtaacatatcccagctctgagttcttagatttgttgatgtcaaggagcccaaatttctgaacacaaatgcctgagtttcagctggcttaagtcagagctggcatccataatgatattttgttaattctaattggttttccccacttgagaaggacccaactagtcctcagataggtacacttgaatgcaaacggttgggtctctgtccatgggtaatagcacgcacatgcaaccaatttaaaatactctgggtaagagagtcttctagagcataaactgtacttgagaaacctttgtgcttctggaaaatgggtttcatcatccttacatctgcaggttcttaggccacttatggtttcaatgctctgagctggcaagtccctataggtctatctttctgccagagagacttgcaggattataatctcacaatctcaccactcattactgttatgtcctctgcaaatctctctgcgttattttagccagcaccatgactgggcatccacggattactcttgattttctcttccctgattcacaggatgccagagagtctgagtatttagtttttctggtgaaagcattaaaattcacacattgcagcaaaatctgtcaaatcatttcacgcttattttctggggagaaaaatagaaaattacaccttgtttacaaatgaaatagtttcacttaaatgggactctagccaaggcagttaattagtcaaaagatccacagctgtcatatagtcacacattgtttattctatttgctatgtcgaccactgatgtgtatttaatattctgcatccttcacaggaaatgacaaatgccctgaattatttgcaaatagaattgctaatgaaaaagaaaaaaaatgttgatgttaattaaatggtgattaaaaatttatctcctttaaatctaaaaagtgcagctttaataatcagttgtcatataaataagtaccttgtactgaaatcccttgcggtttaagacctaaataaacactaatttgagaactctaaataccttacagaggagctggatatattcgttaacattatgcacattcctgtactgtttctttgtgcatagctgttgtgcatgaatccttgaaaaggggacatgcgttgtttctgaaatggagcctgtttgtattaaccatggctatagtagacatgattggactcaaagaaaaagaagtttgagtaggtggaagctaaatgtgttgcttgatatttaatgagtgaagggttctatgtaaaggcaattttccttccaaaagtactgtttattttcactggagacaaaattagacctttccagataccccatctctttttggtgaacagggttgaaagtgctgtggggtctatacttgaaaagttctcccaatatgcagttactgtttcccattcaatccctatacattgtactgtgttcatatctaattgtatcagatgaggtcagcttgccacttgatatagatcagagatgatcaaatgcacttatcctgtgaatacaactgcttgtgtacacatgtatataatatacatgcttgatttctacaattcacacgtaagtgtattatccaaataaaattgtacatattgtaaagtttatgttaaaaattaaatggtgatgatggtattaacacatggaaaacccattctggttatttttatgggaggatatttctgtagagagggcactatatttttttaatctcagttgtagggaggatgacagagcctaagtagaatatgggtgttggcgttcttggccccttctttaaaaaacaaaactctgggatgaggggtatagaatatattctgctcgcatttgcttctgaagacaatgccgatatggacttgtgtgtgatttccttaaacacatcaaagggcatagatttcctatttaaattccttatcctctttcctcacctgcactctttctgtgcccagcagtactttcagtatagtattagctagaagtgcctgcccagaagggtcttagaaaaatagagttcgtagaaccacaccaaaagttaggagaaggggaggagagatgagaaaaatgaagtttacaaatgggcagttgcctgtttaagatcatcaagttagagagtatcagagcgaggattagatccaagacatggttcaatttctggctcgattctctgaccgggctgacttatttctaggtttctttcaaggggaaactcctgagtagctctggaataagagccagagatccccataaggctgccctggtttttgttttgttttgttttttgtttttgccacttgccccagaaagacctacccatgcttctttgaatttggttttcctttaaactccctcacaatccctgtcttaaagttcctagaagagaaaacttttctcagagaccgtctccttaggaaaaatcaacagggatattgtttaaaacctcaaactgaagataaaaggctggcagtgaccattgaaataattgaggtctatgtatcatgcattgaggaagaaccaagcacattgaccagctaataggacttcactgaatgtccactttattttgaaagccagtttgggattgtgggggaggggatgcaaaataaatagaaaatatagtctcttcccataagtagcttatggtttagaagttcagttctctaatacaaaggataaccaaggacccatgcaatgcaaacagagactaaacagcaaaaattagaaatgacaactaaagttgtagccaggaaaaaaaaaataatctgattctatgagcataccttttttaaaaaaaaaaaaaaagtccttccctaaacctttaagtaactccggagaatagagttagtggtcccggaaatgcagttgatttattttaatcttcaaataatggacttaggagacccaggagctgctaaccaggtgaacacactcacactcctacatttttgcacaggaaggcttttgtctggttccaaccagttctccagtccttgccaaatcatgcctcctcccagccttgcattatgacatgtgcctcaagaaaaggttgaaaaaattccccaaaggattagaaaatagaccatgatgtaaaaagacgaagcatttccctaaagcttttttgtttggttttgtttttgacatttgaagaacccttctgatacaccagggtatgaatgtatcagggaagcatagagggaaaattctttatcaagttccaagtgcctactgctgtggctgacagaaagcatcaggttccctagagagaaaacggggcaaagagatggcaaaaggaatagaggtgtatttcaggaaggatggcgaggtggagagggagcttttgtcactctgtctatcccattctgtgcattcttggaatgttacattttctgcttatcgcaagtacttgccatggatctgcacctgaatttgaaaatatcaaaatatatctaaattgagtgtaggcgatattctaggcatatcctagaatgtgatcctcaaaacaaccttaagatataaatatgattgctcccattttacagataaggaaactgaggctcaggtttttctcaacctcgtcagcaactagaattagctagtaaatccctaacgttagacatattttcaaagtgcctggtctcctccagggaggtcagaatagaagtcagaaagagaggtgtgctcttttgaggttcctgggcatatacccttgagtatcagcctctgtgacagggaagtctgttagggtcttacccctcattgcctgatctgtgtgtatggagaacttctggggatctcacctctgttcatagttccttctgagacttgaacactgtttgtgtctccctttcatatgcttgcacttagcatttaaaaaaatttctggggagttattttctctacttagcatgtgcctaatcttaaatatctctttcctaatgtctcatctttttatcagtcaacatcagggctaattccattaaacatatatacatagtacatgctctcatgtgtgtgggtatgcacacacacacacacagccatgtgaccctccattaaagtcctcctaaatattgtgacccatgttcaaagaggtgatattatttgcaagttgactattcctcctatttcatgtctatgtttggttatctttgccaggcagatggaatgagtttcagaggtgggacagggaataggaaatagagtttctgcatgaatgatggagagctttggtagtcagaatgattgaggaccagctattaaaatgttgttgttgttttccttcttggtctgttcctttttttttttcttttccaaattgtcttagagataattcccggctcacttagcattaggataatgacggttattctgtcccactgaagagtgttgaactggaacgcttccaccgggctttataggtacccagaatggcctaatgtttaacatatcctgcaggcatgcccctgagcacacactgcctttcctgcattcccccctctccatggtctaagccacatttctttcctggcatttatatttactgagaggtgaggggtgcattaggcccatttgatggatgaggacactagcggggatttgaaggaatgtctttctgggagtctccatgaattctctggagagttagctaacttaatgcaagttaagtgctagtctatgagaaaaatttctcagctgttttcatctttcaagctggcagtaaaaagccttttaagacagaaagattattatttgttatttggagatcctgttgttgggtctacaagtgcgtgaccatgttctccttggaatgttgagctatgcagaaatggagcactccaaagaacgatttgaccaatagcatttcttctctgggggttgtatttcaaagcatgcaactctccagggaaccagaactaaattgcttaaaatgaagtcattcctcagattaacttcctcagataaagtgtcagcggtctgcagaaacgaagaagacaaaactgagattatcactcataattctcttacttactatgtcagtgaaacaatgagtttgcatttttgcaatcctagaacattcttcattagccctgggtcatgacctcttccagttaattctctttcacacctttaggaaagatttaagatgaaccttcaataggatattaacataactcatagccaataccacagctgcctttcaaattaatgaggttaattgttctccagcaaacatgagtttgtctttggcattttaaatgcttcccattgatctgacattttgctgtttcaagttttaaagggctcaaatcaaagactattgataactgagcaaagagcgaagatccagaaatacgaaaacattgtctttttttttccatgaaaaacaatcatagccttttgaattcaatcgaagtttctacattagccatctaagacttatttaattatttctgttctcagtcaagctaattcaagtgaatgaacagtattgacttttaaaatcttttttaaatttttttaaatctttagtttattaagtttgtagaaaagctctggggccatgaccacttacgtaaatgtttcagtttaaaaacaaaagattcaggcctctaatttgagccaaatccaggtgatcttgtttgaaatttttgatgaatttgaaaagatgaaagtggaacttttaacattcatgttccccaaatttttcactgggaagggatgctaattgcctacttaagatataagttcaagaataacattttcatagaaaattcagaaaactgcttgacacagcagtgacatagttagatgtggctcagatgccttccaaacctgagggtccccaaagatttctttaccagttgtttttaactatgaatcttaatcttgttcattcccctgccaaaacaaatttaaaagcataaacctgctgaattaattggcagaattcaccatagtttatatcaccccagaatgtttatgtgtatatgtttatgtatagtatatatatttcaagctgaatgttcagaaagaataaggtgagtttcttggtagcttgaataagaattagatcataaaaattataaataatggccttctcaaagaggataaatgattcatttttcactcacgtattaataatatgacttgttgcataatacacaagctggtcattgcctgcaagaaagttattgaattaagcagctatccaggtttatgtctgagtccatttttaacccaacaaggctaggattgaactccatatgcagagggtttctattcacagctacattcaaacagaatccaaaacccacatcagaactgacttgatgtcttgtatggtggagctgaaagcaagctgtctgctctaagcaatggtcttcatttgggaattaatgttcactgatcaactgcagcagtttatatctgtcatgttttaatccactgcatgaggaagtgctaataagtgtattaaatatttccaagcatagctacaaaattatatgtttgcttaacacctttctatgatagaggaagtatatactatggttgtcttcttgtagtatgtcttttaattttgttcaatgtgttatcaactgttttaaggaatggggattgaaattcgtgtgcaaactgatatgtatataactcctgaggcaacagaagtgcccggtcatatggtgtaaaaatgtaaatacaggaaaatttcatttttctaataaagataatttctgccaattgatatgaaaatgagaaa

SEQ ID NO: 16424 - DNA, 4395 bp, Artificial Sequence
  derived and/or modified sequence
atgggcagagtgggctattggaccctgctggtgctgccggcccttctggtctggcgcggtccggcgccgagcgcggcggcggagaagggtccccccgcgctaaatattgcggtgatgctgggtcacagccacgacgtgacagagcgcgaacttcgaacactgtggggccccgagcaggcggcggggctgcccctggacgtgaacgtggtagctctgctgatgaaccgcaccgaccccaagagcctcatcacgcacgtgtgcgacctcatgtccggggcacgcatccacggcctcgtgtttggggacgacacggaccaggaggccgtagcccagatgctggattttatctcctcccacaccttcgtccccatcttgggcattcatgggggcgcatctatgatcatggctgacaaggatccgacgtctaccttcttccagtttggagcgtccatccagcagcaagccacggtcatgctgaagatcatgcaggattatgactggcatgtcttctccctggtgaccactatcttccctggctacagggaattcatcagcttcgtcaagaccacagtggacaacagctttgtgggctgggacatgcagaatgtgatcacactggacacttcctttgaggatgcaaagacacaagtccagctgaagaagatccactcttctgtcatcttgctctactgttccaaagacgaggctgttctcattctgagtgaggcccgctcccttggcctcaccgggtatgatttcttctggattgtccccagcttggtctctgggaacacggagctcatcccaaaagagtttccatcgggactcatttctgtctcctacgatgactgggactacagcctggaggcgagagtgagggacggcattggcatcctaaccaccgctgcatcttctatgctggagaagttctcctacatccccgaggccaaggccagctgctacgggcagatggagaggccagaggtcccgatgcacaccttgcacccatttatggtcaatgttacatgggatggcaaagacttatccttcactgaggaaggctaccaggtgcaccccaggctggtggtgattgtgctgaacaaagaccgggaatgggaaaaggtgggcaagtgggagaaccatacgctgagcctgaggcacgccgtgtggcccaggtacaagtccttctccgactgtgagccggatgacaaccatctcagcatcgtcaccctggaggaggccccattcgtcatcgtggaagacatagaccccctgaccgagacgtgtgtgaggaacaccgtgccatgtcggaagttcgtcaaaatcaacaattcaaccaatgaggggatgaatgtgaagaaatgctgcaaggggttctgcattgatattctgaagaagctttccagaactgtgaagtttacttacgacctctatctggtgaccaatgggaagcatggcaagaaagttaacaatgtgtggaatggaatgatcggtgaagtggtctatcaacgggcagtcatggcagttggctcgctcaccatcaatgaggaacgttctgaagtggtggacttctctgtgccctttgtggaaacgggaatcagtgtcatggtttcaagaagtaatggcaccgtctcaccttctgcttttctagaaccattcagcgcctctgtctgggtgatgatgtttgtgatgctgctcattgtttctgccatagctgtttttgtctttgaatacttcagccctgttggatacaacagaaacttagccaaagggaaagcaccccatgggccttcttttacaattggaaaagctatatggcttctttggggcctggtgttcaataactccgtgcctgtccagaatcctaaagggaccaccagcaagatcatggtatctgtatgggccttcttcgctgtcatattcctggctagctacacagccaatctggctgccttcatgatccaagaggaatttgtggaccaagtgaccggcctcagtgacaaaaagtttcagagacctcatgactattccccaccttttcgatttgggacagtgcctaatggaagcacggagagaaacattcggaataactatccctacatgcatcagtacatgaccaaatttaatcagaaaggagtagaggacgccttggtcagcctgaaaacggggaagctggacgctttcatctacgatgccgcagtcttgaattacaaggctgggagggatgaaggctgcaagctggtgaccatcgggagtgggtacatctttgccaccaccggttatggaattgcccttcagaaaggctctccttggaagaggcagatcgacctggccttgcttcagtttgtgggtgatggtgagatggaggagctggagaccctgtggctcactgggatctgccacaacgagaagaacgaggtgatgagcagccagctggacattgacaacatggcgggcgtattctacatgctggctgccgccatggcccttagcctcatcaccttcatctgggagcacctcttctactggaagctgcgcttctgtttcacgggcgtgtgctccgaccggcctgggttgctcttctccatcagcaggggcatctacagctgcattcatggagtgcacattgaagaaaagaagaagtctccagacttcaatctgacgggatcccagagcaacatgttaaaactcctccggtcagccaaaaacatttccagcatgtccaacatgaactcctcaagaatggactcacccaaaagagctgctgacttcatccaaagaggttccctcatcatggacatggtttcagataaggggaatttgatgtactcagacaacaggtcctttcaggggaaagagagcatttttggagacaacatgaacgaactccaaacatttgtggccaaccggcagaaggataacctcaataactatgtattccagggacaacatcctcttactctcaatgagtccaaccctaacacggtggaggtggccgtgagcacagaatccaaagcgaactctagaccccggcagctgtggaagaaatccgtggattccatacgccaggattcactatcccagaatccagtctcccagagggatgaggcaacagcagagaataggacccactccctaaagagccctaggtatcttccagaagagatggcccactctgacatttcagaaacgtcaaatcgggccacgtgccacagggaacctgacaacagtaagaaccacaaaaccaaggacaactttaaaaggtcagtggcctccaaataccccaaggactgtagtgaggtcgagcgcacctacctgaaaaccaaatcaagctcccctagagacaagatctacactatagatggtgagaaggagcctggtttccacttagatccaccccagtttgttgaaaatgtgaccctgcccgagaacgtggacttcccggacccctaccaggatcccagtgaaaacttccgcaagggggactccacgctgccaatgaaccggaaccccttgcataatgaagaggggctttccaacaacgaccagtataaactctactccaagcacttcaccttgaaagacaagggttccccgcacagtgagaccagcgagcgataccggcagaactccacgcactgcagaagctgcctttccaacatgcccacctattcaggccacttcaccatgaggtcccccttcaagtgcgatgcctgcctgcggatggggaacctctatgacatcgatgaagaccagatgcttcaggagacaggtaacccagccaccggggagcaggtctaccagcaggactgggcacagaacaatgcccttcaattacaaaagaacaagctaaggattagccgtcagcattcctacgataacattgtcgacaaacctagggagctagaccttagcaggccctcccggagcataagcctcaaggacagggaacggcttctggagggaaatttttacggcagcctgtttagtgtcccctcaagcaaactctcggggaaaaaaagctcccttttcccccaaggtctggaggacagcaagaggagcaagtctctcttgccagaccacacctccgataaccctttcctccactcccacagggatgaccaacgcttggttattgggagatgcccctcggacccttacaaacactcgttgccatcccaggcggtgaatgacagctatcttcggtcgtccttgaggtcaacggcatcgtactgttccagggacagtcggggccacaatgatgtgtatatttcggagcatgttatgccttatgctgcaaataagaataatatgtactctacccccagggttttaaattcctgcagcaatagacgcgtgtacaagaaaatgcctagtatcgaatctgatgtttaa
